United States Patent Application Publication US 2014/0057251 A1 - sequence listing, part 86

SEQ ID NO: 145996 - DNA, 862 bp, Cannabis sativa
ttgccaatagaataacctccgtcgctgacattgatttgtctcgccaaaccacctcatttcgggcataccaaatcgcccaaagaaccatgagcagctcttcttgggccatggatgagtgttgtagcagaatgtggctaaaccaatcccaaaaagactccataggcgtatgacttcaatttataactgaaagatgccaacaagatcttgcaaaagaacattgcaccaacaaatggaaaatggtctcaggcacctagttacacataggacaaatttggtctagagatatatgtttggtagtaagttgaaccttagtagccaaacaaccagataaagcacgccacatgagttggtgcactttggggagggacatgaagcttccatgcaattttccatatcttaatctcaaattcactagtattagtgatctctgaatggtgcaacaatcgatatgcctccctcatagtatagaaaccatgaagatccttatgccaataccaagtgtcaatgagagtctcctgatcaatgttggttcgaatgataatctctttatctcggtcattgaatatatccaaaaccacctctagatcccaagcccgttctcctaccaccatgagatcattaatcgtccacgtctccataccattagcactagaagtaacccacggttgagaatcatccgcgagccacagatcaaattgaacactaatgttcgtacctggaccaaccacccgacgagctccctctttaatcaaatcttgcatttaaaaaatactcttccatatgaagctaggattcggcccaagagaagcactcaaaaaagaaccctgaggataatatcgggccttatatacccgactaacaa

SEQ ID NO: 145997 - DNA, 849 bp, Cannabis sativa
  modified_base (276)..(290): a, c, t, g, unknown or other
  modified_base (779)..(780): a, c, t, g, unknown or other
aaaataatttccaacaaaaagatcgttgaactacatattattcttatctttttccacccgtatcagatcaaaagatctttctatttaataaattctgaataattgtttttagaattaacaattattcataaacacataaagaaattctaagtgtttatgtaggattaactctttgaagagtttaagatactatagaatttgtgtcaataaaaaaacacatacacatacaatcataaaaacatataaatataattggtactggcatacacaagatannnnnnnnnnnnnnnaattcataaatgcaattcattttcaaaatagaaagctttattataaaattctccaaaattaaaggaattgtcggcaacaatataaaaaaatagggaataacatcccaaactaataattgaaatccaaattgttctgaaactaaaacaattaattcaaaaataataggaaaaaaaattcgagcgtcatcttcatcttggactaactccaccctttttgtcaaaccattcgattcaactcgctaagatagcatccgagttcaagcagctggagctgtaataagaagaaaagcaaataaatatggttagtagttccagaattaataacccaagtggataataattcactaaaacacatcagtttataggaaaagaaataacttgtttctttgctagaaatttagggcattgaggtttccaatgtcctttttcattccaatagaagccttttccttttggtgtaccaccaggagtagcagcctttttcttttnnactgttttcacagcttgaacaggcttcttgctatttttccacttcttctttgtcttaggtctggaagta

SEQ ID NO: 145998 - DNA, 667 bp, Cannabis sativa
ttgaccaaccacttggtgatgggattcacacacctaagtgtgcccaaactagggtttatgggcctgcataagcgttttcaccctagagacctcaatccgagaatgagaccaacaaggaattaactaatttaggcataaaaaggcttaaatttgaacataaagtcaaaattgcacaagaatttcatgcaacatggcatatgcgaccactgccacttgaaggtggcagtgatctccttctttttggagagcactgccacaagaagatggcatctctctctactcaaaaaataccaaaggggacttgtcaaaatgtgttccctctacatctaagtgtataacacaattgaaagaaacaatttcccaaaagcacaagcctagctgaccactgccatctttgtggaacaaagagtggtagtggttagccacatcaaatggggatgagatttttttgccaaaattacctttgcatcataaacatgtcaaaaccaagtgagaaaatagaaactactttgctgaccactaccatctttttagcaaaaatagtggtagtgttcggccacaacaagaaatgaggagtttctttggacaaagtgtatttctaacaataatatgtcaaatataagtgagaaaagccacccaagggtgtacatgttggaatttattttac

SEQ ID NO: 145999 - DNA, 654 bp, Cannabis sativa
taataaaaaaagaaatattattttattgttgacggattatagtttttgctttaaagattaacatgtactaaattatgtcttttaaaatttttaggttattaaaaaatatttctgaactattgaaattattagattcaaagacttctatcctgttttactaatgaaaggtactgacgtagatgaaagttcataggacacgatttggtacatgtcaaaattcgaggctataatttagtatatgtcaaagttcggaggatacgatttagtacaaagataatcgtaacgttagtaaaattgaatgaaatcagacagaaaccctttcaatagttcgggaagaatttttaacatcctaaaaatattcagaaagtatgatttggtacatgtcaaaattcggaaggacaaaaatcctaactagtctatcatttttgatcttggttatttggatgtcaaagagatcaattaggcttcaaaaaaacattaaatatgccacatataaaaattaaaataaaagagtgttcccaaataaaatatttgaatattgaatacttgacaaaatttgagtcaacatctccaatatatataattcatgaattcatacaaactattataatttacttctttgtaagagtcaagaaaaattataataattttgta

SEQ ID NO: 146000 - DNA, 1190 bp, Cannabis sativa
  modified_base (1161)..(1165): a, c, t, g, unknown or other
catgatcaacatggctcttatcagtataaccaaagcaggtaagtaataagagtaacaaaagaacatatttctttttattttttttttaaaaaaaattggcagcataacaaatgtattttgaataaacccaaaaatcataacctgcataaatattttcacacaaaaatatatttggcactcagtgtcccagagcagtctagaaaaatatgcagattaagttttcagtttttcaaacaattttgtaaatcataaaaattggaatacgtctattgttatacaacacatataaaaatcaattccaataatcaagttcagtccctagctctttcgagtcgttaaaatttttccaaaagacaatcttaatctcttaagtcccgagctctaattgttttagtccaatcttacatattactctcacctatatcatcaaattgttaaataattatcatgatcgcattctacattaaaaaccgagtccaacgacatacaatatgactacatttaaattttggggttacgaaacctcacctaagcggtgcacattaacaatcggtggcggtaaaaatcggtgtaccagaaacgtcgccgaaaataggggtagtgaatatcaaaacgaccacctcgacgagtagatcacacccatgccaaccgtttgtcaaaacggtacacgatgtcaccagaaagttaccggaaaggggcggagctacaaaaatgtcaccggaaaaagtagcgaaccgggaaaaatggtttagtgtaggttgttctcctcaacgagctgagtttagtggtgaaaacgtctcgtcaaacggacgccgaaggtgaccaaaaaatccattaaaagtttgaaactccaaactttgacttgcgatcccgagctaacggcggcgaaaggagcggcgccgcttgggggtgaggtcgtcggcacttgggcttccaatttgtctggcgcgtgaggtcgggcgatggttgggggtgggtcgccggagtgtggtggttatggagctttgtgggttttcttttgtggttgtgtttaaagagagagaaaaagagattgagtgaagaagaggacgggtgagtgagggaaaaaggtctgactatttacttcttttttttatacatatattgaccgagatctcacagttataatcccaataatcaatnnnnntctatagatgatttacattgtatag

SEQ ID NO: 146001 - DNA, 937 bp, Cannabis sativa
  modified_base (559)..(569): a, c, t, g, unknown or other
aaattataccttaggaagatctgaaaaataaaaataaattactttccatccttagtattaattttccaaaaaatattaggaaaattacttaatttaagttggtccaaaattaattcgattattaattttcaaatcaaatttaattttctataaatatataatgaattcgaaatccaatggataaagatacatttttcgaaattcatataaaataaaataaaataaatctggaaaaattattctaattcatgttggtctaaaattaaataaataaattttcaacataaatataattttcctatttaattaaatctttcaagaaaaatatcaaatatttaagtgtctagaataaaatcaacttaaatattaattttctaatataattaaatatatctagaaaaataccaaaaagactacctagaaaatatctatctagataattcataaactaattactaattttgtaattaaaaaaaaatatattttagtctatttattttaattaaatcattaatgaaaattacttaatttaatttgatctaaaattaattaaaaaatnnnnnnnnnnntttaatttaattttcaaaattaaaaaatttcaaaatatctgcatttaaaataaataaatgcaattcaaaattaagtgaaaataattattaaaataaaataaaatatactctgaaaattaatcaatttaagtttatctgaaattgaaaaatttcaaacttaaatataattttctatttaattaaattcattaaaatagaaataattaagtatctggaataaaatcaacttaattattaattataatttaatatttagaaaatattccaatttaagtttgtccaaaattaattaaaaaattaattttcaacttaaatataatttctaattaattaaattttatgaaatagaaacaaataattaagtatct

SEQ ID NO: 146002 - DNA, 636 bp, Cannabis sativa
  modified_base (580)..(587): a, c, t, g, unknown or other
tcatagacagttaattggtgatcaagcaattaaaagtaattaagcacgaatgaaatagaatacatagaaactggggagaaaataaatcctattaatatcataaagtaatatcaaacaatatccatccaactctaatgaagagtttagctactcatgtttatgaaagtacaatcacacatattaactttaagaaaacagaagaaaatagagcagaaaagaatgttgaaagccctttgaaaaatgcctccagaattgacttctgtctctaaaatttgtactcctttttccctccaaattgcctccctaaaactattgaagtccacttcttttatagccaaaatatgataaaataagataaaaatcgttgaagaaaaaaaaactattctccttaggattagaagaggaggtgagttttctgttgtgtcgactgatagtattttggccataactctctcgatattcctcggaattagacaattcaagatgttccggaaagataaaagagagatatagaactttcatatcagaacatagtcgaactcaggcttgaatttttagctttattttcttgcacaatttnnnnnnnnttaaatatcatctttttgtgagatattttatctttctcccatctttttt

SEQ ID NO: 146003 - DNA, 897 bp, Cannabis sativa
aaaaatataaaaaaaaaaaaagaagaagaagaagaagacaatagtgtaaagacaaaaaaggtgtaaaaatactataagctaggttccattatttccttaactttattaacattagatcaataatcaagggctagaaaagtattcctatcatagagacaaaatcaaggtctccaccatagacatttccaataaatatatatatatatatatatatataaaggaatatttgaaggagtttaggtgacaatctatttgaagtttcttccatattctttattttctaaatttttgtcaattatttaatttttttattattttcagctcaaaatttattatatgctattattaatagagtaacttacatacatattaatttattattaatggaatggcttaagactacataataattatatgaaactaatttatattatattggtattctttaatacaaaatatttaatctattttaaattccaatattagtatgtctattaaaattccatattcaattctaataataataataataataataataatatgttataaaataaattttacttttcatatatctaaaacaattataaataattattcatataccacattaaattttaataataataataatatgtctactccaattctatattttattctcataattataataattataataatatggtataaaagtttttttttctataaaaggtgaagataaaccaaactcaaataattataaatttatgtaatatggtgatccactacaagaaatgtcacttttaccagtacagttcgctactacgccaggtaaaagtaacttttactagtgcatttcacaaactgcgctggcaaagaggtcaaagttttaccagcgtacatttgcagtgg

SEQ ID NO: 146004 - DNA, 988 bp, Cannabis sativa
aaatatgagtgttcttcattaaaaatttcagtcacaactcaacactcttagccatattcaaaaagtgaaagtaccaagttaattttagaagcaaaataaaagcctaaaattatactactaggtaattcagtcacaattcaacactctcagtcatattcaaaagtgaaggtaccaagttaattttaaaagcaaaataaaagcctaaaattatactactaggtgacactatgaaatatgatgggttatttattaaaaaatacaatcacaactcaactcactcaaccttattcaaaagtgaaggcactacgtgttaggatttatgccttgaaaaacctgtaaagatgttttgattttataagttgaaaaatttgatatatgtttgaatgttgaattatttattaataatttatatataaatatataaaaaatttcttatttatatatgaggttgtgactttgtattgtacggagaattaagatgacgagctatgaatagagttatgaaatttgtaattaatggttgctagtatggttcactgatgttcgttacttgatgtaagcaatcttgattcagatcgttgatatagatggacatctcagtgaatgtgttgtatataatagagattatacatgataatatcgttatgtaattaaactatctttatcaaactagtcatttactataaagatctaattcatatcataaagatgatcaattagtagatcaacctaaatcttgagaaatcatgaactcctattcatattgttagttttttttttttatttactcgttaaattttcttagcaaagatgattattacaacttctgttttgaaaatctaacaatgtagatggttgagaacttaatttaccatatggaattctcactttcttaacagattgaatattaattttcttttaagtgttaattctaaaacttgattaagtgaatggaatttaaatatagaaataccctttttataggtat

SEQ ID NO: 146005 - DNA, 903 bp, Cannabis sativa
tgcctattaaattctaccctgaaaattgtactttgcaagggatttggggtaatgggaaccctcccaaatctgtcgacagaagggatttaattccctttgctatcttgagtttgaatcccacatttaatttggtctgcaaatgtgttctgtctattgccatattcaaatcctttgtgcagcaaatctacccagtattaaatgccttcgatatgactgatactgcttcgttttacccctataccgtgagtgtttatctatttatagtcaagtctaggagaagctttgctttgtgcgatttagctatatatattttcccctctctgcaaagtatactgtactttaggttttgctatactaatttttggttatccctttctactgcttccatcttcccctctctgagttccaaacgattgttctcactgatatgtatccttgtgtcttttagttttagtttccaaccgtggtccgtttgttcacctgtgcttttattttcccataatacgttcatatatagtaagagttgcatatcggtcagctcattttcgtttgtttgtgttatttttggaagagtatattgggttagtctggggtttattcttgaagccgtggttctctctcacataatctccttacccagttattctacttccctgtacaaccttgctgtcaaccaatttctaaagcatctcctatccattaccccaacaaaatacttgtgttctcaaactaccactcggtctctctttatccttcaaactctgcctggtcccttcttgctatttgcttcttactgctctttagctatctactctatggatgatctaacaaattctctctctgttgctctcaacctcacagaaaccgagtgtactgttcaaacacttcacgaactcactcctg

SEQ ID NO: 146006 - DNA, 760 bp, Cannabis sativa
aataccccttaatggttattatgatttttagggtggaagggcaaaatggtcattttgcataattttgagttttgtcttatgcgggtcttattaagcttattaatttgattttcttgattaatgttggctgtagcaaattaataaaacaaatttcttttcctcatttatttaaaaaaatagggaaaaaaatacatgaaaaaagactctctttcaactctctccttctctctctcaaaattcctagagcaagctagggtttggttttctttctaaaattcaagctaaattcaacaggtttttggtggtctcaagctctaggtaagcttcttgtacctctttcttggatttcttgaattttaagttagagattttttgcatgaatttgagatagttgttgctgttattgctgtagttgtttgatgttttttttaggttagaatatgtttagaaatgttattttgagcatgaattaagggctattagtaagtttaaccaacctttgagttctcaaagttggactttaatggtgattttggattttgagcttgggtaactgtttctttgcttggaaatggtttattcgggtataatatgcaggtttaaaaggtttgagttggtttgtaattgatttggttgagctttgaaattttttgggtttcctgcagaaaatcgggtaactggtttttgcagcagggttccccaaaaattttagctcgtcgattcgtcctagttttaggtttttggttggttgattccatgc

SEQ ID NO: 146007 - DNA, 607 bp, Cannabis sativa
atgctttacaatgtaggggcatttcagtggcacgagaactgctgcgaaaattcttcaaagtggattcttttggcctactcttttcaaagatgctaatgagtttgtgaaggcatgtgatcgttgtcagagaacgggaaacatttctagaagaaacgaaatgcctttgataggtatcttggaggtggaattgtttgatgtttgggggatagatttcatgggtctcgttccttcttttttcagcaatttgtatattttgttggctgtggattatgtatcgaaattggttgaagctgctgcaactccagcctatgatggtaaaacaattttgtctttccttcaaaagtacatattcactcggtttggaactccccgagcaatcatcagcgatgaaggtagtcatttttgcaatagacaatttgaagcactcctatctagatatggcgtccgccatggaactgctctaccctaccatccactaagcaatgaccaagctgaaatttctaactgggaaattaagatgatattggagaaaacagtgtagagattaaggaaggattggtcacaaaagttagatgatgcactgtgggcttatagaacaacgtttaaa

SEQ ID NO: 146008 - DNA, 597 bp, Cannabis sativa
  modified_base (188)..(207): a, c, t, g, unknown or other
tttgcattggcttcattacacaacttgtatggtcaccaaatggatgtaaaaacaacattcctaaatggtgaccttgatgaggaggtctatatggaacgattcgaggggtttgtcctaccaaacaatgaatgtaaagtgtgtaagttgaagaaatcattatatagattaaagcaagctccgaaacaatnnnnnnnnnnnnnnnnnnnngctattctttcaaatggctttaggtataacaatggaaacaagtgtttgtattcaaaaacttataaaaattatgtgataattgtttgcttatatgtggatgacatgttaatccttagtgataacatgaaaggaatagaagaaactaagaggtttctttctttaacctgtaaaatgaaagaccttggagaagtggatactattttgggtatcaaagttacaagacatagtggaggttaaactttagggcaagcgcactatattgagaaagtgttgaataaatttagccatctaaaggctaaagaggccaacacaccattcgatcatagcaaaccactagtgaaaaatagtggtagagcggtggctcagttggagtatgcaagtgttataggg

SEQ ID NO: 146009 - DNA, 548 bp, Cannabis sativa
ccaggttgacaatcaacttggtgcactggtttcctccaagcattctctccaaaattgtcaaaacaaggtaagagacctcgtcctcaagttcaaaaaccttggaagtatcaaaatgacatcccagaagctccgaaattagcacccaacgtcccggttgacatgtggcctagtttgttgggttctgcttatctgattatgattctatctcgaccgttagtctagtctttcataataactgagagccatgaagttagaagaatcaaatttacaacttcatattttcacttttctaacaaggttatttactcagaaactaggtagtttcaagtctctcattttcgtagaacagcaacatgtccgagaattggtaatcagcttcaccagaacatagaaatgggttaagtgatgtctaaatatcacttaggcatcaaaaaaaacatctttgacgtgttttcccacatacccagtgttcaggttgaagttgttgcgaaaattattaattactacgcaagtgcacgcaatcaagtagtatactcacgcaagtgagg

SEQ ID NO: 146010 - DNA, 809 bp, Cannabis sativa
  modified_base (268)..(268): a, c, t, g, unknown or other
ggaaatgaaggtttattatctatctttaattaaatttgtgataacactattaaattaaatccccataactccctgtggggtaaattaagagaacttaacttaatatattatcctaaataattataaaaatataataaaatccctgtgaggtaaaattattatatcttaataattaattacaagttatgtccattaaggtgaattttaattaatatataattttatacaataaggatgatgtggttactccctaattatataaaattanatttttactttgacattaggtattgggctctacctaaaagtaatttcgttattaacacagtagacaatcactgagattagtgctcctagtgtggtcatccgaagatcattaaaaaccgttctagatatgagcatttgtcccaagttcatgttttcttttgttaaaccacaaaattacttacattttattcattttcaaaatgttttatgaataatttaatgaagttttatgaaacttaatgtgctataagatattcaacctatcttaatgtttgaatatttctaaatatatctagcactataaaaagaatttatgtataacatttaaatcatacaaattaaaattaattgtattaaaaatatattttccaaataaatataaattaaaacaattattgtatgataataaattaaatgcttaattccattatatatttataaccatataatatctttatttgtactaataattaatttgtataaataaggtaaatatacaaattagtacaataaattatatgaaatgaattaaatgcaaaatt

SEQ ID NO: 146011 - DNA, 801 bp, Cannabis sativa
caattccatgtaattagactcataatgatgggtgggcttgggaaccaagacccacctttgacatgttttttggcccatcaccaacatacatttcgttcaccaacaccacacacgtaccatctgccacatcatcattttcaccaacattcccaccttccatgcgcctccttttagagtctaggataattttggaaacatcctccccatcatcctctacgtgaacatgactagctgattgcatgggattttctttccatatttgttgactagatacagcaccactttgaatgctatgattctttccattattatcaccaccagaattgataccatttccttgaaatgaggaatcaacctccatgatcctagtcgctgaatcaggtaacttctcttcccccaatcgccgatcatcatgcggctccaccaccacctgttgctccgttccagaccgcaaccattgtgaaccaatctgataattccttcttctcatctgcgccttcatgccaataccatatggcttaacaatttgatcaatatcttgatcaaaacgtttagcacagaaccgttcagaatgacctatgattccacaaataaaacaaaaggttgggagatgttcatattgaaacatagcccaaatccattcaccattttccttgtacaatttcatccggcgtttgagcggcttttcgatgtcaactgtagtacgaaccctcaaataatccctccaaacaccaacaaaattctttggatccgacttcacatatgtcccaatgtaattccccgcactacgcaccactttat

SEQ ID NO: 146012 - DNA, 540 bp, Cannabis sativa
gtactgaataaaagcttcagtgatcggaactggatcctcaattctttcccctctagcatcaacaatagaaagaatcctattttgccttcttctttctgtaatacttgagtggaataatgaagtgttagaatcaccttcctttaaccaattagccttagctttttgttgcaagaaagatgataacactttatgtttttctgcatatatttcccgagcctctctctcttgattttgccattcagcattcaaaggatcactcgccagcttctgttgacacttaagcatcccatccttagccttcaattcatcactatatacattggaaaacccctgttttttaatcgcattcagcacctgtttcaaacttcgtaatctcttaacaacttgaaacattttcgaaccaataactggtttggaccatgcttcagcaacttgttcatgatataaagggtaactagaccacattcgaaaatatttaaacggtttcctaccacttggaggcgaaggatgaaccgtcaatattgccggagtgtgatcaaa

SEQ ID NO: 146013 - DNA, 1049 bp, Cannabis sativa
  modified_base (451)..(452): a, c, t, g, unknown or other
agcagtctttttgttaattttttttatttcatttagataactggttttagtaatgacaatgatacttaacggtttaaatgtttttgtttcacttttgttattttggatgtgttatgttaaacatactatgttacggttattaatggaaattgatgttatatctaaaaagtggtttttataagtagttttgcgttaaatttttcaatttttaaaaactaatttttgtagctaatttattttttcaggtaaaactggttttataatatttttaattactttattagaaatttttgaaagtcatttttttcactggttatgtattgtgggtgtgttttttttttttttgtttattaatttggttataactggttttttgttttgtttaatgttgttttgtaggatatggtgtgttttgaaggtactagtaggcacatattattcaaatttcaanntatctatattttgtaatttttattattgatgcataaccagattctttaattttattaatatttatagtaaatatgataattatatactatttatcttgatgacatttaaaaaaatatattttttaacttccttaatatcaaaacatctattttcctctctaaaaaaagcaaataaataaaaaaatctatttttaaagtaattttgtcaaatgtcatatataatagcaaagtaacccgtttgtagcttttgtaattgtagtttttgaaagctacttttttctccaagtgcttgttctattacttattgttgctttgtgtccatcttctgtttcttccgattgctttgtttgtaaatctgtagattgttgcatgttcttcggttgtgtccaagttgtccacagcatatcattacaacttttggttttcctctagatctgattctttttttctaggtctccctgaggtcttttttgtttttggtggcatcaaaatcttctccaagctctcaagtagtctccattcactttcattaggtagaggatgtacagttgtatcatatgttgctctcatagttgatgttttgtagtagtcagccac

SEQ ID NO: 146014 - DNA, 1131 bp, Cannabis sativa
  modified_base (901)..(904): a, c, t, g, unknown or other
tggtcagatcgtgatcaagtaaaacttactaattgccgcttatttggaaattaaaaacatgcgcctattctactatcaggctactaacatgcttcgtaacagacttttcttaagtcatacaattaaaataaactactaaagcaataaaagcttattgaaccgtgaaacgagctgatcgctgatgatgattgtacatgtcatgacgatcttcggaagacaacctggcagctctgataccaaattgtaacaccataagtaacttaggcatgttaacgtgatttttaacgtactgtgcaactcgttgctaatcaacgagattattaaaaaacatgattaattaaaattttacttatttaatcaaaaacataacgtaacatacataaaaaatatttaatatatattagattttaaaattattattttctacatgtatatataatattagagaacattgtcccacttggactaaatgtaaaagtattgagccatatataattatatggactactccactcatcaccaattggtttttagatggaaccctatgattcgcaacatggtatcagagccacattcctagcgggctttcaatccacaccgatccagatggttagccagccgcacgagatccagatagtgcaaagacgtttgagatccgaataaaaataagcgagcaaatggcataacttgtgataaggtgattcaagattagtgagcaaaaataatcaccatcttgaggggaatatttgagaacattgtcccacatagattaaatgttaaagtattgagctatatataagaacatggactactccactcatcactaattggttttgagatggaacccatgattctcaatatataacttttaaaatatatatttatatctattctatataannnntggctatataacagaatttttagtttaacgatgttttttgggttttacgttaattttaagaaaataggaatattctttattaattttgtaatatttttttatatatatatatatttaaaaataaaaaattatataattattttgtataaagaaattttaatttaaaatagttaaaatattataaatatttttaatcatatttttaaatttattggtttaactttaaa

SEQ ID NO: 146015 - DNA, 685 bp, Cannabis sativa
ctctctctctctcttatttctttttgcatgtgtgcagcgcggttttgggtttgtgacggaaggtggtggtatgggtttgtggccgacgatggtgttctggaagttatggccgacgatggtgtgggtggtgagttatggacgacggtgggggattatcgtactgtatctgatttttttttttttttaattttttaggtttctttttctattttgttcctaagtgtgttcatacaatattttcattctgttatttgtatttgttaattaatgtgaataattttagtttcaaagtaaagttttgtattttttctcctgagtaattgatttatagaaagcatgtgaataatttcatattttgttaatgttaatgtatttttaattatatcattaatttaaattattataacaaatttataatatataatatgaattataaaaataatatgaattattattattaatttttttttatataaataaagaagtatacaaatttgtatgaaaaaaagattagtacagtattggtaaataaattgttcatttgtaaactttttaacaaaatgattaatacaaaatattgtttatttaattaaaattattattgttatccttaattgtatttgtatataattaatataaattattattataaaatttgaattaaaataattaaatattatttttt

SEQ ID NO: 146016 - DNA, 822 bp, Cannabis sativa
aaagtaccataccaaaaagcctctaattcttcttcttcttcttcttatcttgaattaaataacaaatttcattagaaaaaaaatacataaattgagttattaattgtctttccctatcacttaaatcatcattattaatagaaatttttaattttaagctacatacttaaatttttaacttttttcttgtttactgtgaggcgaaatatttttaaaaaatattatattttttttttcaaaaatactatgtatttttatactgttgtttcatgattgtctttgagttgttttactgttgttttaattgttgtattttgttgttttatggttattttataaaaatatagtatttttataaaaaaaaaatatgtaacagtagaattgtaaacttttacctaaaattcaacatttttataaaaaccccttgttaatattatttgtttaaaaatatctaaatttatagttttgcgtatcatatatcgagctacctaaaatgggaaagttgtacatgttaatttaccatgtgagtcaaataattatatttatggaaaattgtaataaatggccttaaatcttacactgatgaaagttaatgtctattttttaaaaaaatcaagtaaatagtctttttataaatgttaatacctaaaatgtccttagttatatagatggagctcaactccattttttttatttattctactgtttgcgcggtgaaaaaacatagacctccaatgaacataaaatcaatatacctcaatcaaatataactatacctcatacttaaactaatattttatgtttttttccctctttcattca

SEQ ID NO: 146017 - DNA, 522 bp, Cannabis sativa
ttataagaaatttgagaagactaaatagaaacaaaaatgacaccaagtttttacgtggttttgcagttaactctgcatagtccacgagtctatcttattcagatatcttttggatacaagattagggttttacaattagtatctcttttctcaaagattttctgtcccctttttttgtataatctgcccttatttatagtaatataggtaggcagttaattacatttaaatttgaattccataacaatattctcccaaaattgtgggctttaattacgttccatttaaatacgtgtagataacattagaaaaacacacaactgtgacttaaagtatctttaatgcggtcaacgctgacaggaataagaactcccttccaaaggtatctcgccggaggcatctcactttgtacacagatgaatgactttggtttactcgtattctagcaatggcatgagcaccaatataccgagcaaatttaagaactactctttgaccgtaaggccttgcagactggacaat

SEQ ID NO: 146018 - DNA, 779 bp, Cannabis sativa
aattgatcggtgaactttttctttttatccaacacctaaataagttccagtaatgcaaactaaaagcacacatttggccataaataacttgaattcatcttcatttgccattcctaattattatggaaaaaaaacagaaagaaattcatatatcaataataataattgcaagttgaacaacataatcaataacataacttataatgttaaacaactcaatgcatgttttataatataaaatattatttttgaacataaaaaaaacataatgaaagttccataataaaaatctaaaatgcaaactaaaaaattagctatttagaagcctagttgttgataaattcatttctttctaagttctggggacattatagaaaaaaactcagccttcctctcatctataagaatgttaataacttggacaatccattcatcactaagtcctaattccataatcataagcattagcttctcggcaaaactatttttaggttctcgttgcaacttaatttgctcttcagatattgatgtccaatggaaattctatttctttttggacgagatgtaaatgttggttgatcaggtaaatgtctttttcctatactcttatcatgctaagttgattgattttgctcactatccattttgcttatatcatgatcaagcacatttttagagtcaggaaattgtgtatcaccaactacatcatcagaaaattcattttggaagtgttcaacatcatttacttcacaaccatttctaccatcagcaacaacatc

SEQ ID NO: 146019 - DNA, 535 bp, Cannabis sativa
tcgctgatcgtactcttttgagcaatgaggtttctaccgatttgcgtcttgtaatcatgaatgattgcagttaaataaagtttgatgattttattcaaaaaaacacaaggaccccaaaataataataatctaaagtagtttaaataaaataaaataaaattgagattgccatatttaaaaataattaaaaaaagtaatactattttggaccctacatttagtaaaaattactaaatagattttctattttattaaatgacaatagatcttatatttttcaaaatggcaatgatgagagtttttgacaattttttttaacataactaccgtaaaaataatttttaacacaaataaatgcaaaacatgtgaataatctagtgataatacatctagatctgacttattattaaattttattttaacaaaaaattagtttatgatactattttatattgatttgaaaaatatatagtctaatttatcatttaacaaaacaaaaaatttaatcaataacaatcaaaaaaaaaaaaaaaaa

SEQ ID NO: 146020 - DNA, 668 bp, Cannabis sativa
gctcataaccaagacaaaattttgtttttcctaaatctttcatttcgaactctttctttagatatttcacaatttctgaaagtttctcaagagttccaataatacttaagtcatcaacataaacaacaatgataacaaactcagaacttgaactttctataaaaacatatgggcaaatagaatcatttatatatccttactttaataaatatttattaagtcgattgttccacatgcgtcctgattattttaatccatacaataatctttgtcattcaattgagcacatttctagatggcttgaattatatgcatcagacatcttaaatcctttagggatttgcatgtaaatatcactatatagtgatctatacaaataagatgtgactacatccattaatcgcatatcgagtttttcactcacagccaggctaaccaaatatctaaatattattgcatccaccacaggagaatatgtctcttcataatcaatacatggtctttgagaaaatttttgtgctacaagtcttgctttgtatctcacaactttatttttctcatttttttaacatacaaataccatttgtatccaataggtttcacaccttcaggtgtttggactataggtccaaatactttgcgtttagcaagtgaattcaattctgctt

SEQ ID NO: 146021 - DNA, 736 bp, Cannabis sativa
  modified_base (669)..(683): a, c, t, g, unknown or other
gtacttgggtccaaagttagtgccgaggaccaatgaggcaattgataagatcaaggctcggatgcttgctgctcaaagcatgcagaaaagttatgctgatccgaagctcagagatgttacatttcagcaggggaacatgttttcttgcgggtttcaccaatgaagggtaggcttgtgggtaggcactgtttgagagccgaatggagacagaccagactgctgctaatttagaggggtcatcatcgggtgcatgtgatgaggagctgatcgacctacgtgtggaggaggtggcccgccaagatgctagccaccaagtcggctagcatgatgatgatgaagctggcctggactctatggatcccgatgtggcatctctcagctccctttgcctatgcaaacatgtagacaacacctatatttgtatttgtcattatgtttgtatcatatagacgttattttcatgttttgcataacatgtggctttttatggcctgtggcattttagcttttagaacattactcacttttacgctccatgtggcctacgaccttttcaaaacttcatgtcctatgtgacctgaggcctttttataacattactttattttcagccgctgggcctttgtaatgaccgctttaaaaatttagattagtaaaggcaattagcannnnnnnnnnnnnnnttattattatttgtgaattaatttaattgtggaacccaatatttagaaataaa

SEQ ID NO: 146022 - DNA, 970 bp, Cannabis sativa
tttgattttgtttatagaaaatacagtgtttttatgttgtactcttgttaatttttaatgttgtttagaagttatttttttgttaatttttttattatttttgtgttatttttataaaaaatcgtgaaaataaatttttttttttataaaaattgtgttttatgtaattatttttagaaatttaaagagagctcaattaaaatagggtagctgtcagaagctgattgtgccacgtttcgataaacagatcaaagaatacaaggcttgcaaggaagatgaatgtcatgtaaacaagtatataaatcattatgttttgttgtttgctaaatgtatatatatcattatcgattaagaaacaaaagaagtaatattgatttagaaaaattgaaagcagttttggaagtttgtatgaggatgccaaattgagtaggacctcacacgtcggaatgtatatgtggataggagatgagtgttgttgctattataagctatagtatccaacactatctcattgatatacttatgtaagggatctgacatattatttttcaaattaaaattaaatagaaaaattgatattccatagcaatagaataaataatttttttttctacattatgtataaaaacattatgttatgtatctttacacaattattagtaactcatttccaattccatacaacttcacatatctactacaaacttgtcacttgtcacatgctatgatatgttgtttatgcttgtgctccttcaataacttttgaatagaaacaacttaattctttgaaagcttgtgtatcaccatatactttgcttctactctagataaaatctcctcaaaggtgaaacacatatggggagtacagttaaagagaaggtgtttgaattgtttaatataatcccaaataaagcgtgggacccacctggaaatgtaattctaacctctaaagtcaaaaaaaaaaaaaaaa

SEQ ID NO: 146023 - DNA, 649 bp, Cannabis sativa
tttatgaacttaaataaaatttaatgtttaatataaaattatatatcaatataaattataaaacaaattaagtatttgattcaatatgtacaatattaacattattacatgctcactttaaatttctttaaacattctcaacatttataaatagagaaacaattaattttaagatggacctttggtttcataattggttttaagaatgtttcataatttatgaacaaaattatcattgagaagttttataaaacacgaacgtttgtattcttagtattataaattataatttaattagttgattgattacattaaattgaaataatatgaaaaagtagaaaaaaaaataaagaaataaatgtagctatttaaaaaaattagatatagagaatgtcacaccaccttttaatattttacagttatatgaatataatataaatagatataaattatatgatttaaattactgaaaataaaagtcactctaaatcatttcaaacaaaaagaaagtcactataaatttgtgataattattaaatgtgtgattaataaaaaggcatagttataatattattattatcatataatcaatttatatatatatgaaagcattagagatattatgtgtaatacccgcaattaagaaaag

SEQ ID NO: 146024 - DNA, 567 bp, Cannabis sativa
taacccccttatctttatttttggtggcaaaaccccctttagtattattctgtttgcaaatctaatacacctgttaaactttactcttaaatgccaactagaattgcaactgtgtacacatatgtacacgtggtataattttattggcccaaataattttaatattataaaatattttaaaaataataaataaacaaatattttttttctttttaataatcagatgttcttgcatctgcccaaacagctctcgatcattggattaaagctcaagataaaatttcgttgttatcttatcgttgtgtctgaatagcatcggtgatgactctgagacttggactaaacctggtaaaaacacaatcaagattaacgtggatgcagcgctttttgatagtgagaataagtatggctttggtctagttgtccggaatcattttggtaatctaattgcagcccgcgctggtagttttggcagtctttatgcacctgaagttaggggtgttcattggatcacatccaatagatttggacccatccgatcccatccaattatttattggatattgg

SEQ ID NO: 146025 - DNA, 1666 bp, Cannabis sativa
  modified_base (164)..(166): a, c, t, g, unknown or other
gaatcttttgctcttgatattcttcttgaatccattttgggttgctttcaaaagtttggtaaaaataccaatttatcatgaaagatttattttctcttttaattttgctagaaaatcaacaaatcattagtagcaaattataatcaaatatttgttaatcatcnnncaaggagatctaaaagtttgagttaatagatctttcttccgtgcgtgccatcttacagcgacatagacgcctcgctctctgtgaccttgacccacccctctgcttatacttagtttgtatatcgtgttatatacgctaagtatttttattgttattatatctcctccacgcgaagtggttaatgccttgtcatgcacacttgcatttacatggtttgtcgtcgagacacaagtcaacaattagtacattgttatctcgcataagactgtccaaccagtcgagttataaacatactctgccaattgtgcttttaacgagttatttcacgtcaagtgtactcacagttgtgtgtttgagttcttcattcttcccagctagagacgtgtcttcttctaatgtgctcgcggaattttaggtataacaattgccccttaaaaggttcttttttttttttatataaaatgagctttttaatgattacaatgggtattttcatcatgatcctctttttgaaaagacacatgtcctctaattttgccggttgtgcggtttcgagatacattagaattaaatgaccatcttttccacttctgctttgaattatgtctgtaggatcaaacctttctttgatctaacgaagctaatatcatgggtataaagtaagaaaaaaggaaccacctttgcattatttcctccattttagaaagtctgaaaaactcttaagcttcttcgtcaagaatcaccattgagtttgtctgaggacttgcacgccatctctgtccttcaccttttttctacgagttttctccgacttcatcctctcaatcgatccttgctacgttcgaaaatttgcagatgtagtaaccagtcattcccccaagccctaactccaaatagtaagttgctttcttctttctcatgcttgttacattgtgtggatttgctacttagtttgtttgtatcattatcatctcatctggttttggtagtttttagggttaaactgcatctaggtccatactagggttcaggcaatatgtaggttattttaagatctcaaactcattacctttgggtttgataaaattctctccagggattgggattgccttttgcctgtagcaatgtcccactctggtttaggactttatcgtccagaagttttagaatttgagtttcctacagaatcaaccatcccgtataaacccaacccttgaaaacccacttccaaattagagttgaacgatgctagggttagggaacacgtagtgagaacccaccaggaagatattgctagttgctacaggtaattcttgcaagaaatctccgaaggcaaacaccgattcttgcgagaggcagcctggtcagaaccttccagcgtgtcctttattcctgtagcaaagcctctgtttttacccaacgtcacgatttcttttgaaccaggtgacttggattttgaaattatgcctcccaagccacgtacatcaaagactcccagga

SEQ ID NO: 146026 - DNA, 535 bp, Cannabis sativa
tttatgctatgttatttcatcttatatgtttttttatgtaccaacgagttctcaataataatataaataattagatatatgtaccaaatttttacactgttgaaaaaattgctaattattttttgtatattagtggaagttttattcacagataaattgttgatggtatacatgtgcaatttattgagattaaaataaaattattctccatatctaatatgtatgaggatatgtaggttggagaggtcaattctcatagttttttttaaagaaaaagatatcatttaaatttattttgtaattccatttaattgcatgactatcatactatatttgtcatcgtatatactttttctgagttttaatcctttatagtttaggatgaactaaaattagattgattattttatgaacacttttaaaatgaataaaaaagtaattagtgataagaaactaatctcccaactatatatttcattagtatagaaaatttattggaataattacataagacacctttttttgtaaaatattt

SEQ ID NO: 146027 - DNA, 569 bp, Cannabis sativa
tgttcttctcttgaggttgcatgtgcttgattttgattttaatcttagtaaattgagtgagtaattgcatgatttggttgggattcatgtttatgttgagtttggattgtgattataggtatttatctagctcgaatccatgttattttgatatgtggctgctggaaaatagttgagtttgatggatttcttagctcaagttcttgagcttgagtattgctagtttgaagcatgaattatgtgttttatgcaatttgaaattgtgaattttatgcatgaagtatgtgtttttaaactccctatacgatgattaaaaacctattttatggtttgggagttttggttgtgaattggggtgatttgattgtgttttggagctgatttttcgtgttcttgcggctgtttttctgggttttaaacccaaatgccgcgacatggtatttagcatgccgcggcgcgctcatttctttctcggcaaatctcttttacaaacttcaaatagccataactttgtgatccggactccaatttgggagttctatataccgttggaaagctctttttgagct

SEQ ID NO: 146028 - DNA, 636 bp, Cannabis sativa
acaataattgaaggcaaactatatagaagagggtactcgatgcccctacttcggtgtgttttccctacaaaagcaaatgaaatcatcaaataaattcatgaaggcttttgtggggatcatgcgggttggcaaagcctgtttaaaaagatcattagacaaggatattactggccaacgatcagaggtttgtcatgaaatgtgataaatgtcagaggttttcacatatacctcgcatgccaccaacggaactaagaatgatgacctcgccctacccatttgctatatggggaattgacttaattagggcattaccctctgggcgaggatgagctaagtatgcggtagtagcagtcgacttcttcactaaagggacgaagactgagcccctcatttccataacctgtaagaaagtccttgactttgtcgtcaagaacactatctgtaggtctggaattcccatgaagatagtatccgataatggaacccaatttgatggtgacttgttcactgaattctgtgagaggaacaaaactatcaaagcttttcgtcagtatccaggccttaggaaaatggacaagtggaagttgttaataaaaccttaaaggatactatcaagaagaagctagacgctgccaa

SEQ ID NO: 146029 - DNA, 751 bp, Cannabis sativa
aagataacaagcgtaaaattactccaaacacgattaaaactaaattaaaaattaatactaaaaataacctaacggtaattaactcctcttagatgcctatgttctttcatcaacatcaacaaaattctcccaacatgtctgctggctcttcacagtcacttcaattacattacatgttcgagcatccctcactgtctcctcccatatattttctggatgccacaggaggatctcagacacaataacctatggttggctattttagaggctcatcgttacacaacaataccctatgtatggtcaattcgggtcatcacaacaacaacctgtgtatggtcaatttgggtcattattgggcctatgtatggtcaaataggaggatctcctcaacagtcaatgtatagtcagattttcactccggagagtcagcaacaacagtagactactttggttcgtccgcaaacttgacaatttgtcgagatcttacctacgcaacaatctgcacaacctaattaccctactctgatggcgcctcaatctcgtgataattgtgacggttcaagaattggctctaatgcagatgattttatagaatttagtgatctgaacaatgataattagattttttaactaaaaaaattaagttttaaagttttttaagacgattttataattttatttaagacaatagtagtgtgtattgttatggataaattaagggaaatttgattttttatgcttacatattctt

SEQ ID NO: 146030 - DNA, 895 bp, Cannabis sativa
tactttgcagtccccattttcttggttgttcactgaatttcttgaacaagaatcaagacaatcctcttcgaactcccttctcctgtgctctgataccacttgttatgcaaagccttgcatagatctctctcaaacacttaagatgaactcacatgaacattagccgattggccattgaacagaagacaagtttcagtaatattgaattgtattgatttgagtgtgtatgaatgttacaacaacaaattagcactagttagacatttatatatatgtcttaggaatagttaggagttagttatcaactaacttacctaacataccgaactagagcctactaacttgacacgtgtacaataggtaactaactatctaacatttcacaattataataatatttaatgatatatttatttttaaaaattaaaaaatattaataattaaaaaaattattaatttttaatttgaattattattattattattatgaaagttaatttgaattatttttatataggtatttattttaaaaaaataattttacttatgaatgatttttttatattaataattaattataatagaattgattatttaagtacttttgtatttgtttacatatatagttctagtataattatctcttaaattaatttgctttaatatttttatttaaaatattttattaatttttttaattaagaaagataatttctattaatcaaactgagtcaattacactcataagtgaattccccttcaaaaaagaaacagagcacttccaacagcttctttactctattctttaaaatatctcactaaaacttcactttttttactttacctcacacatttacattacactatacatcagcttctttatatttttttctat

SEQ ID NO: 146031 - DNA, 713 bp, Cannabis sativa
gataatcatctcatattatgagataaataaaagtgaactatgagagttacacttatgagaattgtcttgtcatagcaagaacaaatagattaaaaatgtatccgtacacttgtgaaatgagtcataaattagaagagcaattttaaattcaaataaagtgaatcaatgtggattcaaaaaattatgaaacaattttgaatcttaaataatcaaaatagtgaataaaattgatgagaattttgttaatttttgtgtaatatttaggttaatctcattgaggagataactttaaaataatgagtaaaataatcacattattttgtaagtggtgatgtgagtttgatattttagaaatgttgagaaaactaaaaacgtcaaatgatatttttaaagtgaccttaaaaaatcatttaagaggaaatgcagaaaagtgatattttatatacactttatgctagaaatgtggtggtgagccacaaatttaatcaaagtgtgttgagacattgttgattaatttatttgatttttaattcaaattctaaattaactttggctatgtgcatatgtaaaattttgacatattttggtgtcaaattttcgtgaaaataatttcaagaaaaaattaaatttaagagaaattatagagacaaagtggtcttctatattttaaaatcaagatattgtcttgataatgaaatgtgaaaatgtggggg

SEQ ID NO: 146032 - DNA, 782 bp, Cannabis sativa
  modified_base (274)..(286): a, c, t, g, unknown or other
  modified_base (628)..(634): a, c, t, g, unknown or other
gtgcgctgagcgacacccgcctcatcggggttgctttcattcaaagagagtgtgacactatgattacgcttgagtagtttcttgaactcagcttcattgatgccagaggggcgcttgggtgaaactttgaagcccgggggagcaccgtggcttggtgcagaagataccccaatagaaaattgcaatggttgtgaggctgttaagtccacaagtagagtggagaaggctcgtgaaactgatgttgggtttatagccctaaataaaactcatttcnnnnnnnnnnnnnttactaattaataaaagatcagaaatcattttatgttgcaggttcacatgatttatttcatgattatatatttagtgtataaattctattaagtatagaacatatatatttgctcatgattatagtatcgtcagcaaagtagaatatagtcagattatatgttcaaaagtttaagtcccacgatttctcagtacactggatttacactgacatgataatcggcgatcaggtatacttagaccttggataagtgttatgtcccttccagggttttgacaaagtttacgagtattagatgtatggagtatacattagattggaccgatattgatcttggataannnnnnntaaacttactgttatatctttctaagtcaatatcactggtttaggtttgtagatcttaatcccgatatggttaggttcaatcttagttgtattatttatgctctttactttgttcgttaaagtggaccaattggatcttctcatgaca

SEQ ID NO: 146033 - DNA, 721 bp, Cannabis sativa
tccaagtgaggccaagttttggtcccagtttggggtttcaatttcggggtttcggtcccccatctatgtccaggtcctaggtgttgatccgggtccaagtttgtatttcgattcgtgttcggatcttgagtcctggtctgagtccaagtcttggtttgcgtttgggtcccacttattccagattcggatctcgatcttattccagtttatgcccaaggtcttgggctgcgtcctattaatgtgtttgggtccaggtttggggttgtgtccctgtagtcaagtcttgggcttcgggtacaaggttgtgtcccgtgtctcgagtctggggtcgagttttgggtctcggtcccggttctggggccaagtttcaggtctaagtcccccatctagctccacatccttagtccaagtttggttccaggttcgagtttggggcctaggtcccccatgtaggtccggatcctaggtcacggtctatgtccaagtttaagttcgtgtttagatcccgagtttgggtgcgagtcgaggtcctagtatgggttcaggttttagtcttggttcgggtcccggtctgagtcctagagtcccttttcaatatcgagtctagatcctgatctgggtcctaatcaaagtctaggtcccagaccaggttctggtctaggtttaggtcctgagtctaggtctaggttcgggtctatatctgggtctgggtttggggcct

SEQ ID NO: 146034 - DNA, 856 bp, Cannabis sativa
atatatatatattttaatttaatgcatgatgtgaacgaaaaaaacaaaacactcaaagaagacaaattctaagtaaatatataataaagaattaatatgtccgttgttaccttgcggtagaaattagggggtgagtaaattgtataatgtataatctcaggcttctcagctcattaattatggcatgatatctagcttagcttcgttgaatttattagcattgctatattttgtatataatatagaatacaattataatattataataattaatagtataataattaccttaatttaatagtataatgctatcactttctccctaagtctttaaattaaaagtagttttcatattatctgattatcaaaagtatacaattgtgatgagactatatgtatttatagagttagagaggagacttagctacatagtcctaattagatcaaagacttcagttaattagaaaagcccacacttttgcttcacattgactttacacacatagatgctacgctcattatctattgatcaccaacaatatgagctaacacaacaaaaaactattcaatcaacccaaattttaataaaactaataaaaattaatgttagcccaaataaaagtttaatgttcttccacttaggctacattttaattttaatacatatatattatataactaatttttttcaaaataactcatgagctcaacaatagaaaaatatttgagaccactttaaaaataatagttctttgatagcatctcaacataccgacttaatttaacctttaatattgaactatgacaatcatattatttttaaaataacaaaagacattcataatcacaaatacca

SEQ ID NO: 146035 - DNA, 712 bp, Cannabis sativa
ggagaactcaacctgatgttggtcctagtacgcggacaacgcgctcgaggagaactcagcgtgggaatggtcagaatcctagacaagggatgaagagctaaaccgtagaggtgcccaatctatgtgagaaagaacttatgaaacagaaagtcgccgcctgagacgccgtctgaaagaggcgcagcgttaaaacgctgagttagaacgagaggtagtctcagctagagcggtgcaggggacaaacgctcaaaatcaacctaaacctggagtgagaagaccacaaagcagaactcgtggctcacgaactaggagacaggaaaaggcccaggaagagcaacccggggaaaatgagacactccctgagaatcagaatgaatagcgagaaaggaggcaaccgaaaactgatgaacgagaaatccttcatgaaaatgaggaggatcttataactcaatccggagaacagagatcacctgctaggaatcaccaacgttcttcccaaaacccatagagcgaggactcgtacgtaccctaaggggggaaatatgacaaaccactatcgggaggaaagaacagagcgtgaagaggcaagtgtgacttcaaggtgatctagaacccatagccgatcaactagaagaggagaaagtgctcaacgagctaatgattgggaaagtatgggaacaaggaaatccacgagccactgaaagacaaagtc

SEQ ID NO: 146036 - DNA, 546 bp, Cannabis sativa
aagaaattttccccagggtttagattaggtgttgattatgttgaggataaaacctggttttgtcatttggctacctgtgatatgtttatcaatgactcggtcaagtttctattttccattataatttatgatagttggttttcagttgttttatcaatgtttttaagtttagctactgtattcaagtttttaaatagttttttaaccttttgatttgtgtttctctattgtttttgtttcagcatatgaacattatattctattacctttagaaaaaaggtaaatattcttctactgttatattgaattttgcgacaactgattgtcttttcgatgattctattcaagcgttgtaccacaagttcaacaaagccaaggcaatgaaaactaagatgtcacacatacatgctgcccacccaatagcggattacatgtgaggtttgcgaattccatgttctaagccttggtatgaagccgatcatgtgttattcatcataaatcttaggaaggaaagtcattgggtttttggtcgtcttgacttgaatg

SEQ ID NO: 146037 - DNA, 719 bp, Cannabis sativa
aaattttgtcaaccgaaaatataaatgaacatatgatttttctaaacctatatgttatgggctctcaagattaaattaacatattcctatgcaaatttagacctagagagcacaaattaagtaccaattttccatggggtcatacaaggtaaatagcatattcctataccatctacaaatcacacttttccaaggtgtgataatcttgcatcattcaattatttccactaatctcattttttccaaaatcaagattagctaacaacctacaattagtgatcaagcaaaattaagtagactaacattaggcatccttgaataaataaaactttcctaccaaaaatattcataaaacatcaacaaaattcataatccaaggttcattaaaagttctaactatgataaattagttcatgctcaaaaacacaaaaatacctaaaattctatcatctattacaaagtttagaaatagaatacaaatacaagaagagtaaaaggtaaagagagcaaactattagcctaatcttaagctctttcatttctggtacttctcctccatttcttatttttcttcttcttcatcctcttgagtttctttgaataatggctgccaggaattgtgttccccccaatggtgtaatggaggctagggtatattctccctcttttttacaaaaatatctttcataaaaatttattcctcatgtgccctaggaatt

SEQ ID NO: 146038 - DNA, 1132 bp, Cannabis sativa
  modified_base (916)..(925): a, c, t, g, unknown or other
aattctaccttaatccatataaaatcgaacctaaacaatactagactacacttggggggagtgatcctgttgaattagtcaagaccaatgttgagcaaatccaaacaatattagaatttgctcactggcaaaccttagttcctgcatcagcagggttctcatcacttggcacatttttcaagatcaatttcaccatctttatcttgtctcttatctaaaacattctgatatcaatgtgtttggatatctcatgatacacatgatttttgcttatgagaattgataattgactgtctaaaaatacaattactttgcctttcatcatctgcagctctcctagaatttctttgatccatacatcttccttgaatgcctttgttgttgccatgaactttgcctctgtggtactggttgtaattgagatttccaacttatgcaacatgtattcagttggaaacagtagctagttagggatttttttgtaattctatttgatgcataatctgcatcaacaaatccttcaagttccacctcgatccctattttcttgaacttcaatccatagtgagttgttgtcttaagataccttagtaaccatttaactcctttctagtgttcttcaccagggtttgacatgtatctgctgaaagtgctaacaacatatgtaatgtcaggcctggtgctaatcataacatacatgacactcccaattgcttcaacatatggtacttccattatttgttttctttctttgtcatctttaggagattgacttgtggagaacacaaagtgtccagcaaggggaactttagtttcttttgagtcattcatgttgaatttcctcaaaacagttaaaatgtacttgccttgagtcaatgtctgttggattttgtgctctaaataaaactcatttcannnnnnnnnnatttattaattaataaagatcagaaattaagttttgtcacacgtagtaaatggttcctgaactactcatgacattattgtaaattggtcattctatcaagttttgtcacacgtagtaaacaaaataatgacaagactattttatcaattcccatatcagcgccacatgtataatttaacattaaaaaaaataaaaattatgcatttt

SEQ ID NO: 146039 - DNA, 861 bp, Cannabis sativa
tacaatattcttggtccccactagcccggacgcatgacctgaattctgtaagagaatcaataaccctgttccccaaaaccaatcaaaaccaaaccctagaatgcaaaaaaactaagatatatatttatataataagcatatatatatatgatctttcccacattactgttctccatttttttttaaatttttgatataggtttccatacatacagaaatactaagatatactcttctctctcaaatggagcttccaacaaagccacacaaatcctctgatttcgttactccataaaaacatatgtataataaatttaatattttctttaattatgaataatttgaaatctaataaatttaatattttaaataatgataatttaaaatattaacgacagacaaatccgccaattttctttaatacattattttctctctctcatatgtataataaatttaatattttctttaattatgaataatttgaaatctaatattcttgtatattacaatgttattcaaaaaaaaaaaaagttaaatatttaatcattaaaaatataaacttcctttaaatgagtctaatattataatgatattttttttttatatagttacaaaagtataagattatgtagaaaaaaaatataaatagaacaatcattaaatagtttgtgatttgtcaaatttttatgagataaggatagaacactaataaaaattagaacaattaaccataatgtgcttttaatgaaaaaaaaagagggtatataagtaaatgtatatacacacattaaaatagcacatataaattgctacaaatatgtaagttaatgaatctttattatgactaattattatctc

SEQ ID NO: 146040 - DNA, 541 bp, Cannabis sativa
  modified_base (467)..(481): a, c, t, g, unknown or other
atagaataatacatatttatatacagagttaggagactaaatatctactaaatatctactaaatatctaactctcttacagctaatatacacttaatatctaacagataccatccttgtcttaaacagacaagggtaggcgcctacatctttataggtttgtccttttgggttagttagttaattcattaattcaattagataaatatttaaatttaaaatgtatatagttaaagatattttaaagttgttgagatattctctcaagtagttgagagactccctcataaatatgagtaactgatctcagttatagatatttatttatttatttaaataattaaatatgattttgtttaccgagatttttggaaactaaatattttagaactaaagaaatagcaaaatgcagaaatgaagagacaaagattttatacgtggtggtgtgtgttgagttttgtgccctannnnnnnnnnnnnnnaatataatcagatttactaattgattaaagatcagaaatcattttatgttgcatagttca

SEQ ID NO: 146041 - DNA, 527 bp, Cannabis sativa
atcctttatcaccctggtaaagccaacgtggttgctgatgccttgagcagaaagggacagagtcagatatatacgatgaaacaaatctcccagaagctagcaaatgagatgacttgagctaagattgagtttgttgtagtgcaattagctaatattaccctgcattctactcttttggagcgaatcaaagaagcacagttgtaagatctagatttagtgaaatccagagatagggtttcggctaggaaacctagtgactttacagtggctgaaacggaaatattacgatccaaaaatcgtgtttgtgtgcatatggatgagagtatcaaaagagaaatcatggatgagtctcaaaagattccttactcagttcatccagggtcaacaaagatgtatcaagacttgaaagccatgttttggtggccaggcatgaagagtgacattgttgagtatgatgttaattgttttatctatcaacaagtaaaggctgagcatcagaggcctgcagggttattgcagccattgaa

SEQ ID NO: 146042 - DNA, 1111 bp, Cannabis sativa
  modified_base (768)..(771): a, c, t, g, unknown or other
aaagacaatacacaagatgagtgtttggtcgggatatcgaacattaaacaggcaaatatgccgaccaggagtactcaacaaattaaagaataaaaatattcgacgaaaattaaaaactcggaagtttaaaattttcgtgagttagggcaaaaaaatttatgaagcttacaataagcaagatgaaagacaatcattatgcagttcaaaaatcaagcattatgaacgatgaagtcgcacggatcgttacaaaggaaaatcgcagagtttcaaaactgagggtttcctacatatcttctacaacaaagttaaagttacattcagaaaataaatgtgcaaagtaaacgtaaaagaaatcgagaacttactcaaggatcaaatgtctgaattcaagttacgccaagctaaacgagtagtttttgtgaaaacaattctgcaaacttgaagctaaaacctctcttttcgctctgaacttacttagtaaagaaggttggtgaaaatgagtttgtgaacaaatgctcactggtatttataggcaaacaacgaaaaagggtaatcatttcaaaaaacctcagacgcctcggttccccccaacattgaatatgggaaatcaaaagtaatcaagtgtaaccgtaagacatggtgagagaaaatcagattttgataatattaattgcgtcagagcattttagccaaaaactgaagggatgcccagtcagcctcacatcgaatcgcgaacagacgctcttgacacgtgtcacccattcaaannnnaagacagctcggatgaagtctacatgcaacttcggaagtcccgtacagacttggagggcaaatgttatcccaatttctgcactttgacgtggcatcactcgatggtgacacgtggaatcgactccaggtatctgctcgcaaggcacgagccgaataggacacttcgtgcattcgctcagacgaagtcctttaaaccgagcagtgggcaatttgcacagaacgttaacacttagcgaattcacctttcgcatcatgagtcatcaaggaaatccctataactttgggatcagattatagagatatggcaagctgtccgaatcccatgatcagtgtattctgt

SEQ ID NO: 146043 - DNA, 555 bp, Cannabis sativa
aaaatcaacctagaaatcagattacacaaactttaaaccctaacagcccctatctttcaaaattacacaatcacaccaatgtaaaagcttcaaaatacataaccataggttctagggttaccttagcttgatcctccttgaatcccttgctaaaatcaccaaagttcaggaacaaaactcccttgttctaggttggttcgaagagagagagggaagggaagaaagtcctctgattttggtcttattttccttcaattttatttctaaaatgaaaagagattatctaattaatctcttgctgaataagaggctaggtgtcatcaatctaggcagccaccaaatcacacattggctaattactaaaatgccatttaacttaaaactagggtattttcaaaactaggggtaaaatggtcaaattccataaccccgctcaactccgatattttatttcttccaatatatttcccactaagaaataaggttctaaacttactcatgtgatcgaactagtcatccatcgcattttctgtagtcgccgagcaaaaattacaa

SEQ ID NO: 146044 - DNA, 779 bp, Cannabis sativa
  modified_base (719)..(753): a, c, t, g, unknown or other
cacaagacatgcatcgttgacctcggaaggaaaaatggccccagctcgctattgagatcactctaaccaagcttctgtcgagacatctccagatacaacaattaaagacgtgtttaattgttgatcattttgacccagtaaaagcgagaaaatcacagctatatgattttccaatcataaccgcatttacactacgtgatatgtaatcaaacctcttgattttaggttatgatcgttgtaaatagattacggtcaactttgtaattaactgcccactatgtaattataaataggggcaaacaagatcaaaaaaggggacgaaaaaactcatacaaaagaggccctgaaaaaccatcagaaatttgaataagagtgactcgtggactatgcagaattctaactgcaaaaccacgtaaaaaaccctgtgttcatatttttacttttatagcttttatttttctatgtgaaatcattacagtgaggctcaaatttggttaacaaaaatctgcattaacagatactatagggtccaacttactcaattgttctagatcaagacctaatcaatgcaatgtgcaataaatcttgtacacctctccctattaggtggtattctggaatgatcctaaagttttattaggaaattaaaacttgctacaagttggattgctcaaatatatattgttcgctacggcactattgttggaattattttaccnnnnnnnnnnnnnnnnnnnnnnnnnnnnnnnnnnncaacctaaatatgaacttctaaaatg

SEQ ID NO: 146045 - DNA, 504 bp, Cannabis sativa
atgtatcatttcttgtggatatagccaaaaattctgagcactgtatcaaaaattaaaacaaacaaacactctttaccgaaaaagcctaaacacatataaataataacacaagaactcacctttgaaagatccaaaacctttacacactggacgaagaagagaggaggaggccccggggttgggtcactgcccgatttagcagaatacgaagaagagaggggaggtcgtcgtttgggtcactgcctaattaagaagaggagaaagaggatggtcagttttgaagaggacaaaatgggtgaaagagaatgttcagtttcgaagaggatgaactgggttgaagagaatggccaatttggccagagcaatttcgaacgaggagacaaagaatagggatgtgagcagtatgttatataatttttgggttttagggattttattaaatttgcgtcggtttctatctctcacaattatatttcacgtcatttttaaaactttgcaagcaca

SEQ ID NO: 146046 - DNA, 681 bp, Cannabis sativa
tgatcttgaatagtttgactccaacttttctgccctttacattaaattatgtcatgaacaagttggattttgacttctacgagttaatcaacaaccttcagagatttgaaaatttgattagagaaccatagaaaggaggaactaaagctcctagttctggtactactaatggtacggccaaggctgaaacaaacattgtctttgcttcgaaatctagcaacaagaagaattagaagaatagcaagaagcctcttaaagctattaaaacggctaataagaaaaaggctgctaatccaaatgcaaagcaaaaaggaaattgtttgtattgcaacgaaaagggccactggaaaccccaatgtcctaagttttttgcaaagaaacgaggtatttctaattatgctatatactcatgtgttttagagaattattatccctttgggttattaattctggatctattaaccctgtttattttcatcttattttaactccggctgcttaaacttggattgctatcctagcgagttgagtcggatggttggacagaagggtgaagattgtccaagattgaagatgaagctcatgattttctttaatttttgattcaattgtttcagtttatgaacaatttagtttcaattattggtttgggatttaattccctatttcatatttatgcag

SEQ ID NO: 146047 - DNA, 689 bp, Cannabis sativa
ttttttttatggctcgatacggtatgggagccgtattttaaaaagtccaaaaatatgagctggattagcgcgcacacatttacagctatgcgcatgacaccatcaatagtccaaagaaattttataaatactaattttaaaatattaaatcattaaattttgatccaatgacaaataataaattaaattaaattagtgaaacccgataataaattacagaataattattaattttgcccaaaatttttgacaatactgattctgtcccctaaaatatacagtttgttaaaggttcctcttgaacttttacgtttacaaaaatttagtctttatgttagttagattttgtctcattattctgtttaaatgtcgagatgtcttataaattaacaactttgtcccctaaactttgacaactatatgtatcaaataatacacccttaagattaaaataagaaagattctaatatttttctttagtagatcttaagaaattaatttatattttaaaaaataaattattttgaatgatttaaaaaattaaaaaatttaaaatttaaaactaatcaagcgatttaaaaaattattattttttattaaaaaatctatttaaatataaaaaataataattttacatgaacaagtttaaatcttttttctctaaaaatctagatttgtttaagtaaata

SEQ ID NO: 146048 - DNA, 555 bp, Cannabis sativa
atacagagtataaatacctaaggttttaagcaatgactagaagtgataaagtctctgtgtgaaacctaggatgagcagatatatatgtgcgagtattcgaggtgttcatccaaatacccgcgtgtattcaaaagataaagatgcgattattcaaacattcttcctaaagttcacggttatacaaatttcaggtctatttctctgggattacccagtcctacacagaaaaacatagccctatatacatttcctacaagaatgcattctcaaacccctcctcaaaatacaaaaacctagaaaaagcagttttatcttttgaactgaaaccaaaaatgcaaatgaattcgaaactaacctttagtcttgatgattttgtctctacgattgctctcgatcacttctgagattaaaaaaatataagaggaagcagtaagaatcaggacaggatatggaggttactttgaatttcagttaaagagggaaaaatgagaagagttaattcgtatcaaagagtttaaatactcgtatctgtcataaattgggattacgacacgt

SEQ ID NO: 146049 - DNA, 955 bp, Cannabis sativa
  modified_base (438)..(439): a, c, t, g, unknown or other
  modified_base (812)..(820): a, c, t, g, unknown or other
gacaaaaagcaaatttctcaagcctctctctctcttttcgaacactagagaaccattcagggttctggattttctctccaaattcaagtgattttcagcaaggtttcagtggtttcaagctttaggtaagctccttctaactccttcttgattttcttgaattttaagttcgagatttttgcatgaaattgtgtttttgctattgtggttgctgtagttgttagttgttgaattctgtagttaaaatatgatttatttattttgagttaagcatgaataagtagttttttgaaggtttaaccaagttttgagttttagaactcaaacttggagcttgaatggcatttcttgtttctgagtttgggtactggttttgttgcttggaaaatgatctttaggatgtttaaaacaggtctggaaggtttcatgttaattggnnttgatttggttgagatatgggtttttttggtgattcctgcactaaatcggaatttcggttcagtggtacctgtatcaaccgaaattctggttggtccataggaaaccccacagaaccggaatttcggttggggaaccggtctaccggttggggcagttttgggaaccatagtttttcccatttttgtgttgtttagggtattgctatgctattcatcgatagggaacttttatttcaagtttaagtccccggaaagttatttagcgtgtcacttatattgatgtgatttagaagcctgtaactcgccgaacagttgtaccacttaggttggccggtacacctgaattcggaaacaaggtaagattagtataannnnnnnnntatgttattacatgtttagcgtatatgttgtttatgcgtgttagattacattgatagcggtaatagtatacatagagttgtactgaatactgataaatgtatgttggctaaaaaatactgatcgatgttgtcaca

SEQ ID NO: 146050 - DNA, 577 bp, Cannabis sativa
  modified_base (486)..(494): a, c, t, g, unknown or other
cttgagttttaagttaaggaattaggcatgttttgtgacttatgctactgtagttgttgttgatgtttgaattgtgtttatgaagttaaataatggttagatatgttgatttaagctaattttgagggttgttatgttggttgagcaagctttgagttttataactcaagcttggctctttaatggtggattttgtttctgtacaagttgtagtgttttgttgccttgaatatgttctttgggatatatagaacaggtctggaaggtttggtttgatttggggttgattttagtgagatatgaattgttgaaattttcttgcactaaaccagtcggtcgattcagtgggacctgtaggaaccggaattccagctggtccctaggaaaccccacaaaactggaactctggttggggaactggtctaccagttggggcagttttgggaaccctaatgtttcccttttttgcgatatttagggtattgnnnnnnnnnttatcgatagggaaacttttagtctcaagtttaagtccccagatagtgatttagtgtgtcgctcaccaattttgcaaataatg

SEQ ID NO: 146051 - DNA, 1337 bp, Cannabis sativa
  modified_base (326)..(327): a, c, t, g, unknown or other
ttctttaccattttatactttgaatttaataagtaatttccagcataaatacttaagtttaacttctagttgtaaataaatacctaagtttaatttttggcagtaataatacctaagttaaatttttggaactctgtaggtacttaaccactaaatattatgtcattatccacgtgtcattttctttttggtttatttaaattaattatttttaaaaaataaaaatttaatgactttgaccaattagaaatagccacatggcaatttacttaacaattaacaatcaagtacctacaaaagttttagaattataacttaggtattannaccgccaaaaattaaacttaagtacttatttacaactggaagttaaacttaggtatttgtgccgcaaattactcatttaataaccgtcagatcaaaatgcaaaatatccaatggatagaaatgaaagagaagtggaaaggatggctcattaatgttcatgatgtccctcgaaaccacaaaactgccaaaatcaatggcatgcatattttcaaaatggattatgacgaaaatacccttagtaattatttaaaaagcaccttttattaaaaatggacttcttcagggacaattgttatacccaaaatttggctggtacttcagaaggtggcacgtgtcaatcttagagaatatgaactagcaaatataatggcaattatattaaatggaataactaatttaatacagagtcaatagggtatatttattataactcgcagaccgcacagtctttaccgagacaagaatgtacgaactattgactcacgagaaaccatttcacgtcagaggacataatcgcaaggatgacatcgataatacataacgagacatctatcttgcaatatgtagcgagatgttgacaaggctaattagctgttagaacacttagcgtataccatacattatattaagtgtaatagcttgaaggacatagataacgcatagcgagacacccatctcgctatgtacatgaaggcatactcctgttaagctccagctcactgccagacttattgttgcattaagaatcctaaggacattattgtccagtctgcaaggccttatgatcaaagagtagttcttaaatctgctcagtaaaatggtgctcatgctattgctggaaaacttatggataaatcaagttgttcatgcaccaagcgagatgcctcagcgaggtacgttttgcagcgtgtttgtgtctactttagcattgaccctttaaaagcggtttaaatcacaactgtgtgatttttaaataataactgaatttatttacgtggagcataattata

SEQ ID NO: 146052 - DNA, 505 bp, Cannabis sativa
tagggatatacgaacggagtcaaacccaaactagacctagaccgagattgaaacttgagaactagattcagaccgagaccctaaccctgaccgagacctagacccgcacccaggacctgaactcggaccgaacccgaacccaaacccatacaaggatctggaactggaccaaaacccagacctagactcggaccaggattcagaccccgacccagatccagacccaaacccgaacccaaaaactgaatcaaaatttaaactgggacaaggacccaaacctgaattgacccagatcgggacctaggacctggacctacattggggacctagacttgggccctggaacctagacccagatcggaactcgggacacggacccgagcctggacctagaattgaacccaaatttggacccaaactgagatcggaaccaaaaccaaaactcggactaggacttgacccacgaccgggtcctggacttggactaggacctaggactcggact

SEQ ID NO: 146053 - DNA, 1113 bp, Cannabis sativa
tctcgtgatgccacgtcagagtgtcaattttgggataagatatttgaacttaaatatcaattttaaattaataatatttaatttttaatagattattattaattttctcgtattttgaattttaaattaaaaattgattattttattttaaaatgatggccaaattttattaatttattaatttctttaatatttacatattatttaattataagattagatattttaatattagctatattttaaattaaaagatagcattattctttttatttgaaatattatattaaaagtatcttataagataaattaaaaaattaataaatttgaaattaacctaaatatttttatagatattctaaccatatttttttttaaattcaaaatttgttattttattgttaataaatcaaaagttagaaaaatgatattttatatcattttacttatcagaagtttataaatagtattttaaatatttaaatagcctagatatttacggaggaagttgagaaaaacgtgagatatcctcatgtcgacccattggtgattgccattaacgtcgccaataaaaggataaagagggtgttaatagacaagataagctcagtaaatatcctttataaggaaacactaaggaagacggggctcgaaaaaactaaattgaggccttgtatggtaaatctttacgacttcactagagggagtattgccagtcttggcataattgagctcgcattaaccttgggcgaggcatccctatctgccattgttatgcaagacttcctagttgtcgactttccatcgacttacaacatattttttggtcgtccagcattaatcagactaggggcaataagttcgatcaagcacctatccttgatgttccaagcaccagaaggtgtaggagtggtgcgaggcgatcagatgctggctcgcgattgctatcgcatagagttgcaacataggaaagtcggtccccaagtaatggcaattttggcaaaagaaagtgaagggaaggacgaagatcttgacccccgagtttaagatgaaagaaacttattgaaacaaattgaagaattggaagacgttattctcgaccaaggaaatccc

SEQ ID NO: 146054 - DNA, 883 bp, Cannabis sativa
aatcacttgtttgaatgaaattctatgtgttggttctaatttatattcaatgtgctcatcaacacatatatatatatatatatatttatcattttcccattctccacttcactatgagattcacgacaataaaaaaattaattatatgtgatccagatgaatatgatcgttacataatatacatgccttagttcattgtagtttaataaactattgaaacttttgtttttaaaaaaaaacaaaagaaaatcaataaataatataataaagacgtttaaaagtaatttcactccattttttgtttcatacatgtacttatacataatattaataaataatatatactaagcataagcatggagataaaataataaataatatatactaaagaactcaagaatttaagaacactcgcaccaatgcaccaattcaaagaactagtcaatattcttgcttcaatcttaaaattgtaaattcaacaattttgtttactattattattattataaaattttaaaattatatgaacgttaaaaaatattctcaataattatatatatatatatttatatatggggctattatggtagggattgggtattttacctatcaatagggatattaatttatagcccttgatttaatctaatggttcaaatcaactcttgaaaactacaccaaaattaatatattttttatttataattaacttttaatattattaatggtaggttcaactaacaaactccaaacttaactccaaacctaatgttttatttttttgtattttatttctattcaaaatttagttttaattacatatttttttttatttcaaatttacataaaaaatatttaattaaatttatttttaaaacaataa

SEQ ID NO: 146055 - DNA, 577 bp, Cannabis sativa
gactcagacaaggtgacccactttcgcccttcctatttaccttggttgcagatgtgctggggagaatgacgaataaggctgtcagctcagacaatatctctggattctcggtaggaaaggagagagtccaagttagtcaccttcagttcgcagatgatacgctattctttgttgagaatgaacaatcgttacacaagttgttgagggtagtagaagcattttgtgctttatctggattaaagattaacttgagcaaaagccaattgttgggaatttgtacgaatgaggaaatggtttcaaggcttgcaaggaggattggatgtgaagtaggaagctggccattgcaatatctggggctgcccttggggggttcgcctaggaaatggagtttttgggaaccagttctggacaagtgcgccaacagactcgatggatggaaatgtgcatttttatctaaagggggtaggctgactctcattcagtcagttctatcttcccttcctttatatttcctttcattatttaaagcacctaagtcagtaactaaagcattggagaagatgatgagagatttttt

SEQ ID NO: 146056 - DNA, 711 bp, Cannabis sativa
tagggcacaaaacccaacacttcggtcttcaaccgagaaaagagagctaacatgatgaccaatgagacccacatgagatgaagttatgaatggactattaggatcaggtagccaaggttgatgcaaaatatgagttgaagtcccagtacctatagttctcctagctccatgacgaaccagatcttttgcactccaaatacttcgccatacaaagctgggattacgacctaaatcagttgaaagataatcatcatggggaaagtactgcactttataaattctgaaaacaagagaatcagggtgacagagaaacctccacccttgctttgtaagcatagtcagattaaattcatggaggagacgaaagcctaagccgccttcatcttttggatgagaaagccggtcccatttcatccaaataattccattacctttgctatttgtagttttccaccaaaatcgagccatcaacttttcaatctcattataagtgccaagagaaattagaaaaacactcatagcatgagtgggaagagattggatcacagtcttcaaaagaatttcctttcctgccccagatagtaatttgccagaccagctgttaactctattcatgactttatttttgagaaagcctagaatagcatttttattccttccaataatattgggaagtcccaagtaaaagctgttttcagaagcttcaggcat

SEQ ID NO: 146057 - DNA, 549 bp, Cannabis sativa
tttttttttttttaaaatcaaattgcatatacggtttttctaatttctcaaatcgcaatcgcaccgcgtaatcttaaaacagcaaaatctatccatcaaaaaatacggtatgtgcggtgcggtgcggtttgagcggtttacactatcattattttcgagcattatagtaaaaatttaaaaataaatttataaaattttaacagtacaaaaaaaaatcttattaaagttttcatatcataacatatatatactaatcatcaagtagttattataatgaattgtctctagaaaaataatgtaatgtatacatatattacatatatttgcttttataacaaaaaaaataaaaatcttattgtaaaaatttgtaactttataatatatagtgcggtacggtttgaaccgtaattattaagttcaaaaccgcaaaccgcacagcaccgcgtgatttaaaaaaaaatagaaaccgcaaccgcactgcaaaagatttcaaaccgcattttgtatgtggtgcggtgcggtgggaacagtttgtgctgtgtgagcggt

SEQ ID NO: 146058 - DNA, 553 bp, Cannabis sativa
ttatatgtgtttaatttcattattttagtattcatattagggtgttaatcaaacatactttttagtaaatctagatcctggtaaaataatttccaacaggaatctcttccacctgctgcagtttctcctcctgctgcatcagtaaaggaagttgctgcttctactccaactagtccttccactcgcactcgtgcccagcaagcttctgtcgagaagaaactttgatcatctcgaagtcttgacaagtcagttcctcgtgccaagaaacaaaggtaaatcccccttcgatttctttgagttctgaagaagaagaacccgtggaggatccatctgttgattcctcggacaaatccgtgtctctccattctaagaaggaggagtttccttagacagtgaggaaattgatctcgagccagagcctcatttgaccaaatctgcttcaactgcagcacgatcctcttcagcagccaaggcttctgctgctgccaaaggcaagcagccaatgaaggaatcatctcctagtaacattcctacatctctctcctattgtcct

SEQ ID NO: 146059 - DNA, 581 bp, Cannabis sativa
  modified_base (511)..(529): a, c, t, g, unknown or other
aaaaaaaaaaaatcaaaatgccaacgcttcattaagatcattttgctttaaaatttgtgtaatttaattatattttttaatttaataaggatttttttcttaaaaaataaaagacagtattattcatctatttttttttttaaaaaaacaaataatagttgatagattataataaatattagttttcctaaactattataactagcaaataatataaaagttgtaattttattgtttatttatttagaaatatgaataattatatgttgattttattttatttacattatttttattttagagtattaatgttcttttttttttccctttttttttcattaaacaattctaccaaacaatattatcttattgtatattaattatattgacacatgtcctaatactatatattagacaagaaattggacacactctctaaacagaggatccccttccaacccattatctttactttaaaatgaataatagtaacatatatatatatatacannnnnnnnnnnnnnnnnnnaacacttcttaatgggtaatacccattgatgggaactaaaaaaaattaataa

SEQ ID NO: 146060 - DNA, 836 bp, Cannabis sativa
atgtgtcaaacaacatctaatccacataagtgtgaattttgagttttctaatccaattcaatccgcataagtgtggatatctgcactttagagattaaattggattagatcgtacagatttaattaaattggattagatcgtacagatttaattaaattgaatattttatgaacacccctactttttaatatttaaagtttacctttttgaataaagacttatatttgttatttttcttttttactttaaactatatttaatattatgaaaatataaggttatattaatttttaacatgtaaaaaaaaaatatttaccctctagtgtgctttctcccccttttccacccgactctttggtcttaagaatgctggttttaagaatgagtgattgcccttcttcgacccttactctccctaatttaaatcttggatccgcctttaagactaagcacaaatgtaaacagagtgaaagaattccattatggcaaagatatgtatatatatggaatattttttaatgggtattactcataaatagttactaaataaatttgactataaattttaattttaaaaatattaaaccatcaaattttgatcaaatgacaaataataaaattaaattttgaatttctaggcttagtttgactactcaattaaaaaaatatcaaaaaatatctttttttacactatatcaaaaatatattcagataaaaatattgaagtgaaactaaacttttacttattattattcttttttttttgctaaaaaactttttttaaattttttttaagcgatggaacaatttcagcccatatgatgtaaaaatgaga

SEQ ID NO: 146061 - DNA, 598 bp, Cannabis sativa
acgtttcgagaaaagaggcaagttatgccctagatttattggacctttcgagattctcgagaatgttggacaagtgtcctatcgattagctttgcctttagctcttttagtacttcacaacgtattccatgtctcgatgttgagaaaatccgtttcagaccctactcatgtgcttagttacgaaaatcttgagctgcaaccagatatgtcttatgaagaaaaacccgtttagatccttgagagaaaggataaggttctttggaacaagaccatagctttggtcaaagtactttggaaaaatagcagggtagaggaagccacctaggagttagaatcagacatgagagctcaatatcaagagttgttcgggttagatttcgaggacgaaatcttattaaggggggatagttgtaaagacagcttaactttaatttgaaaattagaagataattagggtttaattatgaaaatcatttagtggtattgtattagttatttatgatgatttatttgaattcggaatgcatttttatgttatatatagaaatttcataattttgcatattttggtgcacaacaacattggaacgcggtgtat

SEQ ID NO: 146062 - DNA, 659 bp, Cannabis sativa
  modified_base (250)..(252): a, c, t, g, unknown or other
tctttggtcgaaaaggttagtgaaaccttcacacttacctggcaaccccggggagttctagtaagttgtgaaggaccattctaaaaacctccaaagtaacctgggcacaagttgaaaaaaaaataataaaaaaaaaaagcaaagaagagtggatgagtaactcttcttctgatgaaaccatttctagtgaaacttcatccaatccatccactactccttctcttgttcacacgataatcggtaatccttnnncaatgaataataataatgaaatacagcagagaacacttaatgattacctccaccccacccaaactttcataccatcatgctttatatttccacctaatatgccaagtctcgatgtcaaacctggcattatccagcttttgccaacttttcatagaatggagaatgaaaatccatatgtgcatattagggaatttgaggaagttgttgacactttttgtgatcaagcaaccatcaatgatgctgcacgcttaaagtttttccccttctccttcaatgatgaagctaaaggttagttgtattctttgagatataggtctattggaacatgggatgaaatgaccaaaatattttttattaaatatttccctgtccataagaccaacagtttgaaaagacaaatctcaaca

SEQ ID NO: 146063 - DNA, 835 bp, Cannabis sativa
gaaaagttttctaaagttaaagcaacgcttgattaccgctccagtactacctcttccttcagataaggaaaagtttgttgtttattgtgatgcttcaagacaaggtctcggatgtgttcttatgcaagatagaaaggcaatagcctatgcttctcggcagttaaaggagtatgagcagaggtaccctactcacgacttagaactcgcggtagtagtatttgcactaaagatttggcggcattacttatatggcgagaaatgtgagatatacactaatcataaagttctgaaatacttctttacccaaagagacctgaacatgagacagagacactggctgtagttggtgaaagattatgattgtgagatcctttatcaccctggtaaggctaacgtggttgccgatgccttgagtagaaagggacagagtcaaataaatactgtgaaacaaatctcccagcagttagcaaatgaaaggactcgagctacaattgagctggttgtggggcagttggctaatattaccctgtaatctactcttttagagtgaatcagagaagcacagttgcaagatccaaagttagtgaaatcgtttcagctgggaaatctaatgactttacaatggatgaaacaggaatgttacgatttatgaatcgtgtttgtgtgcctatggatgatgttattaaaagagagattatgaatgagtctcatacaactccttactcaattcatcaagggtcaacgaagatgtatcaagacctcaaggccatgttctggtggccaggcatgaaggatgatatcgcagagtatgttgctaagtgtcttacttgtcagc

SEQ ID NO: 146064 - DNA, 729 bp, Cannabis sativa
ggaggagttggggaagagacgtcctcgtcgtcggcgtcctcatcgggggtagctgtaagggatcgaagacaaggtttgagtgagagggtcgtggatttgaggttttgagcgagagggtcgtgggttgagggtttgagcgagcttgagggtcgtgagtttgagagggtttctacaaagggtaaatgaagggtctgctggactttatttatttctttattttttttttcagaaactgctgggctttattatgtgcgaattaatattcacatctttgtctttggtagttccctaaaaatcgaaaacaaaggtttattaattaattactaaagatgaaagtcttcttacaaaatcgctcccacattaaaaaaaaattaaacacttttaacttcgcttgttaacaaaaaaacaaaaatataaccaaaatttcatgaaaaaagcaatgatacttgcattaaaatagttttatcttcggatttttaatttatttaaaaaaaccgaaaataaaagatatatttgtaatagtgatagcaatttgattttatattttatcgtgactaaataattagttggtatatataaactattaataataaatgtaagtataaattttttaggactaatactttagtcattgaaacactttaacatttaccgaccaaatattttgtcacaaattgaggatttttagtgactaaataaatttagtcaccaaaatttagtgctcccgcc

SEQ ID NO: 146065 - DNA, 821 bp, Cannabis sativa
aaggagtgtattgaacatcaagttacttctgtaataccttctctcttacgaaatgacatcaagttctatgtgctttgtgtgagcgtgataaaccgaattaaatgcaagtgcacaagcgttcatattaacacattatataattgaggtagttggtgacttaaacttcatttcctgcagtagctcttgaagccaagctatctcagcttctaaatgtgcaagagatctatattcggactcggtacttgatctagcaaccaccatttgtttcttggatgaccaagaaataagcgactctccaaaaaatacacgatagtcagatatacagatctgcaatcattagacaacacgctcagttagcgcctgagaagccttaaagagtcaaattatcacttggtgttaaggggagctcgtgatgcattgtgcctttgaggtatttaagtaccctttttgtagtaccgctccctactcgatatggcgttgtgaccaggccatccacctaaatgctaggcgatgtgctagctgatccctggtaggcctatcacaccgaacactcctaccagtcctcctgccttaatctgatcgagtctcttggaaaagatagaggacggggaagatatccacggttcagctggtccccatgctcgaggactcgggggtcaacagtctcctccataacatggtcaatcccaacctcgaaaagatgaccaaagttgttcaaaggccgcctgacctcatcatgtttatttgtaaatattcgtaaaattgtatagaattatgttattatatttttttgcacattttttgtaatattgtacatttac

SEQ ID NO: 146066 - DNA, 527 bp, Cannabis sativa
aaaaaaatattccttccaatttcaagggtgtcaaatttatctatctttacactgaattttgccaaattttgatttttgctcaaaatattcagatggaattaccaaaaccgcaaagacaaaaacagaaacaaaatctaataaaacaaatagcttacaacataaaaaaccaactaataaattatctcagaatacattttcttttctattcgaagagcaaaagcaatgctacaaaattttaaactggttgatttctcaaaaaaacagtgaaagaaaacaacttgtgtggtggtttctattttcatttcatggcttgcctttcttgtcatttctagttctcttcctaaattctcggttctcagcggagtattgcttttttattagaagattgctcattgcttttttcacagcttcagcagcagccaagaaatcttcttcactatacgataaacttccctgaagtttctcgagcagttttgtccctgcaggtatctcgttatcttccagcaaaagtggctcgtgctgatgag

SEQ ID NO: 146067 - DNA, 577 bp, Cannabis sativa
atgggaaaaagggaaagttcactgacaccaatgaatgcaacaatctgaagcgggaaatcaaattcctgataaggaaaaataatccgcacgtacagaagtatgtaaaggttgattagaatcagaggggcgataacaactaagacttgttaccaccaccagtagatggacatctgcaagtcattattgaaggcccgcatatagctggagattcaggcaaagcacgggagaggtatgctcgaacagtacagcacgagcaagaagaagtagtcctagctgtagaagagaggaagccaaaaatcccacaggcaggagagcccagcataacattcaatgatgaggatgctgtcaaaattagatttctgcacaacgacccgttggtcgtggaagtccagatagccaacaagaagatggccagaaccatgatagataatggagcctattccaacatcttattcaagaccacatatgaaaagatggggctccaacacaaagatctaacccttgtcttctgctcgtatatggtttctccggccaaggagttgcagctctagggaaaattcgcctacccctcactgtt

SEQ ID NO: 146068 - DNA, 513 bp, Cannabis sativa
  modified_base (290)..(290): a, c, t, g, unknown or other
gagatcacctttgtgactctggcctacccagaatgatcaggttgtttctatttttgtttatgtttatatttttattcgctatttatttcctttgtttttattttggtttttttagaggatcaatatcgctgctatccatggttgcttgctctccaggtgttctctttccttattcttttaatttttatatctttagacattgaggacactgtctgattttagttgggggtggtgagcatattcaagcatgcttagtaatttttgtcatattaatattttcatagtcaaanttttcaaaaattacttatttattcttgtaaaatattattttcaagccaattttgctatctttattacttagaatttttctagagttataaaatgcacatgccaatctttgtggtaagatggttgttaggacacatttgcttataaaatttgccaagtttaagtgttcatattatttttgagtggcgagatttgagaaaacaacttttgaattttcattgattc

SEQ ID NO: 146069 - DNA, 702 bp, Cannabis sativa
  modified_base (524)..(530): a, c, t, g, unknown or other
aattcctgtgtctttttattgttttatcatatatttgtcattataaatcatttatcgcttataaaatagactccttatcgttgggtaaaagcgaggtcaacagctatctataggaagtatttgaatcctagacatagattttatttctctaatgaatagttttaactattccgtaaaagataaagtccaaggaaagaatttcttaggatcaaccgtgagaggtctcaggtatgccctgctatgcattagaccagacacctactgttgagtgggagttatgagtaggtatcagattaatccaggaaaagaacattggaagacaatcaaatgaatcttaagatgaagaagaggaagtatatgttagtcgataagggtggtatattaatactcttagactacaccaaataaagtttctagaattgcgtcattgctagaaagtctactgatgagatggtgattactctgggagtggagcagggatttttggagaagtgttaaaacctatctgaagtctctaactctannnnnnngactgaatgttaaagttacaggaaggatacttattcatcctatggaaagctctttacagtttttggcattgtaccaatactgaattaactactagtgttacttcctgactaatacagaagtagttgcgaaaaagtaaagaatccagtatccctagaggagtaggcatataga

SEQ ID NO: 146070 - DNA, 1048 bp, Cannabis sativa
acattctaaaatttgtggccaaacaccacctcatgaccaaaatctaatcttttatgtccttactttgtttcatagagccttcccccggtatcccaggttggccttttgcttctttttgctgattctcaattttttcttatggttcacatgttttgaggattttataatggggttttaatttactttacataactggttttttttgtttgctataattggtttcttgttatagtagtttaattttataagtcatttcttaagaatttttacgtgtattttttttatataatatatatttttttttttttgtaagttttccatattttatttattttttatatgagggaaactggttttataagttttgttagaattttgtatgagttcacaaggtttttttttatggttttataggttttgttatgatttttcatagagttaaaactggtttcacaggattaacaagttcgaaactggtggtttcacatgttttgagagctctgtaatgagttgctcttatttaggatgttattgtgtatcttttattttaagtttctttttattattttatttctagatttgaaacttgttttcacacttattttttgtttttagattattgttgtttattgtgtgttgctttgattatctttgtaattaatattttttatttttgtatttgcgtgtgtgtttttttttctcatttggtttctgatgaaattggtttcagttaaattttattgtttatcatttatgttttgttatgatttttcatatggtcgaaactggtttcaaaaattcaaaactagtttcacatggttcacaaattcaaaactagtttcacatggtttacaaattcgaaattggtttcacagattttaagggttatgtaatggggttgttccttttttttatgttattgtaaatttttattttaagtttctttttattattttatttctaggctcgaaactggttatcacactgtattgttgttgtgtgacgaaactcatttttgtttggtttttataatgttcattgttgttgt

SEQ ID NO: 146071 - DNA, 603 bp, Cannabis sativa
aactaattttactttttatttttttaatttaaaatcaaatttaaacaaattttaaaaacagatattttatgattttaaaaaattttaaaatcacttttttctcatttcattctctctctctggatcgttccttgctcagttccattccgaaaattgatcaatggcttcagctattccaggtaaagatttcttcatctccatatatctctctctctctctctcttcctcttggtctctccctctctctcaatttttttctaggtttgaaaaaatcttcatctccatatatgctttctacttagggtttgcaggtttatactgtcattgtaatcttgtttgagttttttgcatatttggctttttgcttgttcccatgtaattttcgtgggtgttcatgtaaaatattttcagattgtttgttgggtctaagtgattattcatttagatggtgagcatatgtgttaataattttcttcgaagtttcgaacttgcattttaatatttcaactgatttcgttttgtacttatgctaattctactgctgccatttttttttgttctagcttagtttctttcttggttttttttttttttttgggaaga

SEQ ID NO: 146072 - DNA, 1023 bp, Cannabis sativa
gtcttcatgcgaccaggcaaaaatttataggtttgctcttagaaattttatcaaagctgattttacttcaagcagcaaacctttgccaatttttagcttcctggacaggatctttgggtcgatttctatttcttccagttcttccactggcctaactgtaatatttggttcccgaagtcggggatccacatcttcgtccccgccttgggcggttccctatttggcaatgcttttccccctgtctgaactctagccagaggattcttcctttttggccttagtcagggcaaggttataacattctcgtgcaacttgttgatttccctttaggcaccctaccccattctttgttgggaacttgatgcacgaatggaaaattgatgtaacaacctttaggtcatataaggttggtcggcctaacataacattaaaagctgatggaacatcaattatcagaaattatgccatcagagttatgctcctcggagcttgtccaacagtgacgggtagataaatttgccctaaaggtgcaacactctggccggagaaaccatacaccggttgggtataggagatcgaatctttgagttagagtcccatcttttcatatggtgctttgaacaaaatgtttacaaaagctccattgtctatcatagtccgggccattattttatttactatctgtacttcaatgactaagggattattgtgcaggaagcgaacatggatagcatcttcttcagtgaaggttatagtgggttcccttacctatggaatttttggcttcatttcttctacgaccaaaactacttccttttgttcgtgttgcaaggttcaggcatacctctcccgagctttgcctgaatctccagcaatgtgtgggcccccaatgatgacttgtaaatgcccatccacagctggtggcattagtaggtcttggttgttgtctgcttgggtggcctgctgattgtgatcggccttgacgtacttttgcacgtgcgggttatttttccttatcaggaa

SEQ ID NO: 146073 - DNA, 805 bp, Cannabis sativa
taaaaattagaacagtgtttccacatacgtaactctatctacatgtctcttcgtgatttaatatgaacaaattcactattgaaaatttagaaaataacgaaaatgtatcaaaataaatattttactatagtattgatgtagttttttttggattatactcgagttggattgttttggaactccagtttaattttttgagatttacatttcatggatttgaaaattgaggtcaggttatcgattttatgcaaattaaattggatttctggttgaattttagtttcgtagtaatttttctgcactttttttcatgaatttgatatagtctctgttttgattgattccggtcgtcttctcaggtaaactcgttgaaattaatggtggtttttttctggttgggtttcgttttggttatgttgggttgttgggtggttgaccgaaggttgtatcacacgaaggtttcaatctcaggaagcgtggaccgtgagttgaaggtgtgtgtaagaggtatttgtgtaatttttttatttggactgtaaatttatttatttggccggctgaaagttttttttttgtaatattgttacctttttttggttaaaactgaaaaaagctcattttttattatatataaataaatatattattttttaatgtatataaatgtaattagattggatttttttttaattagattttgagatttacattcaataactaatttaatctaattgaattaaatatttaggtggcgtttggtaacattttttaattaattttctatttttaaaattaaaaaagtaaa

SEQ ID NO: 146074 - DNA, 817 bp, Cannabis sativa
agtcccatgtttcgataccgatctgagtccaggtttagttcccggtctaggtttgagtttgggtctaggactaggtctaggtttgggtctgattctaagtttgaatttgagtttgggtcccgtggttgggtccgattttgggttaaggttcgggttcaggtacggtactagtccgcgtttaggttcctgacttggtttgggtctagggtaggtttcggatctgagtctgggtctgacttcagattcctaagtgcaagtcacgtccttgttcgggttcgagtcctagattctgatgtgggtctgggttccaggggctaggtccctaatctgggtccccatctaagttcgattcctaggtcatggtctgggtccaggttcgggtccaggtctcggtcccaatcttggtctaggttcgagttcgggtccctattagggtctggatcttggtttgggtctcagcgagggtttcagaccaggtcaggtaaaagtcccaatctaggttcgggtcccaggtctcatgtcccagtcctagtcaaggtctctgtccaagttctggtccgagtttgggttatggtttgggtttggttttggtctcaagttcgggtcctagtcacagttctagttatgattctgggtctgggtttggttctgggtcagtgtctgggtccaaattggggtcagggtccgagtcttagtccaagtccgggtactggctttttaaaatccttggctaggtctaggtctgagtttgggtctaggtccgagtctaggtcccgtgtttctatcctagtctagtgtctgggtcggtattcgattt

SEQ ID NO: 146075 - DNA, 979 bp, Cannabis sativa
cacgtgctcggtccaactcgaggtcattgttcctctgaccggccaagccttcgaacatattttttagttcatccaactgtccctgcacggctagattaacttgttcagcctcttggccgaccagagtcacgtcaacatctctttgagcgggattttgagcacgtatcctgggctgtacgattggtgcatcatgctggtcgtccaatcctctccttctatttaaatcatctctaagatcatgaattgttcccaatcgattaaatatagaaacacatggttgtctcaatgatgggtttttttggccaattagctggctggcaccattaacttggttggaattattaggtatgacttctcctcatgaattgctggacaaggtttgcccgcgtaccacttggcccacaagtgggacctatgaccgaggattggatggatgaccatttatagtctgagaggtgttcaccactggatcattgtttgtcttgcctaagggaatgatggtaacagactattgtccggtagtctaataggcttttcgtattaacacagtggcctgccaggtttagtcgtcaatggctacttgctgagccctcaacgtttccatttctttatcccttcattcaatgaacatgtgcctctactcttcaaatgtgagattcaccacagcgtggagttcctcctgatcatgatgtagggtgttggtatgacattgcatgactctaagagcagcacggaggttgggaatgccctgattagctgttgaactggtattcccaatctcttgcacaccaagcgcgatttcactcacacgacttgtgacaccgtgacctacaattgatggatgttcaggattcgtggtggtggaacccttgtgtttcctaggttttgcagtgctggatttactgtttgtggatttacgggatcaaccacgcctctacgaggctgtaccaccattgtatttgcgactagatttgaaata

SEQ ID NO: 146076 - DNA, 657 bp, Cannabis sativa
agatgtactcctgaaaagcatgatttcactaatgctgactatgccatcactggtgccaactatgtcgatattgaatcggacatctgatcaaaaaatgaccattctttagctccacatttcaaacgagtgaaatgtgcaaagcatgacgattctagtcgtattgaagatgtctccttcccacttactcagagttcagagataccgccatctgatacttgctttggagcttctagctcaagggataaagaacttatcgattttgatgggtctgatgattatgttgacaaagaatttgacagtgaggcattgcctgcagagcacaccattctaccagaactgattgcctcagcaaagatgggtgttccatcatcagttgttccctcagatttgcttattcctctaccagacccagtgttgacaatgttagcttcagcaatcaccaactccgacttgaatgaacataccaaaaggtttgtgattgaatgcatgaaagacattcttcatttgttatcttctcttttgacaacaacagacatttcaaaacattgtgcggacgtgggtatgcaacttgacgtgttgagtaccctttgcgggcattataaatgtggcttagcagaggttgcatggctcactaacaatgtcaatgatttgctcaaa

SEQ ID NO: 146077 - DNA, 672 bp, Cannabis sativa
aaaagagggtaaaaataaaagaggacaatataaaaaaggtatagaatgtaatttcctctttttagaagatcaagaaaaagcctaaaggaagaggcccattcggcccaaaacccttcaccaagagacagccgcgccacgtggcaggctgtcattcggccatcagacccgagccccacgtggaacaggtgccaggccccttgtccccccctctctcccttccatgcacgcgtgaggcgcacgacctaattctggtcatgcgtgcgcctcacgcccaagcctgcgactacgcttcatccggagctggttctcttcagccacaaaaagtcaaaattgctcctttttatagtcaatcaaatgtcaacacgtggcagcaatttgatcaaagcaaccaattcgagcacgccatgtggcacttcagttgtaactttgtgtaattacatttttacccacatgcaatttgtaataagtttaattgcgcattagtccttttactttcctataaataaaagcttaggtttttaaaattcaatacaatttcagacagaaaaatctagagaaaagcttaaagcggtcagtgttagattaccaattttcttagttaattttcttatgagagtctaagttcccttattattaaggcgaacgatgaaacctagtgtatttaattaagta

SEQ ID NO: 146078 - DNA, 559 bp, Cannabis sativa
atgatgatgatgtttcttgtcgtgctatcatggtttgttgggctttatggaaggcgcggaatacactggtttgaaacaacaaagcttcttctccaactcaagttctcgtatcagcatggattacacttgaccattggcgtaaagttcaagataagaatagtttattatcattgtctctccaacaaaatgataataaaattgagcaatagactaaactcgatttaaatacggtcaagatcaatgttgatggagcctcttttgagaaagaaaatgcttacggttttggtgtggttgctcgtgattcatctgggcatcttgttgatctcacatccaaataccaagtcggttcttatgcggttgaggtgatcaaagcacttggtgttaaagaggctcttagttggctaaaaggcaaaggatggagtaaagtcgaggtggagactgatagcatggttatagttcaaacaatctttagtaaacaacaaatgacttctgtttttgggttgattattaatgattgtaaattttcattatcatctctacaaaatgttagtcttcgttt

SEQ ID NO: 146079 - DNA, 538 bp, Cannabis sativa
aatattatcaatacatttttttaaatcaggagagcagttattgtgaactttctcattgcgcgccctccaaatagtatccacaacaattgaggcataaagaaacacttcgtcagctcggacccctcttgtatttagatcccaaataaacttgacccaatcccaaactcggataccagtgtcacaaattggatagatgccccagggagaggagcgccagaagtggaacgccacctcacaggaaaggaaaagatgttcaaacgattcctcccccaacccacataaggggcaggttgtgtcatcaatgtggaatctttttcgtatcaccgctctaaccgggagggcactagaaaggatacaccaccaaagcactttatgacgctccgaaattttgctattccatagcttattccagagtttaggagctacctcacagtgaggagctctttcaagagcctgagacagatacgcagatttggacgagaatcgcccggaactttctagcgtccacacccaactgtcagggccagtacccgaaggg

SEQ ID NO: 146080 - DNA, 713 bp, Cannabis sativa
taaaactcccccctctcagtctgactttctcttcttccgtcttcactctccaccagcggacaagcaccattagtaactctagtctccaccagcggtcttcagtacgttggacgttcagaaagtcctcttctccttcggggtttctaactgacggtgatggtttgcagtggctgacagcgcgattccattataagctagatctgaattttttttcgaaaattatactagatctgatttatttttattgttttaggtatttttgttccaagtatgtttataccaatttttaagattttgtattctgattttattttttctatagattaaagtaaatgtatatgtttttgattgtaaataacattcagattttatgttaattagtattcagatattcagattttatgtaaataaatttcttattttttgttaaaatttgattgatgaaagaattctctttatgttaattactatttaaaaaaataatatattatcaataatataaaatcagtttccctaaaaaaaataatattaaatcagattaaatagaagctaaaattattagcaaaaataaaaaaaaataaaaaaaaaatacttttgccaaaagttgtacacagtcatctaaagtaatttttctcaacagttataaaacgtcatttaaaatgactttttccaacagttataaatcgccttttaaagttcagcatttttatgac

SEQ ID NO: 146081 - DNA, 613 bp, Cannabis sativa
acttgcgtagtaattaataaattatagcaacaaatggcgaaacagatagaaatctatcaaaataagtgtaatggaaccccaaccattaaatctcgaactccgaaatgccaacgtcttcttttcatttctctccgtctctttctctctttccctctctccgctccctctctgtctctgtaacgccctactagtttaggcgtgctataatgctttacttaattactgtgctgacatttgctaatcaaaggatttaatataaaattatgtataattaaaattttataataataatatagtttcataaacatcataaatgtaaactgtatacaaaacaagggatcccaaaatctatttttaaaaaaataaacataataaaagtgttgcccacgactaacaaatttgagcctatattgtcctgaagattcaaacaatccaagtctaatcatccagatatgtacaatctttactgagatctaatactcacatctttacctacacatgaaacatatatttgtgagtcaaaagactctgtaagaaaagcataaaatataaatatataactgtttggattttatgccctaaataaaatctatttcaatctaatctgatttgt

SEQ ID NO: 146082 - DNA, 707 bp, Cannabis sativa
  modified_base (253)..(257): a, c, t, g, unknown or other
  modified_base (641)..(660): a, c, t, g, unknown or other
tctcccaagtcataatagggtgagttccttcaaaccctcccactacgataaggtaccgtgactatctgtctaagaacataagtggtattgacctcataggttgtaccaggacaacaaaggcagtgggaccatcttatagagaataagctgatagaacaatttggaatcaagataaaaaatatctcctctactttgctactttgttttcagacttagtcatattcttagagaagtagtatttgttgaaacaaannnnntcttatcttaatgaccataggatagtccacccctaatcacttagaatagctatcaaatatgcaaaccttagttaacagttctaacttttcttaagttcacgattaggacacccatgaatctgaaatggtttacacaaccattccatctttctaaaattttctatcactatagtatttccttagaaggacttaggcaattactagtaactaatcatcgaccttttactttcatcaatatgcaacctaaatttctagggaggtaagcttgaatacaattcgaagttcaacttaatggtcattgaactgcttattcaccaaatatttctccacccctattagttcgcaagatctttattaacagaaattcatgaaattttttaaacnnnnnnnnnnnnnnnnnnnnaggtaaaatctagagtgatcgtctaaagaatttaacgataactcata

SEQ ID NO: 146083 - DNA, 557 bp, Cannabis sativa
aaatgagcagaatgtaactagagggagatatttgcaacgatttgcataatttaaggagaatttttacaactgaagtgtttaggaagtaaaactctaaaggacaaaaattattttattctatattaaggaatgcgtccgcgcttcgtgtagtttcaaaagattttttaaactatatattaatgttttttaataataagttttgtaattataaataacattttaactctaatatttttaattttttatgaataatatgaaaaattatgtaatactaaaaatttgtatgtatatatatcttatataacattagcacaaaaaataaattataatacaccaaatatatgtatatttatatattagatcaaaattacgtgcaatgcaaatttcatacactctatatcttactattataaaagtgtcataatagtgtgataattgtaatgacaattttttcctttatgaaatcaaataaaatgttatagaaaaataattttgccatttgaaaagtcaaaatatactcatatctctctttctctctctctctctaattaaacaag

SEQ ID NO: 146084 - DNA, 531 bp, Cannabis sativa
aacaacaatttttgttatatacttaagttattattttttttttacatttgataaaacataataaaaaaatattataaattatttttatcaaatacatataaatttatatttgaaaaaaaattaaaaatatgtagaaaataaaataatatataaaataagtttattacatactttgattataataaactagattatatcattatcattatcattataatagatcttaataactcatagtactttgaaatttataatttatcaaacactcaactcagcctttttccatagttctactacaactgttttttttcacagcacagctacagctgctttctctcactacacagttgtgctaaactggtcatttaaatattaatttaattaaatttcttggcaaaaataattggagtttttacaaatatattgaattttaggtaaaagttacaattttactgttatacggattttttttttacaaaattactgtctttttataaaacaaccgtaaaacaataaaatagaacaattaaa

SEQ ID NO: 146085 - DNA, 535 bp, Cannabis sativa
agaagaagaagaaacttgatgccatgcttgaggcgcgtattggtcctcgccttcctcctcgcattgactaggccgattgaatctagcccactttaccaagataatttatatttttgacctgccccgggccctttgtatatatttttttttgacctgcccttagggctaggatattttatatatatgatccttttgattcatatttgctctttggacctgccctttgggtcaggatattttgtttttacttttgtcctgttttacatctgtccgtgtggtatgccttagtaccccctgagtggcatgaaaactttgttttcaaggcactcagttttatttaaaatttagaggttgcatacacttagacggtacaaattctttaaacaaagcctaagttaacatatttggactattggtaatacttccggaggtgatcagtgttccaggcatttggcacaatggttccatccatcctttttagcttataggttccggagccgatttcatcctcgatttcatatggcccttcccaatt

SEQ ID NO: 146086 - DNA, 618 bp, Cannabis sativa
gatcatcttggcagggtgcttcggattacaacaaccaggctagattttgttgattctctgtgtggcgaagcggcggcttgctgcttggcggctgagacggctctggatcttaaggccaactttattattgtggagaatgattcgagtgtggttatcaatgctcttattgagaaggagtcttaatgggcgcttgagaactacatctcattttgtaatagatctgttcgtttattttcaagttgtgtcttttcttatgttagtagaacttgtaatttcgcggcccataacgtggccaagtgggcattcacccacaagacatttggtgttattctggtttcctctatacggggggacctgttatgtaatgaccgcgatgtctaacttttatccttattaatatatattgcttcgcttttcttccaaaaaaaaaaaaaagattgattctcacattaagcttgttggtagaagtagtagggtaactatagactacatgttagtgatgtgttttggttaatttacattcttctaatgttatcacaatataatttttttatgtacgaaaatgttgctaaaattataatcactacgcaagtatacgcaatcaagtagtaaactcac

SEQ ID NO: 146087 - DNA, 516 bp, Cannabis sativa
tcactggttaaaagctcaagataaaacaagtttgttatcctcttctttgataggagatggaaacaactttgagcattggactaaacctgcttatgatacgatcaagatcaacgttgacgtgaccatctttgagaaagacaatgcctatgggtttggtattgtagcttgtgattcagaaagcagggtcattgactttgtggccaagtactatcatggctcgttctcggctgaggttgttgaggcctaaggggtcaaggaagcactcagttggctcaaagataaaggttagaatacggtagaggtggaaactgatagtttactcactgtccaagcaatctctagtaatcaataaatttcttctatctttggtctgattacttatgattgtaaaattctcttattctctctacctaatgttagtgttcgttttgttagacgatcagcaaacaaagttgcccacttcatagctagacgctcttgtttctattctgatcgtagcattcatgatgttgatgt

SEQ ID NO: 146088 - DNA, 708 bp, Cannabis sativa
acacaatatggataatggtgattacttaatccatttatcaaccttgcactcaaaacaagactttgaattacttgtttgcacaatgtgggctatttggcataatataaacaaagtcacacatggggtgtctcacgcccaagccatgccattgcttcatttgctgttacacacttggagaggtttattagtagcaaagcaaagcaccaacatgtaccagcaagcattaatcctccagtggttgtttcagcaagtaatcatacaccagaagttgcaccagtaactaggctgcttcaagataattcacgacattcttccatggttgccaccgtcacctactgggctcaaattaaatgttgatgctgctgtcaatcacgagttgaaaatcttgggaataggtgccgttatacgagatcatcttggtaatgtcgttgctgctctttccaagcctgttcaaggttattttagatcggatgaaatggaggccaaggcgctttttcatagcctcaattgggtgatgcaaatgcaactttcaatttcacatatcgaaacagatgcattgcgagtttctttggccccaaactctacatctcgcaaactctcaagttttaataatttaatcgtagatattagctgtcttttatcctttttctcaggagtaactatttctcatgttaagagaaatgctaaccaagctgcacatggtttagc

SEQ ID NO: 146089 - DNA, 623 bp, Cannabis sativa
acaatccttttatttaaaggaaataccctttgattccaattacgatgatattaaatgatttgaaataaattagggaaattcggggtaaatttggaattgtaactgaactcagtcaacttaattaaccgagctgcctacataccttctttgtaaaggatcaagccacttgtagttcagaatacggtaatttagaatttagatataaggattccggtagatgaccactttcaggaatcctttgctatttaaaaatttaggaaaattcctacgtgtatgaccttttatgaaattttaagatttgtatttttataccattttgcggtatcggcgactgcacttagtcttagcaactaagttgcttacgtatccttttataggaatcaagtcgaacgtagttccaatatttttaattttttttatgaggtgaatgacctctgttttgtaatgccatttaatttgctatggctttgaagtttagtgcactatttaattttttaggtaaaattaccatttttgagacttttgtgaagggaatgacctccttgaaattttgtgaggtgaatgacctctttgatattccaagattaattttagtgagctcatttagaattttgtgccatttt

SEQ ID NO: 146090 - DNA, 953 bp, Cannabis sativa
  modified_base (909)..(918): a, c, t, g, unknown or other
ttttcgaaatgaaatatatatttgtagaaaattaaatttgagttgtaaattaattaattttaatacaacttaaattgaataatttttgaaatatttattgaaaattattactaagataatacggtagaattttctttctctctctctctctctcttggtcacgccactcaccctcactcaaatgcctatccctataggttggtatgtatgttatcttcttccctatctcaatgacagtatctcatgagtgtagtacacactgtgatcaatcctatcttagaggatttctagtcttgttgccaaggttatgggttggacgaccttcattgctatcattagggggattatcttggtgattattgtttctaggccaattctcagccccatcttcataacaactagggaatgattaaccacttcaagagttggtccggccttgttgaggttgttgcttgttttactttttttcacctgtgtacttggactctcccatcctggttgtattgggtgatatgtcctcaggatcctcccatacatcgaggaggtgccccttcttcccttccctcctattgagttcagaagttatcctagtcgttccttccaaggtagtggtcgggtggctagacaacttgaattttaaccttaaggccttgaatttgtgggcttctcttgcctaggtgcatgtgtattgttattggtcgggcattcttctaacccatgctcgaccctgctattaaggatgtagggtcccttcccccattttcatctcttttgggtggcgaaacatcgattccttgcccctcagtttgttgggcaaattgctggatcaaatcagcagcttgcttggcatgacgatttatgtaacaccctaactagcataggcgtattaacgtgattttaaacatactnnnnnnnnnnttgctaatcaatgaggttattgaaaatcgtgaata

SEQ ID NO: 146091 - DNA, 663 bp, Cannabis sativa
aatgtcaatttcgaacatagcgggtattttcacaccctttagcttccctttttataaatagggttgaaaaaactgcttctaaaagctaatattgtagtagtgacgccctctcctatccaaactcctcaatatttttaatctatttcttcttacaattggccctccaatcatgcaaacttttcaacattttatacaaagcatagtccataaaaacttgattatctcgtagatacacaaactttatctactaaaaagttacacaataaaattgatgcattaattataatagtgtagaataatatacttggaagtattacctaacaaataattaaaactaataatacattacagttacatcaaggaacatgagtggccgggtggttagagtattagctcgtttcaaaaatatttgttcatgaaaacaatttgttatggtaggcattaaatatatattaacactcaacgataatagtatgtaaacttaatttaagctattaatatatattcaagtggtcttttatcatttcaaattaactaagtagtatttgagtatatatatatatatatgactatttaatggttatatttttattgtaattatatggttacattttttttgacttggtagacatttatatgactatttaatggttatatatatat

SEQ ID NO: 146092 - DNA, 869 bp, Cannabis sativa
taatagatttgcatactcttgttatatgtagtgggctttattcatttaatttttttgaaaaatatattttttcagatcttatagagtagctaccatggtagatttgactagtattacttcatatcaaagcatggattgacattctatttagaaaaacttttgtagatctgtaaaaagacttaataaagttacttatcatatgtgtttgttggttgtccatgttgtgtttcatgtctaaattctagcagtggtttttgttttgtttcatttttattcattggaattatttcaaaagtaaataagtttctcatcattttaaagtacttgaatatgtaaaatgtaataaaaattaaaaattaatatatgagttttgaaaattatggaggagagtgatctcacccttgatttatgtctgtttatgttgtgttgtaatatgaaaagagagacctctctcttaatctgtgtaattgttgcgctaacatgaaaggataactaggcttttaaatatgaaattgtagattgattgttggtgatggttgtgctacttcttttgagtggttttacttcaagtgtttagaatgattgttgtacatgaacgacaaagatttggtactcttaaatgaaacatgttactggttaagaatccttttttaggcaaattactccattgtatttggtttttataagtatgacaaaagtaaatttaacaattagactatagtacatatagtgaaaggatatgatataggaagagatgcttacttattattggaaacatacaggaaaataagtgtagggatgtcatgaatacactgaaattttagactgttgcaatgaattattcaaaaaaattgtcttccaacatttta

SEQ ID NO: 146093 - DNA, 593 bp, Cannabis sativa
tacatagctccctatgggtcctccgtgagatgcttgaaatctttgttgtcgttgtgggcaatctttcttcttatgaccttattgactacaactgaaacactcatacggtccactacgagtctttcaagatgaaccactactagtggtacccccactaaattgttgtccttgggatcactgttcttgattcttcttggtcatctttcagtcatttccttttcatctgctcgtgttcttcttctcattcccttctacatgacccttagtttgcaaggctgctgtcacacactcagttaggttgttaaaggtcaaaagagccattggaccacgtatcgcaggcctccaacgacgcatgaatagttcaatcaccaagggttggtcaacaacaccagggtatgcataagaggatagctatacaaacttcatgtaaaattcattcatagtcatatccccttgtcttaaaccattaaatactctaattagagccctcttgtcagatggactaaaatattgctccctgaaaacttcctcaaaatctcgccaagtcatcccatcagtttccattgtcctggataaggtctcccaccaatctg

SEQ ID NO: 146094 - DNA, 703 bp, Cannabis sativa
ctcttgcctaaacgggacaacatcggattctcttttcgattgaataaaaggttgctaaaatgttattcattttagatgagttgactacactattcaatagatgatatctttaactctcgcctaaacgggacactgtattaatttattgaaaaccttggaaaataattgaatatgttttattttggtatttttacaagcatgtttacttaattgttattttctaaacttgtgtatgaatttaagagagccaaatgatttatttatgtttattgatttttgtatgtcaaaatggataacccacaccttgaacctcaccttgtacatgccttttcaaatgaactctacagtgtgaaaatgtctcctggtaagagcattaatttgttgggagaatctgaagtttcagaaaaaaaaatttgttgggaattgatttatcaagagagcaattggttcaattcattcttaatagtcttccagctgagtataatggattttttgtatcctacatggtcaacaattttaagtcatccaacgtagataagctggacgcagagttgcgtgcttacgaacgttgtttgcctgcaaggaggccatcttccagttttgcagacatgagtaagaggaaaataattaagtatgatgcttctaacaatgctgcttcttcaagttcaaacattgaaataatggatagtcgtactcttcaatg

SEQ ID NO: 146095 - DNA, 791 bp, Cannabis sativa
ctctcaattggttgtttagtttcctcatgaccatccacatctttgattgtgatttgatcttcaataacttgataattgaggatggatgtttcttcattcacctaattgagatcatcatttgctgagcaagcatccaatgtacccagatttttagccacttcaaaggattctttctcttcaattataggctcaatctcttctatatgttcatctaatggtgcttctgctatattcaaacaactctcataactttcgttatttaagttattatccttaaaactctttgaatcatgcccctttaaattatcacatagagcttttaccatgtccgccaagcgattaatctcttctggaagtgattgtatattctcctctttttcaattggttggggtgagtttggaaaataaggagggtattggagactccaaccttgaagtgatggatcccaatgccaatcgtaatcaaaatctgccatatcattcaacagatttattgcttcatgacctctccttaacaaaggctctccagttatctctgctccataatccacccaactttttgtttcatcattaagtccattgtaaaagaatagaataaaaaaaccacttgagaaattgggataacatctccctttgagctccttaaatctccgccaagcagaatagaatggctcattgtgttgctggacaaaattatcaaggtatagcatttcgatttaccttgcaggtcaaacacataagtaaaacattagtaaaattaaaacaaaaaaaccaaattagaatagaattca

SEQ ID NO: 146096 - DNA, 527 bp, Cannabis sativa
aagatcctggtaaaataaaatttccaacagacgcatcatttgacattcactcaattccatgcgatcttgcgcgatggagagataagggaagcatattgcattacctcaatcgccaagaaggaagaccattcctcgaggtttatttcaacttggttggaaaatcttcttgggagagtagagaattaatccgagaattccaagaagttttttccgaacccactacactgcctccataccggagcatagaccacataattttcttagaattgggatcatctccagtcaatgtgagaccatatcgctacccatattaccaaaatgatatcattgaaaaactagttcgagagatgttgtcttgggggtttattcagcatagtaatagcccctattcttcaccaatactgctagtgagaaagaaggatggtaactggcacttttgtgttgactatagagctcttaacaacattactgtcaaggatcgtttttgttgggttttatgccctaaataaaactcatttcacataatc

SEQ ID NO: 146097 - DNA, 2084 bp, Cannabis sativa
aaggtgacccactaccccacaataaaacaagatctggctctacattggttcaaatggcgcctttttgcatcttaaatactcaggataaggtcaccatttcttattctcaccttgatcgctatccttactgccctagaacctttttgtcatgtcccataattggtggtttatttagtttttgcttcttgatctactagtaagttggcttcatatattccaccacatctagtggtacaacaggaagtgtcgataatataagaatagacacaagatgagcctattattctttcagatctcagaactattttcccttattgtctaatcatatcctgcataacagaatttacatgttcctcgcattatggtaatgaaaaattctcttccttaccattttcctcgagcccagatagctcgctaatcaggctatttgattgcccttactgcttaacttatcacacgtttaatccacatcttctaaccatttagaactcagacggatatcaatattaatatgcatataccatacacatattcttatcacaatcatcactatggtacttttcgcaacatactttataatagcctaggcaggtaatccaataacaaataatatatatacttactatataccatgagtctacctgtcctcgcaacaaatgtacatattcgaccagtctttagcacctttaaaacaatggctgctctgataccaagttgtagcaccctaatctatagggacgccatgtgtgtgattttataaactagtttaatactaatggattaattaattattaaaaactgtcataatattaaaaacttgaccaaagtaaatcactaaaatagacattataaaggcataaaaagcgtgttccgggaatccctgttataagaatttttgctaaagaaatatatacaacaaccatttaaatacaaagtcaaaatacacaatagatacagccagcccaaaacaactcctagcaactcggtgtgcaggccggtgaggtccatatgtacattgctggagaagactgtcacttcatggttgatcaagcttttatttgcgtttacctgcaccacatagcacccgtgagtcacaagaacttagtaagaaaagtaataataataatataatcatatagtttatcattcgaatattgtcatttatataaaataggaatcaaaccatcaaacattgctcataagatgaaatctaaattaccactggcatctgccacgaataaacatcaatagatagaaatttcgtaatacaaaactattacacaataataaaattcatatttatttaatcatacaaattatatatagtttacctctataaaacaaccatcttcataacatcacattgcctaatcaagcaagtcgatgcttaaataggataattctatattgcatttcctaatcaggcaagcccgtgccatagcctgacacacatatattgcataactacatcacctaattaggtgagtttgggccaaaaacctgcacccatatatcatattattgcatcacttaatatcaggtgagcacgtgccacactttggcaccaatatatctcatcgcctaattagacgaccccgtacctatgcccggtacttatcatatgtcactgacatccgtatttacacgttaccaggaggaaaccctacaacggtttcattttatgccataacctggcaattttcatatcactgacgccgtatctacacatcgccaggagtaattgcctaatcggataaactcgtaactacgcccagtacatatcatatatcattgacgcccgtactcacgcctcatacgtttccaagaaaatcgcatcacctaatcaggttagcctgtacctacgctcagtactcattatatatcactgacgcccgtacttacgcctagtatgtcgccaggaaaattgcatcacctaatcaagtgagcctgtatatcacatgcataatatcatcacactatcgatacttaaccaatcaatattttcattatataacaatattaactatctctcaatattaatcaattcataatgatactaattgtattagatacaacgtactatg

SEQ ID NO: 146098 - DNA, 676 bp, Cannabis sativa
  modified_base (84)..(85): a, c, t, g, unknown or other
  modified_base (156)..(162): a, c, t, g, unknown or other
gtttggatttgggacccagccctgcccccgaaccctgacaaggacccgaacccacacccggacctgaacccagacccaaacccnnagtggacccgaacctgtaccctgtacccaaaattggaagcaaaaccgaaagttgactgggactggaactannnnnnngacttggaatcataactgaaatcgaacctctttccagaaccataactggaccaacacccggactccaaataagacctagacccaaattgggagccgaaccatccaaacccaaacctcgactctggacccgaacctgaacctgaactcagaccgaaacatggaaccagactagggacatagaaccaaggtcgggacctagaaccgcacccttgtcttgatcacgaacccacactcagaaatgggacttattacttgaagaagaaccagaccaagacctgtgacagtgatccagatctttattcaagattcgcgtaactgggcctggaacagactaatagtcggtgtcatgatctgggactcagactaggactacaacccagacgaagaaccacaccgaaacctagaaccagagctgagagccaaaattagaacctgaacaagaatcgctgaaccaggaccgtagaacaagactaggaccgtgaccagcactcgcacccagacctagaaccgaaca

SEQ ID NO: 146099 - DNA, 718 bp, Cannabis sativa
tttgaataaagaatcttcttcttcaaaaaaaaaaaaaaaaaaaaaaactaattcccaacattttttgtttctaacatttttttttcttcactttttatttttcttattcatttttatagttcataacatcaccaccacgatcaccatccacagaccgaatcaccaccaccaccaaccaccatcaatacaggtaccgaaaccaccactactttccaacaccatcactgtaacttattttcaaactcaaatcacacagaaataaaatttacacaaaatccaatctaacaaacaagcaaacacacatatatacatatgaagctccaaacccagatttgaaaatacctaaaaaaattaaacaaacccatatcacataaactcaaacaaacaaatacatgcatctcaaatccatggaagaaacaatgtaacaaacccagattgaaaaaaaaaatctcaaatccaaaaacgaaccaacatctgtcaacactggagccattgattccgttcgtcggcgctgcccattgtcctatcggtgcttcccactgagaagaataggagcgagaaagacgaataaacgggagagagtgaaaagggtgtgcgatgcgatctagggagagaaaaatgagggtgcaatgggatcaacgagttttgtaactggcaaggtcatccgtggcctccggttgacccaacggtaccggaggtagcccatcgcagccatgtt

SEQ ID NO: 146100 - DNA, 826 bp, Cannabis sativa
  modified_base (64)..(76): a, c, t, g, unknown or other
  modified_base (495)..(497): a, c, t, g, unknown or other
  modified_base (673)..(682): a, c, t, g, unknown or other
aaaagcacagactaaatttaggattaattgaaatgtattaattattttatgttagtgcaagtgnnnnnnnnnnnnnctttgtgccctaaataaattctatttcaatgtaattatttattcaattattaataaagaagcagatttgttctcattacttatttagtatgattttggttcatgtgatcatttatatatttatttgatttataaatccatccaaatctttatcacattgatattcttgtttattgtgtcgtcagcacaatgaaaagtaatcaagattatgtaattaaatgtattcttagatttatcagtacacagggtttaattgatatgatgatctacaatgtagtttacttgcacattggataagtgctatgtcctttccagtgcattggttaaagtaagcttgggttggatgcatggagtatgcgtcagaagggaccgatattgaacttgaactagatatgataaacttatcgtaatatctattcnnntcaatatcacctagttgattctagatcaaatgatctcaatcctcagatgattaggttctagttcagttgcattatttgtgttctttaatctattagttaaagtcgaccaaatggttcttcccatgacgtataggttaagaacatggtagtttaattgagtgggagcgctaatcatnnnnnnnnnntctatagcttctatctagacataaaagtgaaacatggtagttcagttgagtactcatttctgtgattatattagttcactaaaatatcagttataggtagctgagtgttttaaggataaaaaacattgaagggtgtaacggtaa

SEQ ID NO: 146101 - DNA, 533 bp, Cannabis sativa
ctagaataatttattgtataatttgaatcttattgatttatatattgttgtgtatagaatataaatatatacatgtgttttccaatataatatgcattaattttttccaactatatatgtcttttttcaaatagtacttaatattgcttttatctaagtttatttatatggagaagaatatatttaaagtacacatatattctcttttgctacagaggctttttactaaaactaaaatttgaagtaaaaaaaatataatgtagaagaagatttccatccagatggtaaagagtggcaagagaatataacacgtttacaaggacttgaagatgattcagagaaggaaactgttaatgatggtgttgatcacgataaggaaataacagaagatcttaatctaaatgttgaagagtggaaagacataatggcacatctagacatctcaaaagaaccatgtgagatcaatgaaaaataaaataaattaatatagtatgatagaattttaaaactattaaattaattgaaatcttaaa

SEQ ID NO: 146102 - DNA, 512 bp, Cannabis sativa
tcttcttctggttttgaatctgagcctgaacctgatttagccatatctacaccattaacaaacaaaatttaaagttagctatataacaagtaatctatacaaaatattaaatgcataaacaaacataatgtattcaacataaacaaacattatgtattcagaatagacaaataaatataaagtaagctatatatcaagttaccaagtagacacgttttcttttatttttttttgtttatgcttgcctgaatcacaattgacccatattccctcattgatatcatttctaatgtattcaacatcgtcttcctcaaggttatgattatttcccataacttgttcatgaattggttgcccaacagtgaagtcatcataacataaatcaacattctcctcatcttctttattctctaagaatctcctctctggtgtcgataaaacaacagactatttatcagtagctggattagaaatgtaaaaaacttgatctgcttggctagccatgatgaatg

SEQ ID NO: 146103 - DNA, 532 bp, Cannabis sativa
  modified_base (444)..(445): a, c, t, g, unknown or other
tgtacatcaatattttcgaatatatataattttacttttaagtggatataggcatgttttctctttgcagagagtgatcttgtcaaaaccactatgaacaagattaaatgtcatagatataatatgtggttatagtctttttttgatgatttaggtctagttacagtaaagagttcttagaatagtccaagtggatcctggtcactgaatacaaaactcatattccatacataaacatacagttcgaatccattgacagaaaatggatattaacaacttgttaaagttatactgtattgtccaatgtattcttggaaactcaaaatttgaagacttcatttataccaaatatttcttgagtaatgattcttacctggaccaccactactaatctaactctaaatctaggttgcctaaaataaacatatacaagtaggagatttnnaagatcgaggatttatatcatttaaggattgaatatcgggaatatagtcatctgcgccattcaatttcatagaagaaaatagaatga

SEQ ID NO: 146104 - DNA, 524 bp, Cannabis sativa
ttctgaacatcgatcaaagcttggccagttgccaagaatggtctcccaagaatgattgggacattgttatcttcttccatgtccagaacaataaaatcggcagggaaggcgaacttgtcaaccttgactaacacatcctcaatgactcgcctaggatgagctagtgatcgatcagccaattgtagagttactgtggtaggttttccctgaccaagctgtaatcttctgaaaactaacaaaggcatcaagttaatgctggctcccaagtcacacagtacatttattccttcaattcttccaatggtacaaggaatagtgaaactccaaggatctctgagtttgggagggagtttcttttgcagaatggcgctacactcctcagttaatgccactatttcatactcctccatttttttcttcttagataatatctccttcatgaacttcacatagctgggaatttgttccaaggcttcagcaaaaggaatgttgatgtgtaatcttttaaagacctctagaaattt

SEQ ID NO: 146105 - DNA, 601 bp, Cannabis sativa
aaaagtagagcccaaaaatgtcacttgtacttcaaagatagtgagctaaaaaaacaagccatcaaaaatccaaaaagtagaacaaaaaaatcacttgtgatcagagatatagtgagaaaaaaaaactcgcttatgatcgagttgtctaagataataagtaaataaaataactaccaccttgagaaaagatgttagagaatctcacattgctaatgtatagaaaatatatatatatatataaaatttataaactcctcagataattaactttaacatgaaatcctatatatcttataattctaactatttgttaaagattaatcattagacaagaaatacaagattttgtttctaaaaagaacaaaaataacaatgattactctaatcattgattaattagattgattaaagagaaaaagtacataaagcaaatccttatatggaaaaacaacattagttaattatattaaaataatgacaacaaataacatatatagaagagaatagaagaagaagtgttctcttctagaagaaaaaaacaacaagtactctttctttaggtagaaaaagctgtagtagtaataattataataataataat

SEQ ID NO: 146106 - DNA, 548 bp, Cannabis sativa
  modified_base (504)..(505): a, c, t, g, unknown or other
gagagaaagcatgagcccttgtgtggttccagtaattctcgttcctaagaaggatggaacatggaggatgtttgttgactgtcgagccatcaacaacattacggtaaaatatcgacatcccatagctcgtttagatgatatgttagatgagttgcatggttcttatgtgttttctaagattgatcttaagagtgggtatcatcaaatacgtatgaaagaaggagatgagtgggaaaactgcatttaaaactaaacatggattgtatgaatggttagtcatgccttttggactaactaatgtacctagcactttcatgcgattaatgaatcatgttttgcgtgctttcattggaaaatatgttgttgtgtattttgatgatattctaatttatagtaagagtttgcatgatcatgcttcacatttgcaatcagttttggatgtgcgtcgaaaatataaactatatgctaaccttagtaaatgcactttttgcaccgataagattnntttcctaggatttgttgtgagtgctacaagtattgaggttgat

SEQ ID NO: 146107 - DNA, 598 bp, Cannabis sativa
  modified_base (51)..(61): a, c, t, g, unknown or other
ttctcgaattatttttattggatattttgaaaaaaaaattaagcaatttannnnnnnnnnnaactcaatttcgattttatttaaattagttatgacttttcaattgtgacatatctcttctttcctctctctctagtatgtttattactcatgtcaagttctgccaatataactgttcatgccttagctagatatgcttagggttggatggagcttgcttttggctagagcatatatattcctccaattatttactctattattgtaaataacttatctcattaatttatgataaaaaaagagtaatttacggcataaatatctaagctcccaattacaaataaatatctaaatttaatttttgccggtaataatatctaagttataattttaaaacttctaaattataatttaagaagttctgtaggtacttagctgttaagtgtgaagtaaattaccacgtggcaatttctaatttgtccatgtcattaaatttttatttttttgaaaaaattaattctaatatacaaataagaaaatgacatatggacaatgacttgatatttaatatttatttataactaaaaattaaaattaa

SEQ ID NO: 146108 - DNA, 677 bp, Cannabis sativa
  modified_base (608)..(623): a, c, t, g, unknown or other
tccctacaatcatgggattgaattagagggatacggcaggctatctcaatcccccatttcatgtattctaattatgtaataaattctctttccaattatagatattgtaagtgaaaggaaaaccttccctcatgcattaaacccctataaatagtgatctagcttcactgtaaaggggatcgaaataattgctttagaaagagttctaagagaaatactcaaagatttcattgtgagagctttgagagaggaaacactgtgttctttgttctcaagttaatacaatctaaggggagtaggctattatcgtactaaagggactgaatttcttcgaaatttggtgttctttatcactttttggtttttgctctattttcattatatttctaattgcttcataattgactcattgtcgttgactaaaagcgaggtcaatattttggtgctttcattgagagaaaaaatccaagtttgttctttgtcttaaggctcaacatgcatacagaatggtggtgaaaactcgtagaggcttggttgatcagagtgacccaatggtgacaaacagggacacacccattaagattgatgtgggggctatagcccccacnnnnnnnnnnnnnnnnttttaaaaaattaaatgtaaattttttaatttaataattataggccaaaatagt

SEQ ID NO: 146109 - DNA, 628 bp, Cannabis sativa
gcttgcaggtttactggttcccatactttctcgatcattagctcgttgagtattttctcctcttcgagttgattgactatggcttcctgacggcctcgaagtcacacttgcttcttcacgctctgttctttcctcctaggagcagtttgtcgtatttcccccatcaaggtttgtacgagtcctcgccctatgggtttgggaagaatgttggtaatttgtagcaggtgacctttgttctcccggttgagtactaagattttcctcattctcatgagggatttctcgtccaacagtttctcgttgtctcccatctggctgttcgttctgattttcaggggtgtctcattttccccgagttgttcttccccagccttttcctgtctcctggtttgtgagccacgaggtcttcctcgttgtcttctcactctaggttcaagttgattgagaattcatcccctgtaccacccttgccgaggctgcatcacattctaactcaacattttgacgctgcgcctctaacaaacagcgtctcaagcggcagttttccattacataaactccttctcccatagattgggcacctccacgattgagctcttcatctctcgtcccaggattctgaccattc

SEQ ID NO: 146110 - DNA, 859 bp, Cannabis sativa
gaagaactctttgtgctgcatgtagatgagtgactctaggtgtgcacaagaactggcttagtttgtttactgagtaggaaatatcaggccttgtgatggtcaagtactgtagctttcccacaattcttctatacaatgttggatcagccaacttctctttttcatcaagcccaagtctaagatttgcttccattggtgtactcactggtttggaacctaggtagccaagatcttccaataactgaagtgcataaggtctttgtgaaacaaagatccctttgtctgatctagcaacttctagacctaggaaatacctcagattccctaagtcttttagctgaaatcttatgtgcaaccttgctttgaaagcttcaagttccactagattgttgctagcaagtatcacatcatcaacataaaccaatagaaatatgaaatttccattgaaatgtttgatgaacaaggagtgatcagttgctgaatgatgaaatccttcatcagctaatgcacttgagaacttggcaaaccattgtcgtgaagcttgcttcagtccatatagagatttctgtagcttgcagactgcatttggtggtaactcccccttaggtctatacccttgaggtatagacatatacacatcctcatggagatcaccgtgtagaaaagcattgtttacatctaattgatgtaaatgccatccatgaatggcagcaagagagagaactaacttcacagtaacaagcttggtcacgggggcaaaagtatctgtgtagtcaatcccttcttgttggttgtatcccttagctaccaaccgagctttgaacctttctacactcccatctgcattgagtttaatttt

SEQ ID NO: 146111 - DNA, 759 bp, Cannabis sativa
  modified_base (60)..(63): a, c, t, g, unknown or other
aacaatctcaatagttcaagggaaatttttaacgacaaaaaaagttcagggggcatgatnnnntacatgttaaagtttaggaggcaaaagtcctaattagcctttttcctttgtataatacttgggaatttcaattaaaattatttttctaaatctaaattaactaatatagaatatgctaacattttataaaactcaattttacatctctcatttcaaatacctgatcctttctcttcttttcttctctctcgctctctaaactcacccaagggctcgacccacaacccaccacctacaatctcggtcccttctctccatgaccaccgcgaccacagacccaacgacccacaaacccaatgaccactgcggtcccaacgacttttccatcaaccatggcttctccatgagcaatgttgtcaaaggaataaattgtatgattaatctctgttatctgtgagttgatgttagaattagggtcaaaaacaactggatttgagttttggtcagaaaactagtttttttgctaagcctaatggtggctcgatgccttcctgttgttaaaatgagtaaaggttgaagatgaaggtctgatggtggcccgatgctacctataaatatatgatatggtccgatggtggtccgataccttcctgccgacttaatgaatggagcttaacatctataaatatagaatatggttcaatggtggtccaatggtggcctgatgctaccattttatgtacaaaaacataaaaa

SEQ ID NO: 146112 - DNA, 555 bp, Cannabis sativa
attcgtttgaataaattaaattaaaattcaaaaagtatgtaaattacaacagctagtaattttataaaaaatttaaaactatattgttatcaccaaatttgatgtagctgccactacagtcaaagttttattattgtatgttacttataatcgtcactatcatttttaatattattattgtatctcactcgtagtattgtcactatcatttttgataagtttactctatatatataaaaataaattaattaaattattggttaaatacaattcacttttatacaaatattatagtaaaaaaaaaaattaaaaattgataaataatcacaaaaaatagagatataaaaaaagatgattgaatataattttttttttaaaaaaaaaactgttgtcatcatcgtatcttattaatttgtagtcatcactatattcaaaatagatgtcatcaccaaataaaggaaatatatcaaataattagggattatttcacaaatacacaaaaacatcaaaaaaaaaattacaaaattacgatttcaaggaattttaaatattttt

SEQ ID NO: 146113 - DNA, 638 bp, Cannabis sativa
  modified_base (74)..(76): a, c, t, g, unknown or other
gaaccatgcaacattaaatgtaatttctgatctatattaataagtaaatctcattatattgaaatgagttttannnagggcataaaacccaacacgaaatcccttggtttttcttctttgttttagtttcctttttttttaacttggttgtaagttggctatttaaagccttgtaatcactttggaaaatcataatttttttggaataaaattttgagaggttttcttcttgagttcttgggagaactattccaacttatcaaggagtattccttgtggcgttcaacctgacttatcaaatggattaccatcatcgtttgtggcgtcttccttcataccaaggttccaccttaactaagcattgggtcgcggttccacatccaaattttgagaattcttagagtctgccatattatgtgtcgggtttcatcacaactgttggtgtggttcgtatcattatgggacattttagagttgctaagaccttagttatactacaagaacacttcttttggccccacacgaaaagatatgttaagcaaatttgtggtagatgtgtcacttgtaagcaagctaaatcgagggttcaaccaaatggtctttacacacccctacctattcctagttcaccatgggtt

SEQ ID NO: 146114 - DNA, 1628 bp, Cannabis sativa
ctcaaacccagacctggagtcggaacaagaccctggcctagacccagacccttaccccagaccagggtccgagtccgagtctaggtttgaatccggtaactagaatctgacaaggacccagacccagacttggatcgggaagcggacccggatcaggacgcgaatctgaatcaaaactcagatcgggactcgggacacgaactcgaaccgagacacagacttcgacctagacccaaacccaggacccagactcggatgggagactcagacctgcatccagggcccagacctagattggggacccaaactaaaaattagaacaaaaatcaagactcaagactaggactaaaaccaaagacccaaccatggtctttgtcccagacccggacacagacatagactgggacccaagatccgaatggaaatgagaccgggaccaaagattgggatccggatgttgacccaccaccttgggcttgtacccgacccgtagttgctgtctagatcttgcaatcgtaccaagactcgaacttggaacaatttcttaactaggacccaaacccaaactcggagccagagacccaaaataggaacaagaactagaataagaaccctggaataggaattggacctcgatcccaaaatcagatcaagacaaggaaccaaacacagactcggacctagactgggatcaataccaggacccaggctcgaacacggacccagacttgcgccataacctgggacctaagacccgtgacctgagacctggactagaacccattcccgtaccagaactcgaacatagacccagaccttgacccagaccaagacccggacacaaacacagactgaaaactgggcccagatgcaaacccagacctagacctggacccagacccagactcgtacaaaaactcagactcaaactcaggactcagacctgaacatagatcaggactcggacttagacccagactaggaccgagacctaaacttggactaggactagaactcatactgggaccgggaccgggacccgatactcaaatgcgggacctcaaaacttaaccgttaaataaacccagaccaggccaagaccgagacaaggaccagttccgaacatggaccgagaccaacactcggactaggaccctaacgcagatcgagacctaggaccctgacctgaattggggacccggacccatgactcaagcccaagacccaaaccaagacccaaacttggacataagacccagaccagatccaagacatgagctagaacttgaccaggatctggatttatacccaggacttgacccaagacctgaggtttggacctgaccaatattcggtgtctaaatctggtaattagaccaaggctcggacctcgacccaaaccagaactcaaacccgtaccaaaactagaaactagactcgacatgtggtttgtgtttggatttgggactaagactcagacctgactaaaaacacggacctagacctaaatcaggactcaaacccagacccacacccaaactttaaatcgtaccctgtgacccaaaattagaaccagatctggaagcggaccattaaactctaaatcctaaaccttaaaccctaaattc

SEQ ID NO: 146115 - DNA, 793 bp, Cannabis sativa
tgatgtgaaagagagataaaataatttttttttttttttgtttgagtaatgtggaaatttttgacactcttaaagaatgctaccattagagatgttcttagtggtacagtcaatggaaaaaagaagtgatccattttgtgctcatggcttctggataaacgacctttaaattttaacagataagtatttcaagtctttttatttatagaatgttttacattataataaggattattttaccatctttcttttatattatctattttttcattaaattatgtagtaatagagttttatttattgttgttttgtaggtcagttttgtagagggcctacgattacagagactttgccgataagtttaattcaaaaattgtctcttctaatacatattgtttcttggtgttgtttgttttctcaggtagtatttcaatattataagccgaaactttagctttttcgctatcaacaaaggaagagtattttttaatgagctggggtactgtttgaggatgttattagttttattgtctaaatttttgggggcaactttatcccatgtggctcgcgatgtgatttctgcagctcatggtttggcaaagcatgcccttcaattagacgatgagctatcctggtttgaggaggtgccatcaccaattgtggattgttatatcgttaatcatgtgtgattttgatcactacgtcaaaaaaaaatagtctaaaatatataatttttttaaacaatgaatatatcattgaacaaaaacagacaacataaaaaaaaaaaaaaaaa

SEQ ID NO: 146116 - DNA, 711 bp, Cannabis sativa
cattaaacacagaaaccctataagctatctcaaccatacaggtactctcgtccactactacaatttgagcttttagtgacactatttagtgacacgcataaattgtgcacgtcactaattagttaggagtgatttttagtgacatgcagaagcagactctaaatattcagtgttagtcacttgtaatgtgtgtcactaaaaataagaggtgtcactaaaagataaaacccaaaatattctaatttttattaatttaaaaaatactgccatatagtgacgcaccaggcgtgactggattaatgtgtcccaacacacatggcgcgtcactatatcataacccaaaatttttattttttattttttaaaatacagttttagtatacttttaataaaaaaaataataaaataataaaaagaaataataaaaaagttggcaggtttttatgtatttattaatcaatgataaaaaaaataaacaataaagttagcttgcacgtgtccctagaaagaaatcgtatttctttatccctcttcagtctttacatttagaaagcctttaccaataaaatcagtcgtttcttcttcttcttctccaagacgacgaaccacctcctgcgcacgaaccacctccgagacgacgaagttgcggccatccctggcctcccaaggccaatcaacgacggatgagagacttgttggaaattattttac

SEQ ID NO: 146117 - DNA, 566 bp, Cannabis sativa
  modified_base (247)..(250): a, c, t, g, unknown or other
tgctaatgtagtattgtttttatctaaaagataattgcacaacacattcaaataacgcccattctttcacattcaatctcaattgtacatcttcacttaaaattataagaaatttctgttgtaaaggggtgtagtactggtagaccctcttatttgttttaatatatagaaaaaaaaatatttgcttaattttttttttatatataattgcgtagattataactatttaagatcacttgtaaatttnnnnaaaattctaaatagtttatagtgtcgaaaataaggttcaaacagttacttacctcacgtataagaaaaaacagtcgaacatgtaacaaaatatttatactttatttttaacattgtaaattatttagaatttttttaaaaatttataagttatcttaaataactataatatacacgatcatgaaaagataattaaattaaaaaactattccgaatgccaaacaaatacgatctaccaaaccaccctttttactaaacttgtgtaacatccccgcttcaagtctccattgggtccttacacccacggaaataatggc

SEQ ID NO: 146118 - DNA, 610 bp, Cannabis sativa
gttttaaaccgtcaagaaatccacattagcgacggttttgaaccgtcccctattctgtccgttttacaacgatcgtataggcgatgattatagaaaccaacgaaaatacttttaacggctgtctaaaaacgtcagaaaaacatatttttatagcttctagaagtcgacatatctaagaatatataagaaaccaattaagatctaattttttttgattgtgtgatatatatgtgttgttaaatttagaaaatagatgttggaaacacgccaagtttcaatctgtattcatatgcacacacacacacaggaactccaatagaacatgcacgaaagtatctcacagaaccaagcacaaccatacaaaacagagttgaatgaattactcttttattgattaatctgttagtattacaagatgagaaaagtgttcttttctgtatatcacaaatgatcaaaaagctaaggctatttatagaagacttaagtgctaaaatgctaaaggctaccaactgtcataactgtcaagaaggcagttatgacagttggatatacaagcgagacaccaggaacaagaatacctaactaactgatccacatattaggacataac

SEQ ID NO: 146119 - DNA, 1219 bp, Cannabis sativa
tattcatttcaagcatcgagatgagtatcatggagattgattgttgttcaggatgtaaagtcaagaagactcgggacactggcagtgtcggttatctaaggtgaaagtctgtaggactcaggtactaagataacaccatggcaatgtttgcctacggtgaaagtcaccaggactaaggtactaaggcaacattgaactgtcgaggggctacgagtcagaatgatcgaggcattagttcaacaacttcatcaaagtgaaatttggaatggagggaccgtatgcgagtatgctgttagcttgcgagctatatcttgaggggtattcctccaagagagaattttttcccaagttgaattggggagcccactaattcatgtgttggaagaatcacggtaattgttcagttttggtgtgtgaatccagagggaaacactacaatagatgggttgtcacagtgcgaagacttgcatgattgctgcaagctgtagatagacaatatgcaggggcgtaggctgagatcaagactgagctagttttcggtatgtgtgggcattttttgtgtttatggggacactagtgttgtatgggacactataagctgaatggttcaaagagcatatgccgatgggagatagtggattgggatgacttcaagtcttaagagtaagactgggtgttatcaagtttgtcgaaaagttagcgagtcatcagaggatgcagggttgattttgggagatggacttgtgacacagttttgaaagccaacacaagcaggagccagagggcaaattcgtagttttgggtgattgttaaaccattaaccacatgaaagaagctcaggggagcacgtatgtagtgggtcagtgggaccttttgcatgaacccgtgggtgtacggtagggctggatggccaatgttgagaacttcgcgaagaaatcttgtgtaggagtgcacttggtactgcattgggtgcagttggcttgcgagcctcgtccacgtggggcgcaccaaattttatcatgtgattagagtgtgttgctcaattgccattaggaggacaatgcgcaatggagttggcgtgtgaagtttccagagggagtgttctgtaggtgccgttgggtacaattggtttacgaacctcaccttgaggggtgcaccatacttagtccttgtcaaaaggagtatgcattggacgattggcgggtgagctactatcaga

SEQ ID NO: 146120 - DNA, 541 bp, Cannabis sativa
ataacaatctgtaagtacaactgtgctttatggtcctctactacaaattgacaagcctcaaaatgtgatgttattggagacaactgtcatcataaatatatttaaatcagagcaatcttatgaatactttttaagaaatttcatactaaaaagaagaataataaaataaaaaacaatagtagtggacatatttttccaataaaatgataatggattttgtgtgtgttgtatgtgtactacgtgtgtgtgtgtgtttaagcatatatcctaggcagatatattaatgcaccaagcttgaagaaaaatcacactcaaaacagagtataatggataaaagacaatatgtacctggggaatgataggcaaagaatctgttaaaggaacaacatattaatctaacccttatagattaattgctttccttttcaaattttaatttccttttcaaacccttatagatctattatgttgtacaaatagttgtttgatttattagttttttcaataaataaaatatatgatgaatcattattctaattaa

SEQ ID NO: 146121 - DNA, 553 bp, Cannabis sativa
  modified_base (213)..(214): a, c, t, g, unknown or other
aaataatgaaaaataataaagagcgccttatagtgccaagtactaaaaaatactataaaaactgttacttttagtgacaaccttttagtcacaacataaatttgttaaagttacttgtgactgcaatagtatttagttacaagttgtcactaatttaattttaatcacaataaatattgtgactaaaaacacatttaatcacaacaaattgtnntttttgtgactaatatttttagcatggaactttcagtcacaacacaataatgataatttataattagccacaacttttatacgtttagtcacaaattttattgtgactaaaaataagatattttgtagtgaaaaatgacctaaacggctaacaacttgtaaagtgccatattaatatggtattggataccataaaaatacgtatattaagacacatataaatatatatcatacaaaactagttttaaaaaataaattatattaatcattttttttttgttactttttaccataaaatagataattaatttaaataggctattgggtttgggcttatttt

SEQ ID NO: 146122 - DNA, 1002 bp, Cannabis sativa
  modified_base (50)..(72): a, c, t, g, unknown or other
  modified_base (750)..(752): a, c, t, g, unknown or other
  modified_base (849)..(853): a, c, t, g, unknown or other
ttaaaaaaagaggtaaaaatgaaatattttaaaaaagaaggtaaaaatannnnnnnnnnnnnnnnnnnnnnnatagagtgtaatttcctcttgtttttttaatcatttacgtatttttactatgttggggaatttttatttttatgatttttaaagtatgagtttaaaaaatgacatttttttttaaagaaaaattatggaaactctttataaaaaggttaaaaaaaaaatgaataaccttacttaattttttcatatttttcaatggatttttttttactcaaggatctacaattaaattgattctatatatgtagaatatatattggtgtcgtttatcctcaaagtaaacttagtaaaagttgttcattctatatatgaatgtcgtttggagacatttatgtcgtttcaatataatgaaggttttcttttattcggtgaggataattgtggggataagttttttttttgaaagcaattgtggggataagttgagggagacaattttttttgtatccgttaatcaaaaatacttttatattatatttcattaaaatgtacgttgtcaatatacattcactctccatcactacaaaaaatcttacttgtaactaaaagtaaaataattgtgactaattataaatcactattcttatgttgtgactaaaatgtctgtgattagtctaaaagtattagttacaaaaattacaaattgttgtgactaacaatacttgttgtgactaaaactannntagtgacaacttgtgtctaaatactatgttttagttacaagtaactttttgttgtgactactttttgttgtgacaagtcacatttagtcacaaaaannnnntgttgtgactaaaaagttatcactaaaattataacaaataaagtaaagtgggtatacaatataatttcttcataattatggggaataattacataaggcacaattttttgtaaaataattacacttttacattcaaagaatgttttttt

SEQ ID NO: 146123 - DNA, 782 bp, Cannabis sativa
aacccaaaccgtaaatttgaaagaaaagaagttaaaaaaacaatatatggagttattccaaaaaaaaaatatatataaaaaataaatcataaaataatataaaaaaataataagtcataaaaaaatataaaagagagagaaaaataaagagagagagagagagagagagagaaatgaagagaagaaagagaaaatggaaaaaaagaaagaaagaaagagagatagagagggagttaacgtaaaatagactaacactatgtttggtaggagggagagaaatgagagtggataacaattcatcttgtttcttgtttggcaagagagattgagggataattggatggacaacaaatccttataaattctccatttagaatccttccattaatggaaaaatccacacttttctacttcaattgttgaaaattacaattataccctcttaaaaagattgttactccactctctctaactcccacctattttacctccttcatcaactttccatcatttctattctccatccctcctaccaaacatagcctaagaaaaagtaggggaaatatgacataaacaacaaaagtatttttgtaattaaagaatttttaaaaaataaaatttataaaaaaaatttaaaaaaccaaacaaaaataaaaatataaaaaaatactaaatttgtcgtataatgtaaaaatcctatatatctattctatataaagtgtgcttatataaccgaattcttggtttataagaaattcgtgggagactttttatttatatta

SEQ ID NO: 146124 - DNA, 1160 bp, Cannabis sativa
  modified_base (29)..(31): a, c, t, g, unknown or other
  modified_base (59)..(61): a, c, t, g, unknown or other
  modified_base (89)..(91): a, c, t, g, unknown or other
gatgcgtgctttcttgagagctgttgatnnncgtgctttcttgagagctgttgatgaannngctttcttgagagctgttgatgaaagannntggatgtccatagaagaagggtggtggaaagcaacaatgaaggagaatgaaatcgttatccccaaacccatgagccaatggaccacagtcgaaatggaaagagctaacttcaacttaaaggccctacatgctatgtttaatgctgtctccacgaactagttaaaggtcattgccaactgtgaaattgcaaaggaaggatgggagaagctaaaaattaaaaacgagggcacaaatgctgtcaagaaatcaagattgcgtgccttgccaaggcctttgaaaatctgaccgtggaggaagatgagtccgtagcagaatttcatgcaaagttgtgtgatatctccaatgaatcctatgctctggagaaaacctactcaaattaaaaattggttcgaaaagttcttggtgttctccccagaagattcatgtccaaagttacctcatttgaagaaatgagaaacattgaggaacttgatcttgatgagctcattgggtccttgcaaaattatgagctgtcactgtccaggtggaggaaaaccaagaaacagaaggatgtagtgaaggaaaaatctgatgcgagtattgcacttattcatccagaaaacaagaaaccgatcctagaggaattgaatggcattactgacgaaactgttgccttgttaacgagaaactatgcaaaattcttgaaaaagaactactgaagaaatttcccagctgataaagaaaatactctcaagaaaaacaaaggtggaaacttcaaacaaggacaaccttctactgatccaaagaatcgaggaattaagtgcagagagtgtgatggatatggccacatccaggctgagtgcgctaacacactcaaaaagaagaaggcccttgcagcaacttggagtgatagtgaagaagaaaagaactccagtgtcagtgaaggatcggatgaggataagcaagtattgtcattcataggccaaagctgtcacccagttgagtctgaaaatgatgcagtctctgcttcatgagaagctgatagcgtaggtcgacaaaatgcatttgaagaaatgtttgtgcaatggga

SEQ ID NO: 146125 - DNA, 693 bp, Cannabis sativa
tatcataaaagagtgacaaaattataaaaatatttttataatttttttataaaatcttatatttaatgtaattttcacttttggagaggtacatatattaatttgtgaaatctcatgattgttgattgtccggaatctttgggaataattctctgtaatctaatctagtcacatcacatgttcatcaacctgtcttaattgagaaaatccaaaaagtttatggtatttatattaaattatagagatcattattgtgattggatgactaagaaataagtttagtttcaattgccaaccaaatcattcacgatcttataataatcagattctctttctacttgccacgtacctcataatcttacaacatatttcggattagacaatggattgcccaaacactcctatcaacttcttcaaaccgaagattcttcaaagaaaccaacttccatcatgtgcttattgcatagctaatttacattagctacattatcttcattttcttctccacatctcaagacaagcatagtgcttgcttctttatatatatatttaattattataatgagaaaatcaaacaattacttaccgaacgtataagaaaaaacattcacatgtgcaacaaaatatttgaatattatttttctattgtaaactgttatatccaaaattcggtaagcacatcagaggaagaca

SEQ ID NO: 146126 - DNA, 725 bp, Cannabis sativa
  modified_base (307)..(311): a, c, t, g, unknown or other
tttttcttttaatgagtgtttttataggaaaatggtaattctagaagagcagaagagaaaaatcgtagatgtacaacagcaaaaacccaatctagtgatccatgaatttctcctaaactattttatttttaatagtaaatcattttatttttaatataaataaaaagtcatgaatattttttcagatttaatgaaatttattttattatatttaaataaaaagtgacccatgaatttctcctaaactattttatttttaataataaatcattttattttaatataaataaaaaatcacccatgaatnnnnnataaaccaagaattcagttatatatgcacattttatatagaatagatatatttgttttctcaattttttgattttataagtagtatactatactggtcttaaaacaaattaatccttattctatgtgtatcaagttatttatatacgaggagtgttaaggagactctcttttgtactctctctataaattaatcagtgacaaatatcatcctttgaaattagtgtatttatatttaataattagacataatattattacattattacatctatgccattacaataaaattatatcataaatatttacttagagctgaatataaatatatatcttaaacaaaattataacaccatttaattaaaaaaaaaacaaaattataacgtatgattagaatttatttaataatttaaata

SEQ ID NO: 146127 - DNA, 530 bp, Cannabis sativa
cataacttgcccttttcaccaaaacgtttagtccccttcatcaaagatactcgaaggaatacatgatctactacctaaaattctaagtttttgcgtttcagatctgcataactctttcacctgctctgggaggcaagcatttgggccttgatcttttctatagcctcgttggtccgttgtattgattcgggacctaaatatttcctttctccagtttcattctaatgagttggagatttgcatttcctggcatacaacatttcatagggagccatccctatggtactctgatagttgttgttgtatgaaagttctatcagtggtagatacttgctctaagagccttcaaaatccatcacacaggcacgtaacatatcttccagtatctaaattgtccttttggactatccattaacctgaggatgaaaaactgtcctaaacttcagcttggtacccatggctcgctgaagacttaggtcgacgggagggtatctttggttccttcttcctttttccccgggttcctggtg

SEQ ID NO: 146128 - DNA, 690 bp, Cannabis sativa
gatgccaggctagatcataggcttacctgattaggcaatgcgacatttggatgctagactatgacatgagtttgcctaattaggcaatgcgatatatgaatgccaggctagagcgtaggcttacctagttaggcaatgcgacatattgatgctagggtatggcataggctcacctgattaggtgatgcgatatatgaatgccaggctatggcatgaattcatctgagtaggcaatgtgatatgtggatactggtattcaggttgttcttgtgaggcaaccgtcataaagttatgactctaaaataaaactgttgttaggtttcttcttgtcggcgatcctggttaggtagcggcagtgacttgtgggtgccaggctatggcacaggaatcgtctatttaggcgatgcgatacattggtgccaagttgtgacacaggtatcgtctgtttaggcgatgcaatatagtggtaccaggttgtggcacaggcatcgtctatttaggcgatgcgatatattggtgccaggttgtggcatgcactcctctatttaggcgatgcaatacattagtgtcaggttgtggcacgagctcatttgattaggcgatgcaatatattagtgtcaaattgaggcacatgcttgtctggttaggcgatgcgatacattggtgccaagttgttgttgggttttatgc

SEQ ID NO: 146129 - DNA, 735 bp, Cannabis sativa
gtatttcgggccgaaccgggttcgggcctgaaatgaaatttgaattgaattatttggcattcaatttaataatgagaaatctgaattttatttgagaatttatgggtatgatatgactaaactacccttgtatgtatggataggtgagaatttgccctaggggcattttggtcttttgaccttatttgatttacttgaattaaaagtgaattttgagggaatgaaattaaaaaatgctggcttttgcttcctcttgtccgaccctctctctctctctctctctctaaccctctcttattttcaacttgaaattggtgagagactagcttgaattaaatttgtttgttgggaaaattatgttgaaggcttggagttagcttgtgcaaggaattgaggtagctttcctactgaattttaattgaattccttgctaaatatgattgtgcaaaaagtatgaattaaatgaaatattcttgtttatgcatgtatgtaggagttgtattgtttttgagagattaaagtgtaaattccttcatttagttgtgatttatgtttgttgagcatggaataagattaaagggtattttctcgattggaattcatgatttgtttggaatattgttgctggaaaaaaacatttgggtatgttgaaattaagctcaagttcaagagcttggattttatgagtttaagcatgattttgggttgaattgtaggatttgtttttggtaaatt

SEQ ID NO: 146130 - DNA, 541 bp, Cannabis sativa
acaaactcaatgaagatctcaaggtagagagcattatcctaccataaatttttttgactggactattagttgaaaggtttcctaaatcgtgaaaagaatataagagtcgcctaaagcccaagcataagcagtcatcccttccagatctgattactcacatcattattgaagatactaaccgcaaggaactccaagctaccaaagcgagagaaatggcaacaagggagaatttggtacaaactcaaaacaaaaataaaaggtatgccaacttacccaatcattcaaatagctctgtttacaagcctaaagctaataacactactacctataagaaaaaaagggagttgttttttctgtggaaagccagatcatcatgcacctcagtatagaaaaagagtaagaaatgacaatcctcctaaaccaaatgcaaattcagtagaaggagatgatataattactgcggtcatttctcaagcttatcttgtggccaatgtgaaagaatgggtggtagactctggtgctaccagacatatttgtgcta

SEQ ID NO: 146131 - DNA, 550 bp, Cannabis sativa
ggacccactcaatgttagcgggaagcataaacatttggcgtcattgcttactctcatgaccgtcattactcggttgaatcgagataagtgattgctgggctccaagtccccggtataagctgccatttcgggcatcttaaagtttttggggagttctgcctccaaaatgtgtctggtgcacggttctcggtcttcgcagtcagagtctgagtcatcacctttttgtctctgggggacccgagcaatctctttgcgtagtatggcaagctcacccataattctctcgttcagcgttcccatggagaccgccagtgtatgtttcttttggtctaggtgatcccgaaggtcaccatgttttctgttgatctgatgtcttagatcgacgggagggtatctttggttcgttcttcctttctccccgagatcctggtgcacaaaaattatttttcggtcctctcgatcccgagggccaagactccctttttggagtttgcccctatgcggacctttccctttcgggaaatctgagcggacctttcgcggattctgc

SEQ ID NO: 146132 - DNA, 599 bp, Cannabis sativa
  modified_base (551)..(566): a, c, t, g, unknown or other
gaggttatattgaaaatgtttaaccatataggaccaacaatggagatcaaatatccttataaataaagctcattattttaaagagttacattttcatttgacatttattttaatctaattatttaatttagataactcaaaatataaattttaatttaatatttataaaattatactttaggaatatctgaaaaataaaaataaaatttattttccatccttagtattaattttccaataaatattatgaaaactacttaattaagttgctccaaaattcaataattaattttcaactcaaatttaattttctataaatatataactgaatttgaaatccaatgtataaagatacattttcaaaattcatattaaatagaataaaataaaaaactggaaaaattattctgatttatgttggtctaaaattaaataaattatttttcaacataaatataatttttctatgtaattaaatatcttaagaaaaatatcaaatgtttaagtgtttggaataaaataaacataaatattaattttctaatttaatnnnnnnnnnnnnnnnnaataccaaaaagtctacctagaaaatatctatc

SEQ ID NO: 146133 - DNA, 988 bp, Cannabis sativa
  modified_base (941)..(957): a, c, t, g, unknown or other
attttcaccattaaatcatcatttacgattaaaaacagcctaaacatattttttatatattttttgaattattttattttcatattataatttagtttcactgataatggataacctagtttgtgtccaagctaatgagaataatttacacgtgccttcagaatttgatttgttagtttatgactacaagtttttttgaataatcttagtaatattttttttatattttgttgaaccatatgcaaataaagttatttattggttggcccctaattcttatttctctagaggatatatttttaaaggttacaaaactataaactgtcatatcactttctccatcaaccattacaacaattatttgagtgaataaatcattagtaacaataatgagtcaaactaagttatggtaactactaggtaactcaatacacgattgttagtaacctattatatatgttcttttaaaaatttaatatatttttaaaaatatatgtaactgatcagtacataatataattttaacagtaacttttagttgaataattaatattatacccaaatttcctcacaacacaaatcacaaattattaagtacactaccatttgtttctactttctagatagtgaaaagttgaatagtagtccatatataaaaattaatgttactctcacaatatgtatattctaatattgaagcttaggtaagtaattgttatggctactactttctggttaaaatatgatcatttatatatataaatatataaaatagatattaagtttttggaatggttggtgactatctacatttctagtatagtacatattcaatagataaacatgaaaatgagactttacttaaatatatatacagtggaacctctagctatctaagaatacacttgggactaaataaattatattctaattgagaggtnnnnnnnnnnnnnnnnnacactagaaaaaaaattaaaaaacaaaaaaa

SEQ ID NO: 146134 - DNA, 675 bp, Cannabis sativa
  modified_base (378)..(379): a, c, t, g, unknown or other
catagacgaagtcgtgaagaccctgcaggacctgtctgctgaaaggcgggcgttccaagaggaggctgcacgacgggaggcccttgctaagtccaagttcgaggaagaggctaagcagagggaagcccaagcggaggcgatgatccgagaggaggtccttcggagggataggctggaagccaagcaccgggaagcactgagggtggagggcgaggctgttgccaaggccaggcgcgagctcctggaggctagggaggccttagacgaaatggctgccaaggtgaagtccttagaggaattgcatcaggcggacttggagtccagggctaactttgccgtggagctgaaggagcttaaggattttaaagaccaagcctnnaagaaggctaagaaagatgagctcttttctcctgtctcctgcagccgttgcattaagcgcttcgatgatggcgtctatatggcctggtcaacaaatggccagagtatcaagctcgacttcttcccaaaacctgcggagatgattgccaaattctgggagaagaagaagcttgacgccatgctgcaggcgcgcattggtcctcgccttcctcctcgaattcactaggccgttccgaatacaactcagatttttcttatctctttttttttttaatttacagctaattctcttttatt

SEQ ID NO: 146135 - DNA, 706 bp, Cannabis sativa
tgttaatcaacatacttgtgattagatctaagatcctggtaaaataatttccaacagactcgacatgtggttggtgtcaggatttgggaccaagactcgtacctaaacaaaaacactaacctagacccagaccaggactcggacctagacccacacccgaaccttaaatcttaccctatgacccaaaatgtgaactggaactagaagctgacccttaaaccctaaaccctaaaccttaagccccaaatcctaaactctgtacttacccctaaaccttaagccctacaccctaaatattaaatccctaaacactaaactctaaaccataaacccaaaccctaacttggaaatgggcctagatccatacccatactgagatcgaaacccaggacccagacccaaacctgaatatagacccgaacctagacccagactcatgacctgaacccggatccaaacacagactagaacctggttcgagaccgagaccttggactgggacccgaattgggacccccgacccagacccgaatagggacctggactcagaccgcgacccggacccaaactcaaacctgaacccgtactgtgacctagactcagactgaaactcgggatccaaacccgaacctgaacttggacctagaccaagacctagatgggggacctaggccccaaacccgaacctagaatcagacgtagacca

SEQ ID NO: 146136 - DNA, 541 bp, Cannabis sativa
tttttggaggaagttttggaacttgaaattgccacctaaggtgaagaattttctttggcggggtcttactaattgtcttcctactcttgtgtctttgtggtctaaaagggtgcatgtgagcggattgtgtccaatgtgtaactgggaggatgagacaatttatcacataaaggttagctgctcttttactaagagttgtcttgatagggggctgggagggcggttggaagggtgaagatgctatttttggcagctggtttgataatatttgtaagttttagtctatggatcgtattgagaggcttgctatgcttctttggggagtttggagagctcgtaatgacttggtgtggagtaataaggctttgtcgttagacagggtggtgaatgctgcaattacttaccttgattcttagaagaatgctcagctggaaaattgagttgtttcgccagtttttggtccgaatacaactgggtgtgagcaatgggctaaaccttgttttggtgagataaaggttaattgtgatgttgctgtctttga

SEQ ID NO: 146137 - DNA, 592 bp, Cannabis sativa
gctgcaattcttggaaaaacttatatgtcatcaatgaaaagattttgaattggagaaattcgatggaacagaagacttttccctatggaaagaaattttaaaaggaatcctaatgtaccagaaggtatctaaggttcttggagatgagaaacttttggtcgagaagaaaccagaggaaattgtagaaattgaggagatggcgtacaccatcatcatgtatctatcaaacaatgttcaaagaaaactcatcacagagaagacagtgaaaggagtttggaacaagttggaagaactatacttaaagccataaattattagcaagattaattttctataaaggttatacagttttagaatgatctcttttctttctttagatgataatatttatgagattattaggattggctaatataaatcacaaggttgatgaagaaagccagaccatcattttgctgagatctctcccaatcccatatcaagaattaaaggctgttatcaagtatggaagagatactctcacccttgatgatgttcttggagccttgaagtccaaagaacaagaaatgtctaaggagaaagacaatgtcaa

SEQ ID NO: 146138 - DNA, 942 bp, Cannabis sativa
aataatgtttgttatatatgatcttaaattatttcaaagtcatgatacgctaaatatataatatatgtatatatactcatctgactaaaacacattcgagctaactatttttttttatttatttattttattatgaatcaatattttatacaatatatatttatgcttatatatatatatgcctatatatatttgtgttgatttgttcatcatattatattgtttaatttttttccttattctatattttagtattttactgtctatgtgttatattttgttgtacttttattttctttcaaaagcttatgcatatgtttaataatttacactttatattgatatagttctctttatggtaaaccttgcaaaacttgactttatagcacttgatatttctggaagaaattatttatcaaagattcttgatgttaaaatctatttagatgctatgggtattagagacaccatcaaagatcaaaatattgaaacaaaacaaaataaggtcaaggctatgattttccttcgccatcatctccatgaggggttaaaatctgaatatttaaccgtaaaagatccttttgtgctttggcaaaatttgaaagaaagatatgaccatcaaaaaactgtcatattgccaaaggctaagaatgattggttgcacctgaggttgcaagattttaaatcagtaagtgattataactctgcaatgtttaatatcacttctaaattaatgttgtgtggagaaaaagttactgactatgaaatgttagaaaaaacatatactacttttcatgcctctaatgtgctcctgcagcagcaatatagagaacgaaactttaaaaaatattcagaattgatttcatgtcttctagtagctgagcagaataatgaacttttgatgaaaaatcatgaatctcgcccaactgggtctgctccatt

SEQ ID NO: 146139 - DNA, 940 bp, Cannabis sativa
agcctcgaagaactctttgtaaataagaaccgcgatcatcacaagacgagcatcatcgacctcggaaggaaaaatggccgcagctcactattatgatcactggaaccaagcttctgtcgaggcatccccgaatacagcaattaaagacgtgtataaatatacgatcattttgacacgataaaagcggaagaatcacacctatatgattttcaaatcataacctcatttacactacgtgatgtgtaatcaaagcccatgattttagtggaggattgttgtaaacagattgcagtcaactttataattaactgcccaatatgtaattataaatagtggcaagcaagatcaaaaaagggacggaaaaacttatacaaaagaggccctgagaaaaaaatcataaatctgaataagattgactcgtgcactatgcagaattttaaatgcaaaaccacgtaaaaaccctgtgtgttcatactttttattttatagcttttattttttctgtgtaagattgtcatggttaggctcaaatttggttaacaaaaatctgtgttaacagtttggtggtttcattgagagcctttgtgaaaaagctcagaaaaaaccctcttttcttttgaagaaaaaccacctccttcatggttgaaaacccagaaaatgttgataccccacatgaggaaactcatcgtcgttctgggaaagagcccatgggctttagaaggtctaccaacccacggtctcgacggaccacccgctccaggagaactcagcctgagggtggccccagcattcggaccacacgttcacggagaacccaacccgacgttggtcctagtacgcagacaacacgcccgaggagaactcagtgtgggagttgctaaaaccatgggatgagggatgaagagcccaatcgtgggggtgcccagcctatgggagaagg

SEQ ID NO: 146140 - DNA, 848 bp, Cannabis sativa
  modified_base (625)..(633): a, c, t, g, unknown or other
tttctcttcatatatatcatgcatacaaaccatataataagatttttcatctaatattctatgaaaaaaatattttttatttataaattttataattagggttcattcttagtcactctaatagtaaatttataatattagggtgcctaattattgttactaattcctttcaaaaaaaaattattgttattaattaagtttattgtttaattttaaagtgttattaattaagttttggaagaaaaaaggtgaaaaacagtaagaagagagaaaaaataagtacagttttacattgtagcaaataaaaaaatactagaaaccttaaaaaaatgttaatatattattgtgaactaatattttttttcttttatcttattgactaaaaaatattaattgactatatataccatactaaacatttaatttttttttaattaatgtctaacactaaatattatgaacctatatggtacttttaaattaggaaaatttacatggtatactagcttttactttttttttttacaaaaatattgtcacgcggtattttttacttttttactgtatttttttttataagtttcatacttttcactggtgttctactggtattttttagttgttnnnnnnnnnttttgagttgttctattttgtgtgttctactagtgttttataataacacagcatttttgaaaatttttccgtgtgacagtatttttgtaaaatttaacccaaattctagtatttttgtaagtttcccttcaattatgatttatgaattaatgactacaaaaatttaaaggttaattagtaatttttcctccctaattttgacatgtactaaatcg

SEQ ID NO: 146141 - DNA, 1214 bp, Cannabis sativa
tgttggtagggtttatttcataccttgagtaccattgagtgatgtaacacacacactcagtaccttccagtacttgtgatgatatcactgtactgtactcctaaccaatattcactataccgatgcactatgtaccatactgtacaagggttggtagtgaaaataacacttaaagcatgcatatacacataacatatacatacactcagatattgatatcacacattatattcagctcttaccttctttccagattcaagtgtgctggccgacctgaacagaaagtcccgtgctatatggatgccctaatcacattatgaaaccggataagttacatgattaaaaccctaatcctgagaaacccaaacccacaactctaggttctgttatacccccttagaggttactcaaactctggaattagggaaacacccaaccacagcactgaaatggacgaaaattgagaaaatgaggtgtttggggatcctacaaaaaccggctaggtttaggggttctagtaaaacaggctagccggtttgcaccagtccaccccaaacatttaattcttttcgctcaattttctatcaaatggcaccaaactttccaaagtacctaattagggtatatacaacatattctagccagtaattcacagaaaaactcattgaaacaaattatgccattagagatgaaagctttgaactcaaagctcaaacttgcacaaaacctattccaaccatcaaaaccagctacaagaagctaataccaactcaaattaagcctagaattcgagctacaggtcaacctaaccctaacaacaactaaatcacaaaatcacaaactcaacctaaacttaaattcaagaactagggcaaggagatgctagggtgtaccttggcttgatttcctcttgaatcccttgctgaaacactcaaaaaccagtagctattcccttgtcctgagctggttcgaagagagagggaaagaaagagaaagcttctcttgatttttttgtattttccttaggttttcactaaaatgaataaaggattgattaagttaatcctcgctgaataaattagaatgctaggtgtcactagcctaggctgccacctaactctcaattaacacaaagaccaaaatgcccttaaggttacaacttgggtatttctaaagctaggggtaaaattgtcaaattccataaccccgcttaa

SEQ ID NO: 146142 - DNA, 734 bp, Cannabis sativa
actttttgttttggaaataagttgaggaatacatcttttttgtatccattaataaaaaacaccctcatattttattttattaaaatgtacctacttttgtgattacgttgcttaatatactatcaccctccacttaagtctagtacataatttatattaatttaaggaggtataataggaacatcatcgataaaaatgggtatatcttaaagaatatgaaaataaataaataaaaattaaaacagataaagtaaagtaggtatacaatgtaattttctcttcgttttgttaatatttttatgggttttttatgccatagttttgtaaaaaaaaaaaaattagaataccatactttaagtttggggagttatatttgcacccataaaatgataattacaccctattgttacaaaaaaaaaaatagcttaactttttttttcaaaaaaaaaaaactactcttaagattcggaatgtgttaataagtacaatttatgacatttggctaaatagaaatttgtgtacaatgagaaaaaatgtataaatccgagttgtatagatagtagtatagaaagaattgttcttaagaaaataaaaaacttgtaagtttatcttttgaagaggaatttctttgtggatgtattgactcggtttaattaatagaaattatctttaattcttgataaaaaaataataaaatatttcaaataaaaatattaatacataattttataaaa

SEQ ID NO: 146143 - DNA, 1124 bp, Cannabis sativa
atagaatcataagtataattttgtagtaattagtccaattccctgtggttcgacctcacttgcgtgagctactacttgactgcgtatacttgcgtagtgattataatttttgtaacaatttacaacaatgatccctaaaattgtgggatttgattacatatcacgtaatgtaaatgagattttggatttgaaaatcatatagatgtgatttttcgcttatactgggtcaaaacaatcgtgtattaaacacgtctttagtcatagtatctgaagatgtctcgacagaaactttgttccagtgatctcaatagcgagctaggaccattcttccttctgaggtcgacgatgtatgtcttgtgtcgatcatggttcttatcctcaaagaattcttcgaggctcatttgaatgctatcttctagctcgctaggattgtaagcctcgctaacgctagtgggatgaagttatatgaagtcttcccataatgagacggtcacctcgcttacttgttcttgagctgatctgacttttacacttagtttgttcattgtgcgctaaggactttcacaattgatatgtgtcgctttctttggtgcctcgctattcgcatttcgcgacatatggtttctcactaatatattaaatgtcagtttgtacattgattcctcgcctaagaccttatagtcaatgggttacaaatatatactctgatacttacgtaattaatgagttattccacaagaagcaatatcatcgattcacattctctttatcttcacacgtgtccttcagctgaatttttggtataacagattatttatctcatctagtagggtcggataaataatcccatgcaggagagattttttttatcgttttttaaattttgattttattaatatattttaaatttaatatgaattcaaatgaaaaaattatcacacatttatttataaatttttttatcaaaaacttattcattaaaattaataaaaatatataattttaaattattatacataagttttcaaaatttataatattattaattaaaccatagttacttaaattgattctaagagaaacaatatgacaataaaattgtagattatttttacattactaga

SEQ ID NO: 146144 - DNA, 702 bp, Cannabis sativa
  modified_base (74)..(85): a, c, t, g, unknown or other
  modified_base (237)..(248): a, c, t, g, unknown or other
  modified_base (632)..(648): a, c, t, g, unknown or other
tatataggcccatggtccctacactagttgagacaatattgcatgtaagactcaattaattaattttaattaannnnnnnnnnnnctaaaattagactatgtctagttcgtgaatttttactaagatatggcttgattgtgaagaaatatgattttagggtttatttattaattaagagactttatggagtttaattaataaatataataaataaaaattttatttgataattattnnnnnnnnnnnntaaatagttttggcatttataggtctgaaagtgcaaaaaaatagtatttgtgaaaaatagataaaatagttgagaaaaattacaaaaaccaaactagtgtagggcccactatgtggtcgaccactaggtggttattttgctctatttttatcaattttttattccaaataaatcaatcctaaccctaggtcaaattagtataaaaggaaagctatgttctcattatccaactaatgcttctaaaactaaaaacctagttttctctctaggtttatgagacctcttccttcttcttcttctaatttcgaaaatcatatagccttcttcacaaaccaaattcaagatttagtgatagagtacgtgcctgttgggttttatgccctnnnnnnnnnnnnnnnnnatataatcagatttacttattaagatcggaagagcgtcgtgtagggaaagagtg

SEQ ID NO: 146145 - DNA, 539 bp, Cannabis sativa
atatatatttatatattaatttcaagtttcaaaatagatcactcctactatcagtatggacaaaaggtacgcccccaccatataaatggtcattatattaatatagcaataactaatataatatacgttcctataaaagaaaaagatttaacacaatacgtactcagaagaaaaagagcagcagtgccacaacattattaataaaggccttcaatcagaaccgttgatgagactgttttaaggagtgaatgaggaatatcaaatcaataatatatcattcttgattgattgttatcatatgtattgtccattttgatgtgctgagtatagtcagtaaagatcagttacattgggaacctgtttcattaaactcattaacaataaacttctcgaaaacttgatctacaaacaacacatacagcctgcttctgctatttcatattcaaactacgcttccataacaattgctatttaagtagggcattttacataaatgtatatattttcttaaataattacaaaaaatgtgtaaaaaaata

SEQ ID NO: 146146 - DNA, 561 bp, Cannabis sativa
tttgatacgaacacacatttttatatatatatatatatcctttttcctacttcagaaatgtcgaatcccccaagttctcctcttcctgaatcttcaagcggggatgagttccactccgacgttggggatcgatcccccccaagtccctcgattttttcacgttattaccggccagtggtgaagctattgcaggtaggatgatgagggcttacagggctaggcgcaacgatgcatcttcgtcttctgatgaagaatggttgcagaatttctttgagaatgagggacgtaacatctctgctaccactagggtgcctgctgaattccatgctcttcgcctacgtgctgagcgatgccgggataaccgtcggatgcaagctcggaaccggcgggccggggatgaggacttggagagggagtgtttagctaacgagaggcgaatggaagagtgcgtaagggagggtgttcctttttaccccatgggcttccccacgggctgccgccgttgtctgaggagggtcgtttgagggtttattgtaatccctggttctctgtgcatactct

SEQ ID NO: 146147 - DNA, 835 bp, Cannabis sativa
ttatatatcgattgttgtaaatcacttatcgcttattaaattagactcgttgtcgttggctaaaagcgaggtcaacaggtttttaagatctacgagcaccatggtggtgttgattccgttgatcgatgacaggagatagccactccaaaaatcgcaggggcaccgcacgggttggagagagtttaagagagagaaagttgaagagaaaaggaaactagggttcatgtattaattttcaattaatatttttattttttttataatttacaattttttaaattttaaattaattttgttttaatatttttattttttaaataatttatatatctatataaaggagaagtataagacggtgatgtgtcactctaaaatcgctctaaagttatttttctctactctccttaattctctcatttttaatattttattagagcataaatctataaattgatattttattatcattttaataaatcttctaaagttatttttttctactctctttagttatctcatttttaatattttattagagtatacatttgcaatctaaaattaatttttaatttttaatttttttaattttttaaatagcattattttttctctcattaattttcttatttttttagttttaaatttttattaaatttattaattttaaattaaaattataattaaactaaaatcgtataatatattttaattttgaaaacactaaattaatttatttatatgtgtatctttatatattaaaagtgtctatctagcggtaattcttggtttaacgattcttggtttaacgattcttttttatttagccttacacgat

SEQ ID NO: 146148 - DNA, 511 bp, Cannabis sativa
attcaaattataattggaaatttgtttaaaactttatttttttttttttttgggtattgtttaattttaatatgaacatctttagaaatttgtgttacttaaaatcttgtttagaaatctatttttaagcatattttaatgaatccatggaaaataagcaactaggttaagatggataatagtaattaaataaaaaaattcttatagaagccaacataacaagagatgtttctcataaaaaaaaaaaaaaaccaagatatgcaaaaggaatttagaaagaaatattagtttagaacatccattggtaatacgctcaataatacaaataaatttctttaccttttacttcttcaaatttacttactataacttagtactacttttcgaacctgtacttatattttatataaaagtcacctataaaatgaaagacaaagatttgaagaagtaaatttgaaaaaaaaaaaaaaaaaaatcgggtcaaacccgacccaattgggtcgggtcgggt

SEQ ID NO: 146149 - DNA, 894 bp, Cannabis sativa
gacaatacttttcacttcatgaatcaagtataagtgtaatttataggagtttttacaaaaatactagattttggacaaaaacttacaattttaatgccacatggaattttttttataaaaatatgcctttttataaaacaaccgtaaaacaacaaaatagaacaattaaaacaacagtggaacaattaaaaaataaccattgaacaatagtacacagtatttttgaaaaaaaaaattgccccacagtaaaaaagaaaagaaatttaaaattttagtatgtggtgtaaaaatccctattgtcttaaacaatacttcttcacttcatgaatcatgaatttaaaaagtgatcataattacattataatattataaaattttatggttgtctccctatgaaagatattagtggtgcactccttatgaccatatttagataattatagttttgatatttttatatgatagtctttatatagttatagtagtcattttaatatatatttttttttatttgaattatttgctatgtcaacgataaagtgtattttagttcaagagtgaaaaaaatattttgaactctaatttaaaaattttaaaatttaaaaatcattagctacaatatacactatcatataataatataattatataattattactgtaaatacggaagaatacattaacaattgtttctcaaaaaaagtactattataaaaatgcattataatacattagaatataaaatataaatagcgaaatttcacttatttgattagcaaaaaaaaatttacatactaacaactacattattcatagttggttgaattaactacatcattttacacttaaaatgatatttatgttataaatagtattaattatgtggatgtccaa

SEQ ID NO: 146150 - DNA, 563 bp, Cannabis sativa
tacttcgttacccaaaacaaacaccctcaccttcaatcactcgttatctattaaactcgatgaaaacaacttcctaccatggcaccatcaagtctttgatgccatcaaaggccatcgtttaatcaaatttcttgatctaaaatcaatttcacccaaattcatcaccaatgaagatgaactctcaaatcaaatttccgaagaattcattgagtatgacattcaagataatcttctagtttgatggctcttatcctccatgtccgagaagatcctcactcgaatggttggctacaacacagctgctgagatctagtctaaccttgaagaatattactctgctcaaaattgtgccaagattagtcaatttcgtactcaactttgcaaaaccaagctcactagttctctgaatgattatctactcaatattaagcatcttgtagattctcttgcttcgattgtctttgttctatccacataagatcacatcaaagcaatctttaatgaattatctcaggaataccctatattcatcacttccttatcaactcaaaaagatgcttatt

SEQ ID NO: 146151 - DNA, 548 bp, Cannabis sativa
tctaaaattaaataaattaatttccaacataaatataattttcctatttaattaaatatcttaagaaaaataccaaatatataactgtctaaaataaaatcaacttaaatattaattttcttacttaattaaatatatctagaaaaatacgaaaaagtctacctaaaaaatatctatctagataattcctaaagtaattacttatgttctaattaaaatatgtattttagtttatttttttaattaaattattaatgaaaattacttgatttaagtatatctaaaattataacaaaattaattttcaacttaatctaattttcaaaattaaaaaatattaaagtatctacatttaaagaaatgtattttgaaattgtgtggggaatgattattaaaataaaatagagtatattctaaaaaattattctaatttaagttgctctgaaattggaaaaaaaaaacatctgacttaaatataattttttatttaattaagttcattaaaatagaaataattaagtatctagaataaaatcaacttaattatt

SEQ ID NO: 146152 - DNA, 1189 bp, Cannabis sativa
  modified_base (1040)..(1051): a, c, t, g, unknown or other
tgacaattggactatgattagaattatatcattagatttgtcaacaagttaatcatagcaattaagatcaaataaataacaggtttgttaaaaagttttgaattaaacaataaaataaacaaacacacaattgtaacaagatctcgaaagttggttaagatatttgattttaataaataaaatattattaaaaaaatatcttaatttaaattaggttgttagaaaatatttaaaaaatattaaaatctaacaaactctaaaatatcttaaatttaaatttgaaatttaaatattcaactaatttttaaatatctagtttattaaaataatttaaattaattaaatatctaataagataatataatataatatcttaatttaaaaattgagatatttctaatgttatattcaaatcttataatttaataaattaaatttaacaaaataaataaatttaaaaatatgatatttttatggttaggatattattaattttatttaataaataaataaaataaaatatcctaaatgtgaaaatttaatggttagtaaactcaaaaatatctattaaaaaaattaactaattattcaaaaattgcatgtcattttaacaaaaaatataaattttattaagataaatttcataataagataaaatgtcaaataattaacatctatctaatcttataattaaattaataatatattttaaaaataaaaattttgaaaaacttacacggttagcaatttaaaatttttttagattatttttaagtgttcttaatattttaatgtcaaaataagataatttcaaattttattaataaaatatataaatatctaatcttattattaaaattaataaactaaactaaactaattaaattttaaaaataaccataatgacaagtagaggtgtacgtcgatcgatgtggtcggtttatgttatattttatttagggtaaatactattttggactatgtgttttacaaaagttatcaattggactctctcttttattaaatgacaaaatggaccnnnnnnnnnnnnaaatggtacaaataggacccttaacttaatttttgacaacttttttttttaatataaccaacttgaaaatacgaaaaaatatagaatatgtaaacaattttgtcataacacttttagattaaattattattaaatttt

SEQ ID NO: 146153 - DNA, 1305 bp, Cannabis sativa
  modified_base (801)..(801): a, c, t, g, unknown or other
attaaaatacggaatttcagtttagtctctttaattaaatcattatttaattgtttaaataaataaatatctataaccgaattcaattactaatatttataaaagaatctctcaactacttgagaaaatatctcaacaaccttgaaatatctataaccacttttcaaattaaatatttacctaattgaatcaattaaataattaattaacccaaaaaaacaatctgatagggacacaacattagctaggcgcctactttattgtttaggacaatgttggtgtcttttgtcctgacaaatattgtatcgataaattttgtttttttcctatttaattaatttgaaaaaattatttaaataaataaattacgattttatcaatttaaaatagattttcttcgaactcttcatacaactctttatctctactcttgacagtgttttaaggtagtgattcaaggaccatagacctataattctaagcttcaataaactagattatttattgagtctcattaactaactaatctcttgtttattaatttcatggttactccactataactatggaattgcactcttagtgattatagaattatatttactgagtttaactgcagtgtccattgatataatcaattttaatgattagccctccatgtgttggtttacaattagttttggtcaaaatactattttacccttctaattacttctttatctttagttctattaattcactagtggaagtataattcaagatcacatctaaatttgtgcacaacattccagttctagaatnaacacttaaagagaaccaacattcgatcaattagcaaagtcaggattctataattgtacaccatgtccccaaccatccatgtcattagatttcaaaaatagaagttgtaagaatcattttatttaagaaactttaatgagtgaatcaaaaaaacaaataacatgaacaggagttcatgataactcaggaattataccgatctactattaatcatcattatgatataaattaggtctttatgataaacgacatgttgataaagacaactttattcatattggtccttgtcatatataatctctattatatgcagtaccttcactttgatatctcactacatccgtaatctgaaacaagattacttgcactgaagaacgggtatcagtgaatcgtactagcaaccattgattaaatatttcataactttaatgtgtccctgactattttattcataactaagtggtcttagttccctgtacagctacaagccacaacctcatatat

SEQ ID NO: 146154 - DNA, 814 bp, Cannabis sativa
aaatttaatttttccacaaactagtcttatggttaattttgaaattgttgattatttttgtttattttatttattttaattataagatcagatattatacttatttaattgttaaatttgaaatgatcttattttgatacttacatattaataaaatttagaaatctagttaaagtttcaaatttgctaaccatatcagattttcaaaatttgttatttttgatatatactttattaaattaaattataagattagaaaaatgtttgtttaacagtttatcttattagatatttattttaattaaaattaatttttggcaaaataacatgaaattttgaaaggtttgttaattttgttttgaatagaaattttagggtttgataaccataatattttcaaacttaggatattttgttttatttattaaataaaattgataatatcctaactatcaaatatcttattttttaaattgtttatttttattttatttaatttattaaattataagattaagaatataatattagaaatatctaaattttaaatgaagatattatattatattatcatattagatatttaattaatttaaattatttaaataagctaaaatttttaaaattagttagatatttgaatttcattgaatatttaggatatttaggagatttgttacattttaaatatttttaatttatttaggagattgaatttaaatatttaggagattttaatttatttccagttatctgttacatgtttgtaatgtttgtttgtttatttatttattaattttttttaacaaaccta

SEQ ID NO: 146155 - DNA, 677 bp, Cannabis sativa
  modified_base (26)..(35): a, c, t, g, unknown or other
  modified_base (208)..(212): a, c, t, g, unknown or other
taggtaaatctgattatattgaaatnnnnnnnnnntagggcataaaacccaacatggatctgggtcaggatctcggtccagatcaaggtccaccatttcgttcccagtttgggtcttggtccgggaccaggttcatatccggatccctatctacgtccaagtctatgtttgggatcgtgtaccacatttaggtccaggtccgggtctnnnnnccagtctgggtacacgaccgtgtctgggcccgagtttaagtctcagtttgggtctcaggctaggtctgtgttcggttctaggtcagggatcgggtcctggtcattgtcctagtcttgttctagggttttggttcagcaattcttgttcaggttttaattttttgttctaagtctacgtctgggtctgggtttggttcttcgtttgggctcttgtccaagtttgagtcccaaatctagacactgactacttgtttgttccaggatgcgttacctgaatcccgagtcaagatctagatcactgtcacgggtctcgatcttgttctggttcagttcccatgtctcatttcagagtttgggtccgagatcgagactgaggtgtggttctaggtcccgaccctggttctctttccctagtttggttccatgtttgggtctgagtttaggttcgggtttgggtcctgagtc

SEQ ID NO: 146156 - DNA, 984 bp, Cannabis sativa
atatgtataaagttttaattgtatacaagcagtcctatagtaagagcatataccttacatcataataatcataagatctaaaatcaacggtcaaaacaaaaactccctaccggtagtgaacttttgttaggtcctaccatagtattaccctatacatatactaccagaaagttacgaaagttacttgcacatttagtttacattaggtattttttactttatttaaaataatacataaaataattcaagaaaaaatagtattagttattctttaagattattattatgtacattcaaataatataattaataatattgataattaaaagtaaatactgaatgttatatattagtgtttaaaaaattttgataatctaactgtaatatatttttaaattaattcaaaaataaactaaaaattaatgttcaaataataaaacaaacacaacttaaatttgtgtaaaataaaaaaaaataaaaatcaatctctaaattattggtaattgaatataacatattaacatttgtctaaaagttgtagataagaaaaataaaaatactcgtaatggttggatttttttttttacttcgacagagctaatagtttaatgtttatattttacacttttcattctagttgggtccgcatttaattaaattgtccattttactgtggataaattgtatatggtagtgttgacaaagttggggtgtacttatgaaaagttattatttttcatttaagataattaagatatggtgtaaataattaatttaattataaaatatatttatgaatggcaagtataattattttatttatttaaaactacacctctgtatagttcattagttgggactaggggtgtacatcggtcggtttagtcggattgtagtgtatttttaccaacccaatataaatgtcgggttacaaatatctaattgtaacccgtccaataaaaaaaaataaaaaaagtgtaaccc

SEQ ID NO: 146157 - DNA, 721 bp, Cannabis sativa
cctttgagagtgtggcaggaaaaactctacaacatacatctcctcgtgctccttataggtccatttgcatctcgaaatacttgaggtgggataagggatcttccttcgaagtatacatcttcgaggttggcgtcttaaacttgtggggcagttccaggatattaatctcgcgcgagaaaggtgttccacgtgctcggtccaactcgagatcattgttcctctgaccggcgaggccttggaacatattttttagttcgtccaacagtgcctgcacggctggactaacttgttcagcctcttggctggcctgagtcacatcagcatctctttgagcgagattttgagcgcgggttccgagctatatgattggcgcgtcatgttggtcgtcaaatcctctcctcctattcagatcatttttgagatcatgaattgtccccaatctatctaatatagaaaagcctggctgccatagtgactggttggtttggccaatttgttggtcggcaccattaacttggttggaattattgggtatgacttctcctgatgagttgctagacaaggtctgcccgcctaccacttggcccataggatgaacttgtgaccgaggattggacagctgacaatttgtagtctaaaaggtgttcattgttggattttcgtctgtctcgcccaggggaatgacggttgtaggcttttgtccggcggccgaatagggttt

SEQ ID NO: 146158 - DNA, 746 bp, Cannabis sativa
ttcaaaagttgtcatcttgatgacgccagggttcactctttaaacctgagctcactcattaatggaggtattgtggactttttgatgttaatatttctaaccaaaaatttacagataaatttaaaaataaaattacatcaaaacctataccataaatatggtgtaaaacggtaagattcctaactcaatttaccatataattaacgattcacattcatgcataaaaaaaaaaattaattccatccattcacaatatatcaacatatatgtataaatgcataatcacctaacacagtatttaatatatcattataaaaattactctggtactaattgtcagtttttatagttcatattagagttataaaagaggaagaaaatttttgataaaacaatttttatctaatatgaaccataagcccaaggatctcaacataataaaaatagattaaatctaactactgaaagaactttaattacctcttgaagcctattagggtatctttgattcttttcgtataacaatcaaacatctaatctaagaactttattgaagaatccacacattaatcttccaagccagcttcaacactcaggaatagagtgggctattaaatcttatagcatgaataaatttatgtattacagtgtgtactcctcatgagatactgtaatgagattagggttttgatctcacacccaccttgagaggtgtaggcgtgtgagacgagagagagagagagaga

SEQ ID NO: 146159 - DNA, 582 bp, Cannabis sativa
gaacattgctccaaggatacaagacattctttaatgaagtgttccatgtattaatagctggttttttactttactagtttgtgatttgctagtttttggcttttacaggacgttaatctatcagattttacacaagaaatcaataatgtatgtctttgtgcactttctaattattagattactttggtatgttaatcatatggttggttttttatatgaattttctatttcactacctggtttttttataggttgcaccaagatataaacagaaaactggaaagaaaaaaattgtgacatcacaacttgggggcagctaggtcaagaagtcaacagacaaagctcatcaatttctcagcatcaccaatgagaaggattgcagcaagatctcttgccaaattgacaaagaaataggattgaatgatgattctcattttgaagctattttaaaacattttttgtaatacaaaatttgttggtttatgataaacttatatgaccatatgaacttactttatggtagacatttatctagtacatgatttggtattttgtagccttctgatttttattagaatggtt

SEQ ID NO: 146160 - DNA, 854 bp, Cannabis sativa
gagatgatgttatatttaaaatttggggcatagagaacatcagtaagaatgatgttgttattgagaacaatagtgccactttgattaacataaaaactattattgttagacaaaatgagtttagtagctggtattttgcatatacactgaaaaagctttatatttgaactgatatgccttgtagctccggaatccataatccacgaattatgtaaaataaattgtgtgttatgagatagtaggatacctgtgttgccagaggaggtagatggttcagagatattcataccagtttgttgtgcaacaagcaaattgagcaattgttggaactgagttgtggaaagttgaggaagaagagcttggttttcttgctggctgttattactgtcatctgtggtctcaacttgatttgcattggcctctttggacttatttttgttaaagcctggtggatacccgtgaattttatagcacctttcgatagtgtgtccaagaatgttgcagtgagtacaaaagggtctattcctttttggaagctggttcttggaggtgggattatcggtcctttgatcagtatttttgttgccttgaaaagcaaagccatagtagaattctggttgctggtattcgattgactgcctctttgatgttcttcttgtgtgacaagatgaaagacacggctatttctggtaatggctccatgagaaggatgctaccacgaacttgagaaaaagaatcagaaagtcccattaaaaaagacataatgtgttccatatgataatgatcttgaagtcttttaactccttcacaagtgcacccattgcaggtgcaagatggtctaaaattggtcaatt

SEQ ID NO: 146161 - DNA, 620 bp, Cannabis sativa
atcctcatctagaatatgcctttaagaatgaactccaaagtgtgaagatgactcctggtcaaagtatcacttcacacttgctcatgatgaacatgaaattgtagaaagcagctattctgggaattgttttatctagagagcaaagagttcatttagttctcaacaacttatcacttgagtttaaccaattcgttgttaataattggaactcgtccgacatagacaagctggaagctcaattgcgtgcttatgaacggacattgtcacttgcatggaggtccttcttcagtaatgcaaataagggcaaaaggaaagctgaagatattgagaataattcctctaaaaatcctactacttcaggctcagttgaaaaagatagagaacgtgattccacttactcaaattatctttcacaacagattgaaccaacaataagaacaatccaataacagttaagaagacatataattcaatgttctaattgtgaacagaagggacattttaaatcaaaatgtcccatttttctcaacactaagaataatggtaatgctttagtttttgaatcatgtgttttagataatgacaaatccatatgaattgttgattatggatctactaac

SEQ ID NO: 146162 - DNA, 1215 bp, Cannabis sativa
  modified_base (1166)..(1173): a, c, t, g, unknown or other
acagtagagcacccgtgagccaagcccagcaagacagtataaaatattaataatcataatgaacaaatcacataaatattaatcccatttcatatttgtctatatgacacagactcgcgtgttacactcacacgcctatttatgtgtatatggcatagacttacgtgttacgctcacacatctatatacaataaagccttagaacaattcatcttggttctagttaccgagtccaacctgattatgccttgaacacataacccttaatttcaatatacatctatatacatcatggcataacaattacatattaacaatttactagggtaataaccctaagccaataacccgctcactttagagtaataattctaatcccaatttctagtttctcatatatatcatatttcatatacgtgccattgtgcatatctctacgtgctaactactatcttacctgatgtcccgcaaatatggagattccaaatccctagatgctcctgaccaagtaccggtaatcctagtcacaatcccaagatacacaagtatagggttaatccctatttccacaaattataaaattggcgttgaaattctaaatattcacatagagctcggaacaagctttccaacgatataaagaacatcccaaacggagtaccaagtcaaaagttatgaccaaagcaaaaatttgaaaaaaacataatatgctgccataaaatggttgcggctactagtttaaaaacccaggaaacccagtttccagccacgtaatgcatccaaaaatactaattttcatgctaaatccacccacaatcatagtaaactttcatcgagcataagccaaataataagagaggaattacacctagttcactctccaacaacaccaaaaaccaacaatatataaatcattattcaacaatgaatttcaacccctaaactcatccatttcaacccaattcacaaccaaaacttaagaccatcaaatagattttccaataattataccaagagcttaaaacacaattcatgcattaaaaatctaattgtaaaaacccccaaaatttagattcaaagtggagctcaaaacttgagcaaaatcaccaagaactcatattcaaaacattggattactagcatgcttttgttggaaatattttacnnnnnnnnagatttactaccatgtatattttattaacatcctaatatgaa

SEQ ID NO: 146163 - DNA, 575 bp, Cannabis sativa
aggtttcttaaactttatacgtgtctatttcatcgttttagaaagttcatagttaggatgttaataaacatacttgtgagtagatctaagatcgtcgtaaaataaattccgacatatgatgaagaatgtgaattcattgaggcttgggggaacatgcttgggaaatataatcttaaaaataatgaatggttggcacaacagttcaaactgaaggagaaatgggctttggtatatggaagagaggctttttgtgccaatatgactactactcaacgaagtgaaagcatgaataatgtacttaaaaagtatttagctatcaacacactatgttgcggttttttcaacattttgagaggttgatcaatgatcgtcgttatgaagagttaaaagcagactttaaagttagttaacgtaatttagcaccatcacttccaattaaaattttgaatcatgcaacaactgaaaacacccctacagtgttgagaatgtttgaagttgagttttcaaaggcttataactgtgcgatggaacttcgtattgagcaaggagcagttacagaatataagcttactcca

SEQ ID NO: 146164 - DNA, 814 bp, Cannabis sativa
  modified_base (45)..(45): a, c, t, g, unknown or other
  modified_base (118)..(124): a, c, t, g, unknown or other
gctccattattaatcatggttctgaccaccattttattggctatntggacttccacgaccagcgggttgttctgcaaaaatctatgtttgacagcgtcttcatcgttgaaggttatgnnnnnnnctcctgctcgtggaactttggggttcctttcttctacggccagaataacttcctcttgctcgtgctgcgctactgggcatacctctcctgagcttttcctgaatctctagcaatatgcgagcctccaacgatgacttgcagatgtccgtctactggtggaggtagtaaatcttggttattgtcgtttctctgaccctaatcggtcttgacatacttttgcaggtgtgggttgtttttccttatcaggaattcaatttcccgcttcaggttgttgcattcattagtgtcatagtcgtagtctctgtggaatcgagaaaactttgtcatgtctctcttgctgagatctttcttcacgggcactggcttcttatatggggccagcgactaagttgccatgtaaacactttctatgtcttcagtcaagatagtgaatctagtatactttgcttgattctcccagggagcttgttcggatttgtcggcgaactttcctttcttcccattcccttacctgttgttgttgttggaacttttaccacttgagcttcaattatttgggtaatggaggagttgggcggacgttccagcaaaaggagctttcgacttgctaggcttttgctcaccttttgctcgttgaatggctttttcgagcttgatgaagccttcggcacggtcaagaaaatcactcat

SEQ ID NO: 146165 - DNA, 885 bp, Cannabis sativa
taaaaaaaaataatatttctactgtggggtgaacatgtttgtcttccataccattctccacttaaacaacagaaggccttcaatctgtcaccaaattctttcactccaacatcaaaagtgttatattatatttgttatataatataggaaaaattaaaatattaaaatatcacatattatatattaatataagattaatgtatataatgtgattgagagttgcgtacatgtaatattcatataaattgtaacataagaggtgaagttacttacattttgtaacctccacaattattactaatattaagtgtgtaaaaaagtgttacacatcttaatttgaaattcttatatgctataggagttatgatgtatgtatgcgttacatttgagtttatggggttatgagtttaaatttcaaaatgtatgatcttaaacactataaatagaggtctttagttcacttgtgaagacactttttttgtgagtttctatcaaagagagcaccttgctagaaactataagtttgataaatccagaaagcgctatttccatttctttcttatcttaggtggtagggggaaataagcttttagacaaaggtgtaaaaccttgttcaagttttgtgacttctctacttgacacttagtattagtggtgttgagattgttctcacatctatacagggcaagccctaggctaagataggctaggcccgctcctagggcccactctaggggcccaaataaaaaaaatacctcttaaaaatattttttaataatatttgaaaataccatttatctttatagtaagggcccaattttttttttgtttatggcccatttgatctgatggctggcacgacatctatatgtatactactattta

SEQ ID NO: 146166 - DNA, 642 bp, Cannabis sativa
tttagtgaattacttggaaaaggaagtcttgcccgaagataaaatagaacaagaaaattacgacatcgagctgcccgatatgtcatctatgatagaagactatcatgagcccttggcccttcgcggtctggggtatcgacttgatgggagaattaccaaaaggaaaaggcagagtcaaatcgccgtggtcgcggttgactacttcaccaaatgggtcgaggcaaaggcacttgcaaccattacagcagccaaactgtgcgagtttgtctataactccataatttgttaatttggcattccttacaaactcatctcggacaacggaaagcaatttgattgtaaagaaatgcgacaattgtacgatgagttaggaattaaaatggaattttcagcagtgaaactcctttcgcaagttttatggtcatataacacaaccccccgatgcacgactaatgaaactcctttctcgctctcctatggatgcgaagctatggtgccagtcgaggttgcagcaggttccctgcgaagagatgctttcaatattgtatagaacgaagaaaaacagttgcttcacctcgaccttttagaagaaaagcgcgattaggctcacctgaaaaatgcggcttatcagcagcgaactgc

SEQ ID NO: 146167 - DNA, 768 bp, Cannabis sativa
  modified_base (45)..(47): a, c, t, g, unknown or other
gttcatgtttaggatgttaaaaactacttgttagtaaatctagannntggtaaaatatattccaacagaaaatgccctctgtaattattaaaaagctctttttactaacaaaaaactttttaagggactattgttatacccgaaattcagctagaggacacttgtcaagataaagggaatgtgaagcggtgcaatatctttttatgtaataactcattaattatgtaagtatcagagtatatttgtaacctgctgactgtaaggtcttaggcaaggaatcaatgtacaaactggcacttagtgtattaacgagaaaccatatgtcgctaaaggtgaatagcgaggctctggagaaaagagacacataccttagcttgcaataagcaaactaagtgtaaaagtcagatcggctcgaagaacaagtatgcgagatgaccatctctctatgaggagacttcttatagcttcatccaactaacaggagtgaggctcataaccccggcaagtcagaagatttctttatacccgcgatcgacgtaagacatacattgtcgatctcagaaagaagaatggtcccagctcgctattaggatcactgcaattcagtttctgtctagacatctacagattcaacaattaaagacgtgtttaatacacaatatttttttgacccagtaaagcgggaaaatcacagctatacgattttcaaaatcatacaccacatttacatttcgtgatatgtaatcagatctcacgattttagggata

SEQ ID NO: 146168 - DNA, 732 bp, Cannabis sativa
attttcctggcgacgtactgggtgtaagtacgggcatcagtgatatatgatgagtactaagcgtagatacgggctcacctgattacgtgatctgattactcttggtcacgtgtagatacgacgtcagtgatataaaaattgccaggttatggcatagaatgaaaccgttatagggtttcctcctagcgatgtgtagatacgggcatcggtgacatatgataggtaccgcgcgtaggtatgagcttgtctgattaggcgattactcctggcgatgtgtaaatacgacatcagtgatatgaaaatcgtcaggttatggcatagaatgaaactgttgtagggtttcctcctggcaacgtatagatacaaatgttagtgacatatgataagtacagagcataagtacaggctcgtctaattaggcaattactcctggcgatgtgtagatacggacgtaagtgacatatgataagtaccggacgtaggtacgagctcgtctgattaggcgatgcgatatattggtgccaagttgtggcacgggctcacttgattaggtgatgaaattatatgatagatgggtgtatgtaggttgttggctggcatgatgggctcacctgattaggtgatgcaaatatgcgacatacggtgccaggctatggcatggacttccctaattaggcaatgcaatacaggattgctatattaaagcatcgacttgcctgattaggcaatgtg

SEQ ID NO: 146169 - DNA, 583 bp, Cannabis sativa
ttcatagattccaaaaattacaagccaaatttcacaacattaaaaaaaaagtaaatatgtaaaaagagggttttatgaaaaagtctaaagaacactatgatattcataatttctataaattttaacatgggagatagaatcaaatagtgaatggatgggagaaacttactcaatagtgatgcccaagtttaaatcccctccaataatatttagtttccactttgagcattcctttgaaatggttcttggaactatttgagaggatctttagaagagctattatttttgataaagagtgaagagtagaatgggttgtaaagaaaagagaggacctatttaaaggctataagggttaattaatttttttttattatttcacttgtattgtttgtgtccaaagatgcttaagaatattagtggtcttttacatgtctacactagtactggtatatgctggtatggagtccaagaacgcggagattatgttttctataagtccatcataacattataaagttatgataaacttggagggcaaatgttatctctcaaaaaatccaaaataattgtgcatgaattttta

SEQ ID NO: 146170 - DNA, 536 bp, Cannabis sativa
gggctggggataaaaacactagattttttcatcaaaaagcctctaaccgtaagcgcaataaccatattcgaggcttaacccttcctgatggttccctcactcatgattcccaaactatattcacccagtttctttccttctacactgacctcttttcatcccatggtacctcctcctctgcaatgtcttctattctccaaggtgtcaccactaccctttctcttgcccaatctgattatcttgctgaggatttcactattgatgagattaaatctgccatgttcagtctctctggtgacaaatctcctggtcctgatgggttgaactctttcttttatcagaaaaactgggacaccctcggatctgacctttgtcagggccttctgcatatccttaacaatcagggggacatcactccaattaacaacactatactggtccttatcccaaaaaagaaaaatcccaaaactgttcgtgattttcgacccattagcctttgtaataaccatgatttccaatcttctaaaattcatatc

SEQ ID NO: 146171 - DNA, 501 bp, Cannabis sativa
gattggggcacttcccacagggcagggaggagccaaatacacagtggtggcagttgatttcttcactaaatggatagaggctgcacctctcgtctccataacctccaagaaagtcctcgactttattgtcaaaaacattgtctgcaggtttgaaattccaatgaagatagtatccgataacagaactcagttcgatggtgacttatccactgggttctgcaagaggaataaaataattaagagcttttcatcagtatctaggccccaggcgaatgaacaagtggaagctgttaacaaaatcttcaaagatactatcaagaagaaattagatgctcccaaaggtagttgggtcgatgaactacctcaagtactatgggctcatagaactactaagaagacagtaatgggacatactccattctcgctagcatttggctcggaggtaatgttacttgtggaagtaaacatctcgactcgtagatgagagttttataatcaaga

SEQ ID NO: 146172 - DNA, 503 bp, Cannabis sativa
tggggaattcagctgttttcctctcgaaagaataatacatgaggagtgtagtggtccaagcacgagtaactctttgggtgttggatcttagagccttgagcatatcaatgctggagtggttcttaccttcagggattactttaaggactactgcaactacctcgggctttccccattccagctaaatcccacctcatacaggatcctcgtgaggctcaaggttctgtatcacatcttaggctgggagtgccctactcctttggagatagcctgcttttactctgtcaaagctgttcctacgagaaagaatgctatggggggcttctattatcttggggcctatactggcgaccccaatctcatagttagtttgcctaacaagacagattttaaagaggacttcttttggacggcaggtttatctctaataaacactactgccttccgaatcatacgtaagttcctttccttgcgaaattattcatattaacttgtagttttta

SEQ ID NO: 146173 - DNA, 660 bp, Cannabis sativa
actccccatgaagagatatgcggcatgcgcttctactaaccccgtgtaccaaatccaggacatgagcgtggccctcactacagtgagttcttatcttttagatttcttaagtctcttttattttttgtacaagcaatactacaaaaagagctttttacttcagattttaagtgacatataaagattttgcttcaattggtgtaaccgacgcgtagacgcaaataatgatatttttttacttcagttatgaacaaacgctaattgattatttgcttcggttataaactgaagcaaaaaaaaaaaaaacatttttgctgcagttcataaccgaagcaaaaaactagtgcgccaacgctaattgttttttgcttaagttattgaagcaaaaaaaaaaaaaattagtaattataaccagatcgatgccacatgaattcttttaatttcacacaatatttttagtttcacataaacaaatctcatatctcaaatttacagcaatctcaaattttttcaatgatgggatagcaccaccgcgcgcaatgacagcaccaccaccttaccactgcaaacctaaaaataggcatatcagattaaaaatagagagattaaaaaagggaataagataaatatatatatatataaatggaagaggtttcaatg

SEQ ID NO: 146174 - DNA, 659 bp, Cannabis sativa
  modified_base (599)..(600): a, c, t, g, unknown or other
caagagctgaagcaacgactgattacagctcctgttttagccctgccatcatatcaagacgagtttgtggtgtattgtgatgcatcaaggcagggtttgggctgtgtgctaatgcaggcaaataaagtcatagcttacgcctctcgacaattgaaagattatgaccagtgttacccaactcacgacttggaacttgcagcagtggtgtttgccttgaaaatttggcgacaatacttatatggtgaaaggtgtgagatctatactgaccacaagagtctcaagtactttttcactcacaaggatttgaacatgagacaaagaaggtggttggagttggtgaaagactacgactgtgaaatcctgtatcatcctagaaaggaaaatgttgtagcagatgccttaagccgaaaaggacctgatcagatacttaatatgatcatgatttctcctcagttagcctcagaaatgtctagggcaaacattgagttggtgactgagaaattgtataatctgtcacttcagtcggacttgttagaaaggatcaaaatggcacaattagaagatcgtgaactgattaagattcgagaagatgtcttagnnggcaaagctaaggacttttcaatctctgacagtggaatgctgttgttcaaagcacgagt

SEQ ID NO: 146175 - DNA, 548 bp, Cannabis sativa
aaattggtgaagtctatgtcgatgatatgttagtgaaatcgataaagtgtgaagatcatacaaaggaccttgcagaatgctttgaaatactcaaaaagtataatatgaagctcaacccaaagaaatgttttttggagtctcctcgggaaagtttctgggtttcatagttaatgagaggggcaatgaggaaaccctaaaaaaattaaagccttaatagagatgccataacccacgaagccaaaagaagtccaagccttaatcggaggaatggcaacattaaatagatttatttcaaaattaactgataagtgtctaccgttcgttaatgttttacgaggcaacaagaagttcgaatggacaaaagaatgcgagaaagcttttaaaaccataaataaacatctatcaacccctccagttttggcctaaccgataactggagaaactttatacctttacatagttgtctcagaaaagtgcaatcaatacagccttggtgcgagaagagggaaagcactagaattctatttactattttagtaaaaggttac

SEQ ID NO: 146176 - DNA, 987 bp, Cannabis sativa
tgccttttcttggggcaagtcgccttttgttatttattcgatgatgggggtcatctagttgagctcttgctcaactgccgctacggtactcttggctttgatgcttggttccgtaaggcgttccacgggtattacccccagtttctcaattttgctgtctgaggctaatttagccaaacagtccgcgtgagcgttcttttctctggggattctatctactttgtagtatgtgaactcgtggagcaattcccggactattgctacgtacgcagccatcttttctccgcgtgtttgatattcccccgatacttggttcactaccagttgtgaatgactgaagacttctactcttttagcccccacggcctttgctaatctcagccctgctatcaaggtttcgtattcggcctcattattagaggctgtgaattaaaactgtagggctgcctggagtcgaagtccgtttggggatatcattgctacccctgctccggatccattttcgttggaggcgccatccacaaatactttccacgttgggacttgcgttgtgggcatgcttgcgttagcctcttcatggcactccgtgatgaagtttactaacgcctgcccttttatggaggtgcgtggtatgtaatgtagatcgaattgggttaactccatggcccatttgagaagtctcccagacgctgctggtttttatagaacttgtcggagcgggtggttggttaatactttgaatgggtgagcctgaaaataaggtcttagctttctcgaggccatcaggaggcaaaaaactagtttctcgatcaccgggtatcgtgtctccgcccctatcatgcgtttgctaacatagtacacgggatgctgagttttttcctcttcccgcactaaggccgcgctaaccgcattctcggagacgaccaagtataggaacaagtcttctccgagaaatgtttttgataggatcgggggtttagccatgtg

SEQ ID NO: 146177 - DNA, 570 bp, Cannabis sativa
  modified_base (190)..(194): a, c, t, g, unknown or other
tttaaaaacaaaaaacaaaagtgtgttctgtaaattttatttctatttattgattttgtttaagtcgagtccagaaccgggtctgaggtcgagaccgagggtgggtccaaattcggagttgggttcgatttttaaggtctaagttaagatcggaatctaaaatattgataaaaaaaaactgtttaaaaannnnnttgaaagtgattttttttttttgtttttaaaatttagatttttaatttaaaaattgaaaaaataaaaacattttatagaatgtgatttggtaaatattttcacttttctaattttaaaaataaaaaaactgattaaaaaagtgttaccacattaatttttaaatttgggactattttgtacataagattagtgaaaatgtataattttgaataattatacataagtttttaaaattaaaaatattattaattaaacaatagttacttagattgattttaagaaaaacaatatgacaataaaattatatattatttttaaattactagaaaatttatataaatattttaaaaaattaatatttatattaaattaatg

SEQ ID NO: 146178 - DNA, 843 bp, Cannabis sativa
ttcttaaaaacaaaaaactgattaaaatagtattaccaaatgccaccttaattctcacttaaaaagtgaatacagttttatagaatatatttttgaaaaatatttatttttttaattaaaaaaataaaaaactgattaaaataaatgttactaaacgcccttatagttacccgaataattttcaaactttaaaactttgggattttttttggaaattttttggatgatgagatgaagaagaagttgtatacaactcatacaccacttatcattttgtattttgtattttgtattttttattttgtatttttatatatatacatatcactagagagtagaagagtgtagagagtaatagtctaagagtgtcaaccgctgccatgtttgtccttatattaacaaacaattgcattgactaatgactaatgactagtatgagtatgactatggaataataaccacataatttgactcttattgtatcttatataactaaaacttccttgaaagttataattctatcttatataataaattatacttcacttgattatttattgattttttttaaaaaaaaaattatattgtatacctattttattttatttattttaatttttacctctatttttatattctttaagatatattcacttttatagataatgtcctattagacctcttaggttaatgtaaattatatgttaaacttaagtagagagtgagcctatattaggcaactcactcaaaaaaaaaattggtatattttaataaaataaaatataagagtatttttaattaatgaatacaaaaaagatatattttttaacttattccatattt

SEQ ID NO: 146179 - DNA, 750 bp, Cannabis sativa
ttttgtaagacatattttaaaggataaaattgtcattataaatttaatattaaaaaataaaataaaaataaataaaattcattacccttaatgacattcattagaaatttggtaggggaagttctccctttcttttctcccttatttaatcaagtcccccctttttaaatttaatgaattaatggcacgtttactaaactgtaattggaattagaataattaatgggacaaatgaatcggtttttaaaatagaaaataatcaaaataatcgaaaaaatcgaaaaaatcgaaaaataatattttattatgctatttactaaattgtctagaaagaaaattagatcatattattttatttacataactaggaaaagtaatcagagtactttactttgacaaaattgccattattagagcatgtaattattttctgtttataaattttaaagggtatatttgtcttttcatttttaataaaattagaattaaaataaattaagttaggaaaggaaaatgtattccctataaaaatggatggagaatatttccctttgttttctccctaatttgtatgggtcccactactttctccatttctaaaagggaattttgcggcaaaagtcctcaagaagttcagtttgataccataagtcctcaaacctcgaaaaatagcggtaatagtgttggaatttatgccctaaataaaacccatttccatataatcagatttactaattaataaagatgaga

SEQ ID NO: 146180 - DNA, 730 bp, Cannabis sativa
  modified_base (250)..(252): a, c, t, g, unknown or other
aatttacaatatgttttttttttgtttgttccattggattattattattattattattattatttgaataaacttagcaactttattaactaacaatccttaataataatagaacgcacgacctgtagagaaacaagaattcctggctaaaacatgagccaacttgtttgcagaccgtttgacaaaacataactcaacattatttaaagataagagaagagtacgaacatcatgaactaaaagaccaaannnggatgacaaagtaatttggctttttacggcttgaacacaaactaagctatcaatttccaaaataacttttccccacgaatgacggtcaatccagcttaaagcttctttgatgccaacaatttcagctatttcaggttgtacccgcccaacctttcccatcgtgtaagcttctaccaaattaacggtggaatcttgagccacacaaccaaaaccaaaccggccttctcgctcaaacaaagcgccatcaacattaactttaatattatttatagcaagtgcagtccaacgctcaagcacacggtccccatcaatcaatggagacaaagaaagaccctttcttttttgagcagatttatattgatcaagcagagttcttgctggagcaaccacatttgctgcagtacggctcctttgttgccaaacaaagtcgttacaggcacgctaaattgaccagctaacaaccgcgacttcctccatc

SEQ ID NO: 146181 - DNA, 559 bp, Cannabis sativa
  modified_base (92)..(97): a, c, t, g, unknown or other
tataactttcaaataatatagaaaaaaactaacataaaatttagtatacgtgcctcgcacgtaatttgtgctagtatatatatatatatatnnnnnnatatatatatatactagatagattttccgtgacttgtcacgtatgttaattttattttagtttttagttttttttaatatcataattttaaaattaattatattgaatgtaagtatacagatacacaacatgtagtcaactattatatattttaagtcaaaattttgtaggtgccactataccaacatcatctacataataataattaagctgtggtggatcttatttaaataaatgaatatacataataataatatttaaaatttaactaattctcaatatcaaaatttgaaaataatttttaataaaaaaataaaaatatgagcaaatttattattattgcaacactttaagtggattaattatatttaggtttaactaactacatgcatgctaactctttacgtgacaacatttaatactttgttattttttttatttaaaaaaaaaagtcacccaata

SEQ ID NO: 146182 - DNA, 634 bp, Cannabis sativa
gcggtaataatccctaaggtcaccatttttgttagtccgttagtacctaagttaaatagtccgttaattgctacaacaattaccacatgtcaaagtattattggtgcacttaataaatattattaaaaatttaaataattagaaattatataaaaaataaaaactataatatttatttattttctttttcttttattaaaattaaaaaaaaaacattatctaaaaaaataaaacaaaatcctataatttatctccaaatcccacccaccccgatcctcctcctcttcttcttcttcaaagaatttatcaatgttccaggaaaaaaaaatctaattatttaaaaaaacctaatatagtacatcacttactggtttggtacatgaaacctcagtgtttcatgaaccattttcctcatattgaaatgctcaaaacgaaaatgggattttcttgttcatgtttggattggattattgatgtcttattttgcgtcttctcagaagtttggctgagtttttggagcgaagtacactataattccctatatgcaattggaggtaatgcttatacatatatttagctcaaccaggattacatgcattttcatatgctttctttttattcatttggtctccat

SEQ ID NO: 146183 - DNA, 752 bp, Cannabis sativa
  modified_base (50)..(72): a, c, t, g, unknown or other
  modified_base (697)..(702): a, c, t, g, unknown or other
ggtttatttatttgttaacgggagctattaacatcgttaaatttaacagnnnnnnnnnnnnnnnnnnnnnnnattctgttaaaccaagaaatgtcgttagatatgtacttctaatatataaagatttatataaaaaaaatagtgaatagaatcacaatacaagaaaaatatcataatttgaatattagatctaatattcatgcattaatcaatcacatagagacaaaattatgttgtcctttttatttttatgtaataaatactattaaggtaaatattcattgaaattcatgtaatatgaaaacatggataattaatattaaggtatatattattttgaatattatattttacaaaaataattaattagattttttattttattaaataataaaataaattttatattttttaaaatagtacaaataagattttgaactgctttttattaaaataagtttaataataatctgatttagaagtgttatgacaaaattagttatatttttttgtatctgttcgtattagatattgtcttcaagttagtattttatttttactattttgaaaaatacaagattttttttatcatttaacaaaagagaagatctcatcaataacttttacaaaataattggaccctctgttttggaccctctgttttacaaaagttaccaattggaccctgtattttgtnnnnnnacaaaatggaccctgtattttctgaaataatacaaataggaccctgaatt

SEQ ID NO: 146184 - DNA, 668 bp, Cannabis sativa
  modified_base (67)..(73): a, c, t, g, unknown or other
agttaataaatgttggaaaaatgccaaaaatgtatagaactctccttagactgaataagtatctttnnnnnnnctttaacattcagtctttctggtagaactctccttccaatgatcatttttttttgaataaatatgatagttatttataaatatattagctattttcctaaaaaactttttataggttgttataacttattttcaaaaatattttataataatattttaaactaacttaaacgcacatttatcttgtctttagttagttaattaaaaaaaaattaaaacctaacaatatgtgatctagtatatataataattaattttagaaatgaattaataattaattgtttagaaaatattttaaaatatttctaatttaaataattaaataaatccaactatttaattatttaattacaattaataaagacaggataaggggttcaaattaatttaatgaaattaatgagtatttagaaataatacttttaattacataatagtggataaatggttgattaatggtcaaaggagattggtgtgaaatttctaaagctacatcaaggaacaaccaaaaagagttatttatgagagagattgttcttagtgtagttgaagccaatccagaaaaaatccaagccctcctggatatgaactagcca

SEQ ID NO: 146185 - DNA, 800 bp, Cannabis sativa
agtcataacagggtgagttccttgcaaccctcccactacgacaaggtatcgtgaatttctgtctaagaacataagtggtattctcctcttcgattgtgtcaatacactagaggcagtgggaccatcttatatacaataagacgatagaacactttggaatcaagaaaaaaaattatctgctctactttactactttatttttagatttagtcatattcttagaaagtagtatttgataaaaataaacactttcttatcttaatcacttttaaatagctatcaaacatgcaaatcttagttaacagttctagcttttcttaagttcacaatcaggacacccatgaatgtagaaatcatttacactaagtacacaaccattccatcattctaaagttttcctatcactaggatatatccctagaaggacttaggcaactgctagtaactaatcatataccttttactttcatcaatatgcaatctgaatttatagggagataagtttggatacaattcgaagttcaacttaatgatctttgaactttatatccaccaaatatttctccacccttatcagtttgtaagatcgttaaccacttaccttaatgtttttcaacattactagaaattcatgaaatttcttaaacatttcaaatttcttggcctaaggtaaaatctagagtgatcatcttaagaatatgacaataacccatatccacccctgaatgtacatccatatgtcaaatatagatgatcctactttcaagtggatataggcatattgtctctttgcagaggat

SEQ ID NO: 146186 - DNA, 588 bp, Cannabis sativa
  modified_base (535)..(542): a, c, t, g, unknown or other
tatatatatatataaagatagatacacacatttattttataatgattacatattttgatttggatcgtatgaatatgtatgattgaatttggtatccatatatttagttgacagttcaagattgcttcttatttatgtctttattataaagcttgtgtatacacatggaatgtttttagagaacatgttatattgagtccacatccataaatatgaatgattgcatggttttaattatataagaaatttttattagtgatatttaggtatggaattggattagtactctttctttagtttcgaaaaatggaattatggaaggtacaaatttttgatgcacgtgttggctggccatacacgtgttttttgttcaaaaatatggtagataaaaacttatgagaaatgctaaagggtactagtggtgcctcatatatatggaatactttttaatgggtaatatcggaactaaaaaaaattaataagataatgatctaataaccttttttatgtcaagtttctaaaaattatttttttnnnnnnnnaaattatatttattttttataaaattggaaaaataattacaactaa

SEQ ID NO: 146187 - DNA, 796 bp, Cannabis sativa
  modified_base (258)..(261): a, c, t, g, unknown or other
ttctgtctcgcaaaagactattcagccagtcgagttgtaaacataccctgcgaattatatttccaacgagttgttccatgctaagcatacttgtcatttgtgtgtttgagctttttctagctcgacacgtgtcctattctgatgtgcttaccgaacttcaggtataacaacaatagtaaatatttttagtttcgttcagaaagtattttttatggaaagttaataaaaaattacttttacagaacttaattttgattnnnntgaattagttatgatttttgaagttggatgaaaatatcccaaaattgtagcacgcgtgtgcgaccgcggatgaaaggatgtcactcagtcgagaccgagcttcaaaaaagccctgtttgacgtttcttagacaagggctatctgaagtccctggtcacgccgagctcccttggcccacagaggttgcatacccctgtgcccaattttatttttgtgataacttttgttccaaaaataattttctttgaaacaaaattgaaattttggtagaattttttgtagaatccaaattgtcaaataaaaatctaattatcagaataaaattaaattataaattaatcaaaattacttttagatattagtagcctttgaatttaaaaatttgatttttccacaaactagacttatggttaatatttatttttagtgttttttaaaatttttttatacatataaaaaattaaataggttaagttattttattatagtttttaaattattactaatatgtaattataatcttagatgaagattt

SEQ ID NO: 146188 - DNA, 591 bp, Cannabis sativa
cgtgagtatactacttgattgcgtgcacttgcgtagtgttcataattttcagcaacaatgatgcaagggtataaggtgattagatctaggtgttggggtgggcattatagaattttggttgggcaagggagtgttggttgagacagtaacacaaccaggaacattgttaggaccagtaacggtattagaaaatgaagaagtagtaaatggagatgagttagaacctgattagcattggagatagtgaaagcagggacgtagctctcatgaaagactacattcctagctctgtatattctggctttggaattttcacaaagataacctttgtgatgagaagagtaaccaagaaaaatgcattaatcagatctatattccaatttgtgattgttgtatggcctcaagtgtggaaaacaagcacaaccaaaggacttgagtatcttttaatctggtagacttccaaacaagcattcataaggacttttaaaaccaagaactgctataagaagtcaattgatagtaaacacaacactttgaaaagcataccaccaatatgacaaagataaactagcttgagcaagaagcaccaaa

SEQ ID NO: 146189 - DNA, 526 bp, Cannabis sativa
ttaaaatagttacaattatactctcatttagattttattaatgataattaaaatgagtcatctcatttatttgtttttttttttaattttttaaacctaataattaatttatttatttttactgataattaaaatgtgtgattctatttacttgcttatttgtttttcaaacaataaaaaacttaattaatgtatatttttttatttattaaaaattcgtttttttaatagataatatgtaccacaatgaatcatttttttaatttattttataataaatattggctatttactttataagaaatgaaaaaaatatttcttttcataaattttgcaccaatcttttttattatttttctttttttttttctttgcttcgtatcattcttttaaagaaaaaaaatcatgtttttttgtttttttacatccccttaaattgttctcaaatttctctctaatcaaatatgtatatatatatatgctaaacaggactggtcctagccataggcgggctaggcccgtgcct

SEQ ID NO: 146190 - DNA, 635 bp, Cannabis sativa
  modified_base (446)..(447): a, c, t, g, unknown or other
tctctgatcagcatgacactcacgtcatgttccgtgatagctaagtatattcctagctcctcgctgtctagaggttttgaaagtacgggaggtttagcaagttgtgcatttagctcttgcaaatctttttcacattattctgtccactcgagctgtttgtttcctcgcaggatgttgaagaatgggacacatttgtccgttgattttgacacgaatatgctgagggcggggatccaaccagctaagctttgcacttctttggtttttgttggcgatttcatatccaggagggcttgaatcttttctggattagcttcaattcctcgggcattgacgatgaagcttataaactttcccgagctgactccgaaggaacactttaagagatttagcttcatgttgtattttttgaggactttgaagcattcgtccaggtcgtctatgtnncccccagcctttctggatttgacaagcatgtcatccacgtacacttccatattttgcccgatcttgtctttaaacattttttttattaccaatctttggtacgtagctccagtgtattttagaccaaacgacatgactttgtagcaatagagacccatatctattcagaaacttgcatgttcttggtc

SEQ ID NO: 146191 - DNA, 662 bp, Cannabis sativa
cgaccgcgaccgagacccaaaacttcaccccaaactcgagacacaggactcgaccttggactcaaaacctaggaaatgactaccgggacacaactctgaacccaaacccaaacccagactagatatgaatctagacctaaggctttgtcctgatccatagtcagtatttgaattgaaaccccaaaccaagatttgtactaagactcggacccgaaccttaaccgggatccagacccgatctcaaactcggaattagaatcggaccaggagtgggatgagaacccagacctgggactgtaacatgacccaaacctaaaccaaaacttagaccaaaacacatatcggtacttggacccagaccgggacccatgacgtggaacctaaaccaagacctggacctggacccagaccaagacccaaacttgaaaattggggccaaactcaggacccaagaaccaaactcagacttgggacccaaaacctaaacccagactaggatgggacccgaacccaaatggggacttggactcagacaggaacctcagacatgaacccaaaccagaacacaaacttggacctagactgcgacctaggacccaaacatagatgggacctagacctaggaattggtcccccaaaccgggaccaaaacttgggcctca

SEQ ID NO: 146192 - DNA, 524 bp, Cannabis sativa
cggcttgggtaccaatacgggatttgcaacccaagctgggtagaaagcttcaattgtgaaattgttgttgcgtagcttttctacttcttcttttaggactcgtgctcggtcttggtccaatagccttggcttttgttgaattggtcggaagttggatcaatatttaggacgtgcgaaaagatagaaggatcaattctgactatatcctaatgtgactaggcaaaaatgtctaggtttgctctcagaaatttcatcaatgctaattttacttcgagcaacaaactgtttccgatctttagctttctgccaggatggatcgaacttgatctcttctaattcttccgcatgtccaacattgttgcttgagtccccaagtcgaggatccacatcttcatccccgccttgggaagctccctactttttttccgttatctgtgctctggctggaggatacttccttcgtagccttggccacttcaaggttattgttgggttttgtgccctaaataaaaactatttcaata

SEQ ID NO: 146193 - DNA, 611 bp, Cannabis sativa
ctggagccagcaggcagttgttgcgtttggtccagttttagttccagctcctgaatgatactgtcaattttaccaaattgggttctcttccattgcagaagcgcaacccgagtcgcaccaatcttcttaaaaacgcgagcaggggcccacagatgggccaccgaatcccaggcactggctacaacgaggttgcttctgcaatcctgcgtccaactttcctcaaatttgaagcatctggtgaatttaggaccaattccccccgtgtccaagcacaaaggtctatggtcagaagtactcgtctggacggagcagagaacagattttggaaacagctgaatccacgctccattcacaatgcctttatccagggcagatttcacatggttttttccagaccgatgattatcccaagtcatcatatctccttgaatatgcatatttattaggccacgagtctccacaaggtgagagatgaaaaggatgaaggggtctcggcccattgatccttcccactcataggaactcaggacaaaattagtatcaccaaatatcaaccaagggccgccatatctatctccaagagccataatctccgaccagaattgtttttt

SEQ ID NO: 146194 - DNA, 908 bp, Cannabis sativa
  modified_base (875)..(883): a, c, t, g, unknown or other
aagccaaaggaaaaggggggaatgggttttaagaatttagagctgttcaaccaatctctattagccaagcaagggtggaagatcatcaataaccctcactcaatgctcgctagagtgctaaaggcgtgctactatactaattcaaacttcttggaagctaaagtttgtgggttcgggtcttatatgtggagaagtatcttatggggaaggaaaattattgacaaaggaattcgttggaggtttatggccggaagagacattcacataaatgaggacaagtgtctccctcgcccttccactttctctcttcgcattcctgctcatgtcccccaagggaccacggtcaacaccatcaaagacgaagatggacattggaacaaccaaagagtaaaagagtgctttcatccggatgatattccaatgattttaggtataaccccttgttcgacaacccaaaatgatgatttgatatggcattacaccccggatggctgctataccgtgagtagtgggtataaagtaggcacaaacaatgaattaacaccaggtactttggatgataatgaaattaagaaatggtggcgtggtatatggaagattgaggctcccccgaaggttagaaatttcatttggagagtttgcaatggttggctcccggttcacatggcgttgagggcccggggaatggaagttaatcccctctgctgctggtgtcataaggaagaagagaccatagagcacagtctttggtattgcacctctgctaaacacatttggcggaaattcacgatttggccaatcctaaaacgcagccgaaataatgctttagatatgttcagcactcccactcaatcatgctatcatgttcccaaaannnnnnnnncaccctgacccaaaattaggcttaa

SEQ ID NO: 146195 - DNA, 653 bp, Cannabis sativa
tgtactcgtgttggtagagccttaactgtactcccgagatttactaagtgttgtaccaaatgcacgccgtacctctggtactcgtgttggtaacaccgtaaccctactagtacataacactatactaacactctaataatcgtattcatattagtgctagtagtgaaaatatctaaaacaagtatatatttatatatatatatattcttatactatcttacctcgttccgtgctcaagtgtgccggtcagcctgagtggaaacgcaactcggcgctttacagggccctaaaccataatgttcagaattcaatgagagacacgctaaaacacttatcagggatttaaaatagaaactaagcttaaccctatcgacaaataggatgccaatactctaaattacgtaaaaacgggaaaaactaaggctcgagaaaaagccccaaccggcagaccaattcccaaccagaaccccaggaacctgggtaccaaccgttcgaccggttctgtgctgggaaccctaaaaccgatccccctaactccaatcaatcccaaaacttctcaaaaattctaggatacctgtatgcactataataaaccagtttcaagccagaaaacttaacaaaccgatcatgaaacaaaaccaccattagagctc

SEQ ID NO: 146196 - DNA, 1281 bp, Cannabis sativa
ttcttgttggtgagttgtactgccacgtggcactgatgttggccacgtagacatgccacatcaaatgggcaaaaattaagataacatttgccccccaagtgcatgtgcgcgactttccagtttagttgggattgatgtagccttaactagataaatcttgcagcatatttagcctttcaaataatttctcttcactgtttgatcttacttgttgtagtaagttaactgcattgctctttttaggggtgaaaattggtcaattatggtcggtttttacaattttataactgaccggtcggttacagtttttatttttacgaaaatcgtaaccaacggtttagaaattataactgtataaaaccaatcgtatggtttttggcggtttttaggtttggcagttttggatagtttgtggcagttttggatagtttttggcggttttggacagttttgggcagtttttggtagtttttggcggtttattacggttttttacgattttggcaattttttggtttaactattttttaatttcaaaaactgaaaccaaccgccatgtcaaaaaaaaactataactgaaaccgaccgccaaattcgatgatgacatggaactgaaaactcgattacggtctactcggttttgattttttggtttttatgaacacccctagctcttttgcatgcttttaagtaaaaaggtggtcctacagaagctacataagcttatacagggaaaccactcttcactttccacttttcattctctctctagaaaaaaaacaacttttgaaagctcctccttctctctagaggtcgacgccccacattgtttcaactctcgagatttttgcgccatttcgacaatccaagcttcccattcccttcaccaaaggtttcttgtagtgggtaagctttctattctcactatttgcttattttagttgatttttccatggttgcatgaagcttttcttcactttgaatgttttttgattcccacattagattataatctttttggtattttgatctgcatgatagtcttaagatgtataatgtgtgatttcttgacaaaaaatatcttattttgaccttcattgtgattcttggctctttgagtcatgaagtagaggtgttcatcaaaccgcccgcaccgcactgcactgtaaaaaatgttgtttaaaattctttgtggtgcagtgcgatttgcagttttgaattgttaatatgcggttcaaactgcaccacaccgcatcacaccgcatattataaaaataccaa

SEQ ID NO: 146197 - DNA, 611 bp, Cannabis sativa
gggtttgggtccaagttcaggttcttattcggatccctatcaaggtctgagtctatgtttgggatcgaatcccaaatttaggtccaactcctggtatcggtcctggtcttgctacacgactgtctctgagcccgagttccagtcttagtttgggtctagggctaggtccgagtttggttctaggtctgggtctgggtcttcgtcacggtccaagtcttgttccaaggtcctggtccgacagttcttgtttaggttccaattttgggtttcaggtcttggtctgggtcagggtttgggtcttggtctgggttcaggtcctagtctgagtcctcgatgcaaacagcgactaaaggtctgttccaagccacatttctaggatctcaagtcgagacttggatccctatcacgagtcctagtctggttctagttctagttcaggtcttaggtcataggtctgatttttggttcaggatagagactgtggtgcggttctaggtcccgacccctattttgtgccccgagtctggttccatgttttggtaggagtttggttgcgggtttgggtcccgagtctaggtctggattgggatccaggtatgggtcctagttcg

SEQ ID NO: 146198 - DNA, 716 bp, Cannabis sativa
  modified_base (650)..(662): a, c, t, g, unknown or other
gagtcaaactattcaagataaaactcacttgatttgtctgatctataatagctccatgattcttagcttcctggaagtaactagtcatttggagcagatcacacacatactgatgaggttttatccgtgcattgataaaattcttggccgcctcaaaacgagcttgatctgacgccatcccaaacagttcaattaactggttcatgatatatgtagtcgtgagagtattgggaaactttgttttcaaggtgtcgaccatactagacaacataaagtatcgagctttgttgttagcattctgccaacgctcaaacttttccttgactgccttggtcgcatattcacctggctgcttaggagcctcttcagtcaacacaaacagggcttttcacctatgagagcaatattatgttctcattccgtttaacaaagttagctccagagagcttgttgtcattcaacaatgacaccatggggttgttcatagtcatattgggtactacaaatatcaataaatagaaatcaaataatgtttaatacaaaatcatacacattcataaattattagcacttatcaagtaggaataacaagtgaaaatacaaaaacaaacaacccaaagtaatttgtaaggtttccaacaaactgatannnnnnnnnnnnnaggcgagagtcaaagatatcatccgttgaatagagcagtcagctcatctaaaat

SEQ ID NO: 146199 - DNA, 544 bp, Cannabis sativa
ttattattattattaatttttgattgtatatataattatagggagcttctgaggcatcactttattgtacaggtattttcttttataatttaaaaaattatattttatttttctttatttgatgttatatattgtagttgtaatggatattttgtctgtttttaaaaaaatttaaatactttacgatatcaaaagtaaagtttaaaatagtttgttacacacgtgtaaaataaaacagacatgcgtgcagcaaaattcatatataactaaatgtttaaattctattttcagcactctaaattatttcaaattttttaaaaatatatatgcctacaatatcacatacaaaaattaatttatattttctctatatatagaaatagataatgtccctacaataaaaataaaaatgatactttcacaaaagaatttcttaaaattttaatcacaacaaaaaattgttgccaaaaattccttctgccaaagtgagtattagagttagtcccacattgctaatgtgttgaaataaattgtgatatataag

SEQ ID NO: 146200 - DNA, 686 bp, Cannabis sativa
tttcttttcatgaaatatttaatccttctattttaacattaactcataaaattgagcatttataaaaagtaacaataattaaagaaaataatataataatcatttacaattgatatatctaataatatcatgtagaagactatattttacctccactctagggtcaaatataaatgtttgtttttattaattatttatatatttgtttttaaaaaataaataataaatatgttaggtaatgtttaaaattgaaaatgtataatatttttaaggcaaaatatataaatttaaattatcataaaattatattttaattatttaaaattatattatttttaatatttggagaaaattatgtcattatcagattatataaacttttgatttaattcaataagttgacaaaaaatagttcatttggttgcttgataattagtttcatacaattatttatcttattaatttatataaaaaaatattatttgtgaatgatgtataaaatataaactttcattgatgattactctagatatgatcacatttaccttatgcataagaaatctgaaaggtttgaaaagttttagaaatttctagtgttggctcaaaattaattgggtaaaaccttaaagatcttgcgaactgatatgggtggagaatatatgggtatgcagttcaaagatcattta

SEQ ID NO: 146201 - DNA, 753 bp, Cannabis sativa
gtagccctccattcaacaggtttatagtcagatgctttccttacctaatttgaagatgaagatgtattgggcaagaccaagttgaagatggtgtcaattgaattttttgtttcttgaggctgttattttttttttttatgaaatgtagaatatggccactgtcttttttgaattggggctcatttttttattgtatgatttgctcataattcgttatgaatttttttttttttttaaattaattgcaatttttttatgttgattttttattaaatttatagttaaactaaattatattaattcataattaatatctatggttaattaaaatattatgaaattataattaattaaattattattgtaaattttataatatagaagttgaaattagaaaattaaatattaatattttttattgaaaaaaccaggatatagtgacacactttgagtgtggttgttatcataaaaataattaaaataagtaaataaagtgatatagtgacgcgttgtttgtgtagctattacttttacagtctaacaaggtgtgactctaaaagattatagttacgcacgatgagcaactctaaaagggtttagtgacacacactgaagtgtcactaaatagtatttttccagtcacccacattagtgacacgcagtgaagtgtcactaaaacattttacagtctctcaatgtgggtcactgaagcccatttttgtagtagtgggtagcggttgattactttactaa

SEQ ID NO: 146202 - DNA, 709 bp, Cannabis sativa
gaatcaaacttaaatactttaaccttccggaaaagaaatccctaaaaattctatatatatttgacataattaaacctaattagtctaaatttaaaattaaacttaattaagtctaatatcttatttattatataaatgtctatataatatttatattatatttaacaatgtttgttacatcttgataaataattttttaataatcaatatcaatcaatcaatatatataaaggagtgttttatagagtttgatgtggcaacttcaatgaatttctttcccaatttttaattttctcaatttttctttcatttcaataattaaaaatttaattatcccatttaactattaattaataactaattaaggattaaaaattaaaaaattattgatgaatgtttataaattttttctatttcttttaactaattaaaaaaactcttccactccccataatccattaatttccatcaaatatcttttaggcttctattttgtaactcctaattatctcaatatttaaagatgaagaagattattcatttcttaaaaagactctcaaattttatatatatctatttcactaaagtattttcctatgtttcattttctacaagaagccaatgtgcaagacaaaaactatgatttctttatataaacaagacaataagacaatgaaagtcttttacaggtatttttatttgttcttat

SEQ ID NO: 146203 - DNA, 1030 bp, Cannabis sativa
taatttatgtaatataatatatacacttttattaaaaaatatataaatcggtttaattcggtttattcgggttaattgggcagtttaaaataatttgtaaacaactcaatctattcattggacggtttagattttcattgtattatttcagattgtatttttgtcagtttattcggtttggtttgggcagtttattcgggttgggcggtttgcaaattttattgtacactcttagttgtttcatccccaaaaggacctgtttccctgattttcatgaagaataagaagatgcaaaagtcaaattgtcgatctgatacttagaagacgcccagattgatgaattgtcaacctggacgctagggtgctttgggccccgaggcctcgggtgctcaaaaatgaactttctccaattttgattgtaatgccttaaatatgtttatggtatgtctatttgttgtcccaatgcaaagtttgacccatttccactaagaatgtttcataaaattgaaaccctagttgggaatgtcaacctaggcaccgggtgaaaccctaagtgcccaagttggcttccaaagtgcacgttcatttaatttcaactcttaaggccttgatttgattgctctatgtcttcatggtacaaaatactaaaagattgtgagttggaaatgagttatcaaagtccaagcttccatctcagagtttttaaagtcaatctcagcatagggctaaggacccctcccaggtcaacttgatatggattgggactactcaactttgagatgtaatctctcttgccacgtgtcaaacattgatgtccatatcatcaggggtactttttgtgtaaacatttaccccctaagtcaactttacacttttgtgaggttaacttaatgacgtgaaccaagcccatttctctaaaaactataggtgagcctcagttttgacaatcttagacaattgtttctattcttcaagaaatcccactgagattaggattttgaatccccattccctgttgaatagtggaatt

SEQ ID NO: 146204 - DNA, 510 bp, Cannabis sativa
tttgaatgtttttcttattgattagggaataaatgttgtttattgatagatttagggtttggtatgtgtgttttagattagatctagggttagatattgcatctgtaattttcgggagagaaaatgcatttttaggcaggcccgatgtatcgtgatgctaagttagttctagggttgaagacaaaagcccaatatagggcccgatggtcagtctaattgtctgaccaacttccaaaagttttaacttggcctgatatagggtacgatggtgcctgattattatttagaattttagtttttttgttatggcctgatgtgggcccgatagggtacgatatttaggcccaatgtgttttctctttcataattttaggtttgggtctgataggcccgacatagggcccaatggtaatttgaattttaatattttattgtggctggatattggcctgatgtagggtacgatgtttggtccgatgtttaatctctttcataatttttggtgagggt

SEQ ID NO: 146205 - DNA, 1250 bp, Cannabis sativa
aatatattatgtttgaaattatgtcttaattatgtgagtgtgtgaagataatttgggtacaatactcataaaaagaggtatatttgaattaaatttaatttaagagtaaatttggttaatatataaaaaaaagagtatttttctaacatctcccaataaatttagtaattggtggctaaaactccattttgagacattgtaaaaatgaagggaattttttttttgtcatttttacagtcacatttttttttttcatttttattgtactaagtttttaaaaatactgtgttaaacttttaaaattataaaaatactatatttcagtaaaataaaaaaataattaaaacatcttaaaaaacaattctagatgaacaacataacaaacaatatgaaacgacaaaaaataactacaaaacaacataaaaataacaaaaattaagataatttcaatatgcaaaataatatcaactcctcaatatatttttgtattacaattttatttacttaattttgatagattgatttatctctttgtactactatttttttcatggaatttgttgttacaacttcatacttttattttttattttattttttgagttagtgatagttaaaacgataatttattttttaaaagttaaatataaataattacattaataataaaaataataaaatcttatgatttcaaaatagggtatataatacaatgagtaatatataattaatatattaatatcaactactgcacattgtgtcaattaaaaaaaacaaaaaatctcattattgtattttaataacatgtgtcaaaaaataaactaaatatgtgtatctaaactacaaaataacacacatacaaccaagaaaaattatcaggaagaaattaaaaacatacaccataaaaaatacacttgaataataaaataactattgaaaaaaaaaatattttgaaaattacttaaaataaaataaaaacaacaaaataaattcacacatattcaacaaaaaaattatgtggaataaactgacaatatacatcataaaaatacacataaactaaacaacaactgtaaaaaaatgcataaaaacaacaagaaaaatagctataaaataattataaatcaatagaaaaataacaagacatcaaccttgttaaaatatgaaaattattcataaatcaactccgaatcaactataaaacataaaaaagaaaactatacttttattaatcatgtgaaagagagaaa

SEQ ID NO: 146206 - DNA, 840 bp, Cannabis sativa
  modified_base (332)..(332): a, c, t, g, unknown or other
gaagccaagcccacaacagtcactttacagatggcagatcgttctttgactcatcctcggggtataattgaagatattttggtaaaggttggtaagttcatcttccctcatgatttcttaatacttaacatggaggaagatgagaatattcctatcattttggggagaccattcctagcaacggggagagcattaatagatgtgtagaagggggagttaaagttaggtgttcaaaaataagaagagactttcaaggtatttaccgcaactgaaattcctacttgttgtcgagtggaagttgtaaaggatggtcgagaagtaactaccaacangaagaaagggaagtctaaagaacgctttcgaacttttcgacgacatatgaaatgactgttgtgtgggaattatgaaggtgactctcaatctaaggaaagctttaaaaattgcaacgttggaggccatttttcttcgtttggcacaaaggccctcatggatgcaagaggtggattctactcgccaccactaccaccgccatactaacatggcgctcaggtaagctcccttccctttagttttaaatgtcacatcgaggacaatgtgtcactttagtttggggggtgaacttaaattttaaatttttaacttaagttttttttatttttagttctaaaattaattttttatgtgagttaatttgcttaatatgagttaatttgaaagtaggtagatatcatgatttaaaaaatttatttacttttaaaaatctgtgtgcttggtgatgttatacttgtgactaatttcaatttcatacttaaaagtacatggaatcatattaggtaattt

SEQ ID NO: 146207 - DNA, 598 bp, Cannabis sativa
tgaacaccaaagacagtacaacaggtgtgctcagaccgaattgggaaggaccatatcaagtggttgaagttttaaaatcaggggcatacaaattgggcaagtacgacgaaaagatgcaactcgtttttgtaccaaggtattggaacggggaacatttaagaaaatactaccagtaaaagtaccaggtcggatgaccatatcaagtacaaaataaaagaacatttgctcttaagtgaatgaccttctgggcggaccacacccaaaggttcggataaaattatcaagtactcaggtcggatgaccacctttgaaagtacaatttttattttctgcaatttgttttgtttatgctaagctaaagattagatcagatctgcataacagctttgatgtaagttactacggtaacagacatatttccgaccaataaatgaataaagatgtttatttaaattcaaattgagtcgagttcattagcatattataaatttaccatccagtgtatacaaaaggtctgggcgtacccaaaaccctgaacatacaaaaaagcatacttgtgaaaaaacaagtgacaaagagtcaaaagtctgctcggtca

SEQ ID NO: 146208 - DNA, 528 bp, Cannabis sativa
tattaatgattagttatggattcttagtaaccatttaaacttaagggttgttgtaaatcacaatcaatttaatacttgaggtagaagtttaaaaattatgaatgatctttctcaaaaattatgttcctggatcgatcactctcattgatcaagtcaattcttaatttcacaattctagtgttgtaagatggataaaaaatatgtaacccttaaaccttgtagaatttctgatgaaatgcttatttattgtattttggctcaattctatcctttgacaattgtactctgactgtgtacatgtatttttaaaatgtgtacatgtcataaattcagtttctaaccttattacaactcaaaatatgtttgagaaagaacattggttaggacacaattcgatacgcacactaccgttgaagagtgtcaaccgacaaagatttaagaaagtttggagttttttatgcaggctctgttaggcttaaattagtctaactttcgggtcatatttcggttagttttcactctttgttt

SEQ ID NO: 146209 - DNA, 516 bp, Cannabis sativa
aaggcttctgctgctgccaaaggcaagcagcctatggaagagccttcttctggtaatgttccttcaactctttctcactgccgtcgatattattatcgtgataatgaacgtgactggaatttatatgcaactcgtaattttgaaagtgagaggaactatgatttgcatgctcatcgggtttatgggattgtaaagtttattcaatttcatcaatgggaaaacactctcagtgttttcaatgggttcattgcaaacattgttaaggatttctatgctaatctcactgatgattttcttgatgagaattctagactttatcgaagagtatatgttagaggccattggttctctttttctgaaaaggacattgcacaagctttgcaattgcccgagaatgtctccattgcaatgatgtctatggatcgtgaattgatgctctctgaactcacgggtgcacgatctgaattgaaactaggggagagtcttcgaatcactcatctcacatttgctcatgca

SEQ ID NO: 146210 - DNA, 981 bp, Cannabis sativa
  modified_base (56)..(59): a, c, t, g, unknown or other
ttgttttagaactcatattaggtttttaataaaactacatggtagtaaatctagannnnggtaaaatatttccaacagtggaggtggtggtggctggtatggctgccacggttgaggttgcaagaaatggtcagcatcatcggggttcattgtccacacgagaaagcagaatttaactcctgaactttcctttgagcaaaatgatgttgctgatgaagatatgcattgtagtacacagcttgtgtttggtgagcctgaacaaggtactggttagactgaaccagataatgattttgcctgatgaggtgatgcagtctatcattaatgtcctgggtgtgggagtccaatggtggctcaggctggagcataggtgccactggtgcactggtgctagcgtctgctgggtcctcctcctcgacatcagcatcacccttctagcgttttcgcgtgtcttctggcggctctaatgatgcaagcggaaagtcatagtacatctggcaagagatggtctgcatgggtgcttttaagatgtctcagggacaccctgttgcgagcatattgcgataattagggcactgtgtaccggacccgctgttgtcttcatctcagagaaatggttgatgtttctcaagatgacccagccaatgtcgaatgtcattctggccatgatagcataaactatgacgcattgctcatagtcttaggatgaagtgtgtgacgtcggcattattctggcgttgacaaaatatgtccaggccctaacttctgggttaagttgccaccggtaaaggaacttttggttctggttcccttcaacatggaatcgagtgccctcctgccccaactcttgggcaattgcatcatcagcgaggacccctctgaaaatagagaagagaagaatgctaaaaaccctgagaagtatgcctccaatattgcagctgatctctccactttgcatctgaattctctctttttctctct

SEQ ID NO: 146211 - DNA, 641 bp, Cannabis sativa
  modified_base (90)..(107): a, c, t, g, unknown or other
acttttgttttctgtttttaaattgaaaaacaaaagtggttacagaaagcatttttgtttttcaaaaataaaatttttaaaaacaaaaannnnnnnnnnnnnnnnnnattaaaaaattaaaaaacaaaatttttaccaaatggaacctatattaaagcctaaattgtgtggatttgtacagaaaataatagcagtaaagaaaaaataaagaacacaaagcttttttacgtagttttgcagttaaaattctgcatagtccacgagtatatcttattaaatatttctaataccattctaggcttatactgttaaagattttccgtccctttctcattgttccctccttatttatagttacataggaaggcaattaattataaatcagactgatatcctacaataataatcccttgaaattgtgggatttgattacgtcccacataaaataaattattatttgaaaatcacacagctgtgattggtctgcttttactgggtcaatgcatacgtgaattaaatacattgtaaagcatatcgctctgggacatctcgctgagaacataacaataataaccctagtagcgagctagagcttttcccatgtctttctgaggtttataatgtaaatctcgtcgtttctg

SEQ ID NO: 146212 - DNA, 841 bp, Cannabis sativa
taattttaataatgtaagtaaacaaatgtaagagaatgattatcttaccattgattcccattacttcttatcttacatatattaaaagagccaatatcactactattcatgaaaaggtcaaccaaaacggttcgtttagtaaaattataaattttactcctttcatgtacttcttgtatatatattatataaaatatcaataaaaaattaaataataaaaaagatactgccaactttttcttgactatcctatttcatccattccaccttttatctattttttttctttcaatttatttttaaatttatattgttgaagaaatcaacattttagctcttttttttagttgtacttttttttttctttttcgttttttttttctcacaatctaagatatatataatttttttgtcttttttttttcttcttcaattaacattttatagttttttttaaagctattataaaattatacaatacatttcctttaaaaaaaagtatattaatatacttttatttatttcagtatttgagagatttttttcattcaatttttttaataatcatatacgttgtatttatttaaaatattttatagtttttttttttaatattttaaagcagttttttttttctcaatccaaattcacatagcaacccaaatagtaactattggagcaaccaccagaacaacctaaaccgtaaaaataatttaacaaaagttaaaaaatcgtatatggggtgattttctaaaaataaactaaagatgaataattaatgttaataataaggttaaataacattttgaaccatgtattttatgttttgttaaatgataaa

SEQ ID NO: 146213 - DNA, 560 bp, Cannabis sativa
  modified_base (28)..(35): a, c, t, g, unknown or other
cataattaaacataaacaactgctaatnnnnnnnntaactaagcgggctttacagaggaggatcagtcgatgtagaggcagttgggggtgacaaagctgtgatgtctgtaggagtatgggtcacggtagggactgtagtggagtgaggtgtaataatagtggttgaagactgtcctacagtagtaggacatggtggtacagtagtgatattgacaggacaaagcacgggttgagggggagcaacagtggcatttctgagtatagtagggactgtttgattggttatagagggtactgttggaccaaaggctgaactgttggtaggtacgggtatttgactagtagacagaggagtagtgggtggattttgagatgcaaaggcagctttagcataaggaaaaattgtttcatcaaataatacatcacgtgagatatagaccctacctattttagataagcatttgtaccctttgtgagacaaactatatccaagaaagacacatggggtggatctaaaatttaatttgactttgttatagggcctaaggttgggataacac

SEQ ID NO: 146214 - DNA, 519 bp, Cannabis sativa
cttttttattttccttttagtacattagggtatgattttgaggccatagatttatttattttttgcagctggagttcctaatataagcatggttgagggtgtgcacagtgagaagtccctactgggcatagattagcacttggaactttgagtttgaaaaaatattaaatatataggtaagtacgacccattctcctttctcctctttttaaagtcccaaaataactaaaataatatcccaccgaactccacttaaaaattaaaattaccttttatattattatataaatataaatttaattataatcaagggtctcgtggatattagtaaataatttacgatgttattattaatgagagtctcgtgggtgtgtgagtgtgtgggagatgtatagcgggatgggttgaaatccccatcataatatttgaatagcaatgtgtatattataggtttatatacacaattatgacattcttaaaaattagttatataaaacatatcgtttataaaataattta

SEQ ID NO: 146215 - DNA, 1061 bp, Cannabis sativa
aattgatgtgttttggaaggtaaaacatatgtatacaatctcttttataatattataagtttttttttaaaaaaaaaaatgtaacaagtaatttgatattgtaattttttttttataatgtatatgttgatatgttttgtataatttttttttttgcttgtctatttttttacatgagaatatcgttgttatttgtatcttttattgttttttttttatttgttttatgtgagaatcacatgcattcttttgttatttttttctttcaattttattgtattaagaagcaccctgtatattaatatatgatttgcatgtttatatgtcatcctttttaaaaaaaatatatatatatattattattatatatctttttcaattaaaactcaaatgttgcttcatatactttaatactatttatttttaattaataaataaaataaatataaacaaaaggcttaaatcaaaattattgaaatagatataataattattaattgttaaatgtatcaattataaaattttgtattattattattattattatacatcaatctatatatttatttagataattgaaaattaaggtgatatatagttaaggaataaagaagtgaaaaatgacattttctataactttttgttattattatttttctttctattattcattatattataattttttcaatttatttttttaattatcatagtataattatatatacttattcaaattccaactcgaattccaatagtttcattttagtttcactattactattattatcactattattattattttttctcatataaaatataaattaaaatgaaagtacatagtaatttctaaactaattttatttgagagagaaatacatagtaatttctaaactaattttattagtatcaatcaatctatctatataatgttgatgattcggtgagattacctatgtcaaaaagagagagaggtgagaagaggtttaattttgattttttctaattcgtgtgtttttttttttttttttttgtatttaaaaataatgaggataaaa

SEQ ID NO: 146216 - DNA, 1263 bp, Cannabis sativa
acttgcgtgagatactacttgatacgtacacttgcgtaataaacagaattttcgtaacattaattagacccacaaagtgtattaattaacaaagaaactcctatttctctttttttttttcctcaaaattatccaaacttggtgaaaattctcaaataagacagtccattgtcgaattttgattgacttattaaatcaattaattaagtctacaagatgatattatcccagacaatgtgagggccatgggtctatgtaaccaagctcctaataaatagatctgaaatttatcaagtaaattttctatcttattaattcctcatgaccccactataacttttgaattacactattgattacatagaatgatctatataccaaatatagatacgctatgaattatctattttttcaatcacaataatcattgatcatctatacatggtttacattgagtagagataaaattatcgttttacccttcaatatattttatctttaaaacacttgactacttgtaaatgatatctcaagaaactaatataattaccgaaatgaggcccttattatttatcgcgttaagtcaagctctaagaaaactatcatttcacttctaatagcatagaagctatagatgtccatatttatgattaacactcccactcaattgtactactgagtttccaagatgtaagtattaagctggttccacggtaagctggttacgaacaagtcacagaactcgtgcaatacatttaagccagagtttaaccatctcaggattgagatcaaatgatctatgctcaactaagtaatattaacttcaaaagatatataactgtaagttttataatatcttttccattgttaatattaaggctgttcatataaaccgggaaactgcggtttaaatccggaccactacaatccgaaccattataaatcgtaactggggaaaccgttttttgtggtttggtcaatccggaccgtttaagtcgtaatggttcggttgtggttcgtaataaataattaacggttaaactggactggatcgtttataataaataattaatttacatatttttttatatatgactatatgtatgatttagaacttttttgtgtgtcaagttttttattgcatgaattttagattttgatgttatgtacttatgtttgacttttgagaatgtttttatatcattatttatatcttatagatctattacttatcatgttaaatatatattttgaaaaataaaa

SEQ ID NO: 146217 - DNA, 1006 bp, Cannabis sativa
tcctttccattccattccatttcattacctccaaccaaatgtcacctaaatgtttgagtctacccacttccctctttcaataattatttttaagaacataatttctttttctcattcttgtatggtatattttttagttgctagtttatttttaattaagtatatatctttttgttattgcgcactaaattgaataaattcttaattattttattaaactatataaatgttaatttatatatgattgatcttcaattattggttagttgatgttttatgtgtaattgtcattatgtatagatttactatattttcttatacttattttaaaatacagttataagttttttgatgttgttttgcttttttattttttttttatagtttatttactattgagctctagttaatttgcatattgcagtggagttgatatatcttgttatttttctattgcttttcgatgttatttttttggttgttttataattttatttttggatgatttacatattaccgtgtgtttgatgtcatgttgttttcctattattttttgtttagttgttttaccatatttttattttgtaataaaaaagtcgtacttttgtaattttaaaattttaaaatgcattttttaaaattaaatttataaactgaaaataaaaagtttaatttataaaattataaataaaacataaaagaatataattataaaaaaaaatcccttaaaataatgtttctatgtgattgtttattatattacggtgcatttgtaacacctttataattaattttctgtgttttattagaaaaatgaaaatatttttttaatacatgttctataaaattgttttatctttttaattttttaattaaaaatcaaaatttaatcttatgaaaaaaatcactctcaaattttttttaaataattttctttcttaatcaatattttaaactccgatcccaacttcgactttgcaactcttattgggttttgtgccctaaa

SEQ ID NO: 146218 - DNA, 602 bp, Cannabis sativa
  modified_base (242)..(247): a, c, t, g, unknown or other
ttttgataaaaaaatttaaataactataaaaaattgagagttctttcctacaatatatattggctcaaagaatcaagttataaagtaattacctagctgctaaagttatatatataaatatataggcaagactatggtagtaaaattattttttaaaaataaataccaatataaaaattaattttataaaaaaataataataattcaaaaataaaaattattttaattattaatattatttnnnnnnttaaaaaataaatattattataatatgtataaagttttaattgtatacaaacagtcctatcgtaaaagtataaaccttacatcataataacaacatgatctaaaattaatggtcaaaaaaagctccctaccggtagaaaactttcgctaggtcctaccatagttaccatagtcttgccctatatttgccctatatttatatatatatatatatatatattatgaaaattatttttcatatttaaagtactttttttgatatagtaaatattttagagataattttgtaactttattagttttgattttttgttattagtatgtatttaaagtttttatttaaagtgaagagaatg

SEQ ID NO: 146219 - DNA, 631 bp, Cannabis sativa
ataaagattataaaagttaaacaacaccgcgcgaagcgcggcttagttacctagtatatatataagaaggttttaaagagttgatgtggcatgcataaccttcttacttttcctaatacctatttttttatttttctaatttcttttaaaaaaatttagtatgtaagtaataactaatactattaatacacttactaattaaaagaaatcaaatcaaagtcttataatattctaaattaattattaccatgtatactaaattaaaaaaaatcattaaaaaaattaaactaaagactaatagtattctaaaataattatttaccacttacataatagtttatatatttatataattgtgttgttataatagatgacatgacattttctataagctttccttctacttttctactctctcaatttttttttacatttttaaatttttgttaatttttagtattatttaattaaagaaatttagtgatttttcattcttgaaaaaaaaaaacctcccattaaaaaaataaatttcttgacctctttcatttcacatttcacatggctatatgtatgggtagtttttcctaatctctctattctcattttttctcatttaattgatcttttacaa

SEQ ID NO: 146220 - DNA, 731 bp, Cannabis sativa
ttcagtgagaatttttaacggccaaaaaagttcagggggcatgatttggcatatgtcaaagtttgggggcaaaaattgctatattgcctaatttttatattatatattaatattaagaggaattacaaaatatattaattttttattttttttttaaaatttagggtttgggtttctaaaatggttgcagtgctagttgcagtaggggtttccgtacgatttttattgaatttagattgcaacgctagttgcaatggggatttctatgcttaattccgtaaaactacaaaaaaaaattattttgaagtgtaaaaatgaaaaaacccttaatattaatgtaattaacttatataattaatttaatatttttaaaaagagaaatgttaaagggcactagtagtgcctaatacccttctacgtgtcaatatcgttattggtccaattacaaatcgagtcctatataatttaatatattagtttttagaaagtatcgttaatcaatcacaacacgacatgtcgagaacgtattaggcaccactattgcttaatagcaatactcttttacaaaatataactagtaaatgggaaccccgccacttatagtaggtaccgatagtagtcaatatcaatgcactcacttatatattaatatggttgactaaacaatattgtatatgggtggcaaagtttgactaagttaagtatacactatatatgactgaaatactaat

SEQ ID NO: 146221 - DNA, 954 bp, Cannabis sativa
  modified_base (741)..(741): a, c, t, g, unknown or other
ttttttttttttttaattatgatgctaaacatacacttagttttttgatccccaaatccaagccaataaatccttaccttacctttgctaaaacctcttcttgctctaacacctcatctaagaatagtttcataatgttttatatcagcagccatttacacacttattactacgtagtgttgtaagtttgtatgtgtcgtactggcccgaccagtatttatccatatttttcaaaaaacggactgtgtcgtgctgtgttatagaaaaatatggatcatgctttgctcggtaggcctggcacggcctgtaggcccgatatttttatgccatgctcggattcgtatcgttctttgctcgtgttggcccatatttcttaaacgggccaacctattttcatatctagatttaaatttgtgttttactttttcatattttttttataattactaaattatatgtatatttcaaagctttaattatatttatataacttttaaataatattttacaaataattatataaaaaaattattattatcattagaatttgaaaatttacttataagtacttaaatttttatatcacactctataaataaattaatatataatctcaatttttcatgttttaatagtttcaattataaaattatactatttagattttattattattttaatttatttataattaataaattcatatcttattattattaataatagggtaaatagcggcanaagtacctaaagttttgagtttgtaagcgccataaacccaatgattttttttagtggcataagtacctaatgtttgtaaaactttaatttttctctattttcgtactccgttataaatttattaaaaaaagatttggaagtaactgatactacatatttttcgtccagaccaaataatctaaaatttgggtcttatatgtgtcctgtttaaga

SEQ ID NO: 146222 - DNA, 620 bp, Cannabis sativa
atcccagacccaaaccaatcccctaacctaaattttgattcagaccatgacatggacacgaacctagacttggacccgaataccgacccagacccagatccagaacgggatcgaaacacgagacctggaccctgtcctagccgcagatccagacccgaacctaggacccagacccgaacttgggacccagacccaggacccgaacctggacccagatcgggattcgaaaaacccatacccaaactcaaactatgactcggaccccagccgcaacctagacccagacacggacctagaaccaaaccaaaactcggaattagaactggaactgtgactaggacccatacctgagaccaaccgaacccaaaccataacccaaactcataccagaaccttggtcgagaccttgactacgactgggacttgagacttgggacacgaacctagactagcacccgaaccgtgaccttgacctgacatggtcctaaacccgcactgagaccttagacccgcgacccagacaaggatccagaccctgaaaaggacccaaacctgaacccgaaccaagactaggaccgagacctggaccggaacccagactgggatctggactaaaacca

SEQ ID NO: 146223 - DNA, 747 bp, Cannabis sativa
  modified_base (626)..(650): a, c, t, g, unknown or other
  modified_base (699)..(704): a, c, t, g, unknown or other
ctctttctctaaggcctcgacctttactgaatcgagggggcgtcgcttttgctagaccggtggcatgtctaggttgacgttgaggacgtgggtgatgacgtgcagacttatgccagtcatatcctcttggcgccatgcaaaaatctctaaggcgcccttcagtatttttattattttttctttttcctccgaatctaggctctttcctagccggagtaccttggtggagtcgaggtcgcacactgttatctcctcgacatcctccatcggttgtacaattttctcgaaccccacttggggatccaactcatattcttcagccatttctggctcaatggtttcccggaccatcagtacgggcaggtgggttgcaacgttgtaacattgcctcgcctccccctgatttcctctcacctccctatttcaacttcctgggttgggaactttaagcacaagtgtcgtatggatgtgactgtgctgaaatctaccagggccggtcggccaaggatcgcgttgtaagcggttgggcagtctaccaccacaaaaatgcagtacttgaacgtgctttggggggtatccgggcaaaaggtgacgggaagtctcacttgttgggttttatgccctannnnnnnnnnnnnnnnnnnnnnnnnatttacttattaataaagatcagagataacattttatgttgcatggttnnnnnnatttatttcatgattatatatttaatgtatgaattctatttaa

SEQ ID NO: 146224 - DNA, 643 bp, Cannabis sativa
taaagtgtcctgagaacttacatgaagtttgaagactgggggttggtgttgatcgtcggtaaagggaagactggcaacgtcgaaggaaaagaagcagataatcaatggtgtctgaaatttttcctctctatgggagctctaagaaaatttggtaaaatggtgaaagtaaccaaatgaagtgagaaggctggcttttataggccagaacgggtgtgagacagctgtgatcaaccatcatcgtaggtcagaatatcaattgattcgcattctacagatccaacggttgggacaagcgttcatcaaggtggtaggaaacgtttgagtactcgactgacacccgtttaatgcaccgtattaattaaatggataggaaacgactcgttgcttgcaaatatcaaataactatagtaatgatggtcataaatgcatccccacgcgcccaaagtacatgctaggaagttaataagacaaccggaggcacctaagcaagcctcatttactttccaccaaacaagacttggggggtaaatgtttcccttattttgtccaaaatacgtggaccaatccaactgtgacacgtggatggaagaagtaagactttgagataattcgactaagtcttcttaatcaaaaggatcaacaa

SEQ ID NO: 146225 - DNA, 565 bp, Cannabis sativa
  modified_base (349)..(350): a, c, t, g, unknown or other
taataccactttattacattttaacttatatattacattttttaattttttttaattaaatatttttctaattatttattatttcaattgaaaatatatttttttttttaaaaaaaaattacttcactaaatttttaaattacatgttccaatttcaattttatgttttactttatttattttattttatcaacaattaatttattaagttattcttaatttttatttaaacaattaattaatttcacattttctctactaaaatttcggcagcataacggcttaaaaattgtaaacccaaaattttcaaaacctataaacaacacaaacaaatatttcacgacaatanntaaacaaaaaaataatccacccatccaacagcagtcaattttattacagaacctacttcactaacatgcatatacatataaactaatataaaaaactactacatactaagcgaaagtaaaaaaaacatacttgaatcgagtgcaaaaataacaacttgtggcagcttgcggtaatcccgagcggttgaacacggacctaattccataaaaaagta

SEQ ID NO: 146226 - DNA, 500 bp, Cannabis sativa
tccatcaactatacccatataggatcaaagcaattttcgtcatctcaatcacgactaaacccatcaatggtcacatatacaaatataatcaaatggcatcgatcaataatgaatgcatatcatggaaattacaaattacatttactgtgaaccaaacatgcctatttccaactggtcctccttaaaccaaagtgaggtcagacttaaacataacaaaacagagtgaatgagctgaaaactttattttttaattagaaaataaccaaatacataaatgtcttaaacaaacataaagcaaagaaaatacaaactcccactaaatcatagtatcctcaagtaatactacatccacatgagcagtgtgcccatgaaagatcttgcatgataatccttttgtgagcgtattcgctatcatggagtttgtctcaatgtactctatggatatctgtccactctgcactttctttcacaactaggaactttatgtcaatatgctttga

SEQ ID NO: 146227 - DNA, 701 bp, Cannabis sativa
tcacacacttcttggaaaaactttttagaaggtcacccatcttgaaattaccccaggtcaagcacgcttaaccgtagagttctttcgtaatgggctaccaaaaatcaagatgtaccttgttgatataggtagtaccaatcaatccatttaagccctcttcaattgtgtagtcccatacctaaacagtctcagaatcatcccacttgaccttccccaggctgtgtgggattgcacagcttacctggtatttccctttatggatcacgggactaatgactgtcataagatccgaggtccgagttcagggtctgagtttgggtttgaggttcgagtccaaggtctgggtttgagttcgagtccaggtctaggtccaggatgtgggtccgggtatgtaagcaaaaatataaaaaagaatatgttagacaaaaaaaaaaataaaaaaatatttttgaaaaaaaaacacaacattttgatattttctaattttttaaaactcaatttttagaaaattgtttttaaaaaatttggccaaacgtccccattattttttaaaatatattttctatttataaaatcttaaacaattttttaattaagagcatctctgatggtaatattttggagaatgcttgatgaggtggaaagcttaggtagcaaaatataagaatgctataccatctatatctatatataatataaag

SEQ ID NO: 146228 - DNA, 539 bp, Cannabis sativa
gggtaattaagtttttatgccatatatatcaaaacatatattcattttcccatatttttgtaaatagccctaaccaatcttctcatctactattaatagtagaaattacataagaaattttgcattgtttactttttttttatggcataattaaaggagtttttacaccacatactaaatttataacttttttacttttttattgtatggtagaatttttttcaaaaatactatgtattgtgttaaattttcacggttgttttttagttgttctactgttgttttaattgttttgttttgttgttttacgattattttataaaaaatagtatttttgtaaaaatagtgtgaccgtaaaattataaatttttacccaaaatctctagtatttttataaaaacttcataattaaataatgtttatgggctgcaaatagggctgctcattgtcttgcaaggcaatcctgttttatgtcagattgtatgtttgatgagttctctgctccatcaaatttgatttcaattgtaagggatgatctt

SEQ ID NO: 146229 - DNA, 743 bp, Cannabis sativa
  modified_base (671)..(674): a, c, t, g, unknown or other
tctctctctctctctctctaccccgatttagggttttccataaattcttttgcaatcttgttgatttttctttgtataaatgtccctatttgagtattattatgttctttgtttttagatctaagaaaagataatagttgtgggaaaataaatttagggtttttagatttaaattgggactgagattttgtgtatttatgtgtttgtttgttggatttgaatttggtttaagcttagtttgagttttgtttattttttttttttttgtgcgaaatggatttaaaaaatagattgtggttgtagtttctatacttgtggctggtggtgtttacggtggttatggatggtggtggtttcggtagtggatggtggtggtaacagtgtatagattgaagaagaaaaatattagagaaatttttttttcagaaaatcgttggaaaatatatatatcttttttattttttttaatataattatttacgtggaccaataaaattgtactacatgtacactgtgtccacgtggacaatctaatctggcagttaacagctaaatttggatggaagttgtaatttgctaacggtattgtaattttgggagttttactgccaaaatttggattttgggggttaattccaagcaaagtaaaatgttatagtgagatttctctnnnntagaaactcgagaccagacccctatttagaggacacgtatactcagatttcccaaagaaagctgagatg

SEQ ID NO: 146230 - DNA, 1047 bp, Cannabis sativa
  modified_base (206)..(210): a, c, t, g, unknown or other
ccgtatatcaaaatgggccttttttggctgggccgtcaacttaagaaaactataacagtttttcttaggattattttacaaatacacaaaaataacataaaaattacaaaaatagggttgtgtagaattttaacatttttatgattttttatgattttctttatagaaattaagatcttttgatatatttttatgttgtactcttnnnnntttgttgttaattttttgttatttgtatattattttttgctgttgttttattgttgttttgatattattttcatgatacttttatgtagttttctttttgttttggtattgtttttatagaatactgtgaaaatgtattaaaaaaaatgaacgtaaaaatgttaaaaatttataaaaaaaaaaatagtgtattatgtaattatttcatactatgatctcatattatttatggaataggttttggttttggtgttcaactaagttttggttttcttattatgatatcatactatttatggaataggttgaagagaagctttgaacaagtatgggtcttcgggagaagacttttctaagtctcatttcgggaggaagtaagcatatatattcgagagaaaatttgtttaagtcttatttcaggaggaagtaagcacacatcaatagctgaaggatttcactacttagtgtgttttaaaaatcagattagcaatgtggattacaaaaagttgtagtaaatcactaaagggagtctaaatttatttaagtcaattgcttttgtaatctttgatactttactaattgattttattctgtggacgtggcccagtcaactagtagtgtttgaaaaaatactaataccacgtataattttcttgtgtcaagtttttaaattatgcactatttatttctagttctgttctaattctgcaaatttgtgttttgtagtgataggattatattttattgttgcagactgttacaattgtgtttatttactgaaatttattataattattggcatttgtaaaaatacagttttttcaattggtatcagag

SEQ ID NO: 146231 - DNA, 588 bp, Cannabis sativa
tgcaatttttctggagtgacagtagaatttggtgtgaatctgaaccaggggctgtttgttgtgattatttaaatgaattggaattttttgtagtgttggaagtgtgggaagcttggacagattggtggtgtgaaacaaattggatattgattagtttacacagggaaagttatcatggccgagtgaaacatggagtatgtgtgtaatgtgtaaaaatctgatttagtgtatggtgtaagaatttggtatgaatgctttgactttttgttggtgcggttcggaaagagtggtgattcttgagcaagattggagtgtggatattttggtgtagtgtcacaattattattgtggtgctagatagttgtaaagaagacaaagcagcgaagaaatttgttgtgttggggtagtgtgcaattgaaaaagaagagaaaatgtcgaatgtcaagagggttgccaacagaaaaaaaaaacataaatcacttcatgaaatccctaaatttcactgcaaggaagccgagacaaagtattacgataaggtggacaatcgggaattttatatggagtgaggattagtggcagatataaagg

SEQ ID NO: 146232 - DNA, 580 bp, Cannabis sativa
tggtgcaaattagttaaccggtttgacaggtcctgtaaaaccggttaaccgaaacagggacaggttttccaaattgttcgattcatcaattcgtgctattttctaagccttggttggtttattccttgataatgagaatattattgtactagttaccaatagcagaaccgttagttaggggttgggtttcccagattagggttttggcatgtcgtttacccgtttatgtgattgtgattagagcatctatccagcacgagattttctgttcaggtcggccaactaacttgagttcagaaacgaggtaagaatagcataaaacatattgtatatatgagaatgtatgtatgtgtgatatataggcatgcttgttgtgattcgtacactaccaacactagtactgtggtggtacaaagtgcattggtatagtgtacaatgtttaaagagtacgttacgatattattagcactagtacagaaaggtacggggtgtgtgtggtatagcacttagtggtactcggggtacgaaacaaaccctaccaacactcgtacagaagtggtacatagtgtatgtggtacaa

SEQ ID NO: 146233 - DNA, 1079 bp, Cannabis sativa
gtagagtcatataaacatcctcatgcaaatctccatggagaaaagcattgttcacatcaagttgatgtaagaaccaccctttaatggcagcaagggctaaaaccaactttactgtgacaagcttggcaacaggagcaaaggtgtcaaaataatctaccccctcttgttggctatatcctttagtagcaagcctagccttgtgcctttcaacagatccatcagcattcagcttttctttataaacccatttgcatcctataacatgctgcccttggggaagaggaactacaacccaagtgtcatttttctccaaagcttcaatctcagaatccatagctttgtcccaaacagggatacattttgcttgttggaaagaagtaggttcttgaatggtggaaatagcaaaagccatggatctgaacttgggagagagcttggaataatcaagcacctggtgcaaaggatatgcagtgactggcatattgtcctgagaaataacataaagattgttaggacaaaaaacagtgataatcattcaaataggatggccttgttgtgtgtctaacagatctgttgggaggcaaagaaaaacaggagaactggtgtgttgagaagagttctgtgatgcagaacttgcaccagaaggtgaaaaatgagaagggacatcaggtacagtagctgattcaggcaaagaaaagaaattctgatattcaatgggcagagagcttgaataaacaaaagggaaaatagtttcatgaaaagtgacatccctagaatgaaatattctatttgtgttaaggtctaaaagcttgtaagctttcataccaatcgggtatcccaagaaaacacaagggacagctctaggagaaaacttagacatagagttaagcaatgtggaagcataggcaaggcaaccaaaagctttcaagtgttcataagctggtttgatggagtttagaacttcaaagggagttctaaatttgagattgggtgtaggagttctattgatcaaataggcagctgtacctacacaatgatcccaataagcaagaggaacataagattgaaagagcaaggcc

SEQ ID NO: 146234 - DNA, 594 bp, Cannabis sativa
aaattaatttttatttatttttttcaattatcagaataaaattaatttttatttatttttttcaataaattaaattagttttagatattagtaggctgtgtattttggaattttgatttatcacaaaaataaccttatggttaattttaaaattttagattattttaataataaaatcagatattacttattttattattaaaatttgaatgatcttattttgatattaaattattttttaagaaaataatctagtttgaatttcaaaatttgctaaccataccatttttttttcaaaaatttgttattttttgaaatattttattaaattaaaattataatatttgataaatgttagttttaacattttatcttataagatattttttttaatttaaattattttttggcaaaaataacatgaaattttgaaaattggttagtttaggtttgaatagaaattttagggtttctaactgttgacctcgcttttagccaacgacagtgagtcttatttagtaagcgaaaagtgatttctaataattgatatataggaaagcaatgtaaaggcacaagaattttatagaggttcag

SEQ ID NO: 146235 - DNA, 559 bp, Cannabis sativa
  modified_base (32)..(41): a, c, t, g, unknown or other
  modified_base (530)..(533): a, c, t, g, unknown or other
attgaatagtcactcatatatatatatatatnnnnnnnnnnatatatatatatatatttttgtgtcgttaaattatataaattttgataggttggtctctaaattttattttatttttgtaaattagtctccaaagtatataagttttggtaatttagttttcaaactttattttttaataagttggtccctaaacttttattttttagtaacattaagtccccacttttagatattaacactgttattgatttttatttattttacatactttaatttattttttttatcaaattcaaataatttaatattgttttagttttaatactttaataaaaaaaaataattatattaatatatatatctttattttttaagtattcatataattaggaactttttatttttacacttcaaaataatttttttttttgcatttttacgggattctacatagaaactcctattgccactaccgctgcaatctaaattgcgacgaaaaatcatatagaaacccctattgcaactannnntgcaaccactttagaaacccaaatcg

SEQ ID NO: 146236 - DNA, 540 bp, Cannabis sativa
  modified_base (470)..(476): a, c, t, g, unknown or other
aatttataaggtaagaaatcgaatatgaatgcacaacaatcttaccataaaaggaaaaattattttgtcaactaacttgccaaaaaaaaactttacatggtttttgcgcaatcaaattataaggttagtttactagtacaccttgtatattgataacttacaattgattacttgtatactattgttatagtgagatttttctcacctagaaactcgagaccagactcctgtttgaaggacacgtgtactcaatttccccaagaaaagctaagatgtcaatgagagactcctcgagtttaaacctcgcctgagctaaactcagcgagatgatgcgaatatgaccaagtctaatcgcattcgcaaggcttgcattatgtaggaccaaaaaacggatttaactcgcatataccacgatatatgcgagtatcctctcgatcctcctggaaaaacatagagatcgatcctctatnnnnnnngttggtcccgatgacccaacagcctcgataaaccgatatagactcgcatgtcttggttctatca

SEQ ID NO: 146237 - DNA, 749 bp, Cannabis sativa
atactataaagataatttttaatttgataagaacttaaattgtaaatagttaaaaatagattaattactgttttttcagttataaataaataagtattggtttctatttttttacatcgcttcacatattgtatctttattcttgaatcccaatcccaatcatcaagaaactcaagttcttaagagaaaattttgatacaaaaattagaagattattccattcaaaattgattttatagatttcggtacgcttccgctaatctataattctattatttaattctcatgaactaattaaagttaaattcaaatttacattattcttatatgtaatatcaaaagtatctctaaattagtttctctgagaatttttaataatattggttctccatgaaattattggttattgttttcttgtttggatgataatgttgcttcatatttatgattatttatatatttattttgaagtgtttcacatatattgaatatatgcgttggttttgttttataggtaatcaaggatgatggttccatattattgatattgccattattttttatttgatcgcttataaattcaaacatctaataaatttgatacttttaagtatatatcatatgtttgaattttttgattaacgtgtgataaaacttttatgacatgtttactaaaagagaatgagaataaaagatatgatattgattcccatataattgtttattaaattttagaaatggagaaagta

SEQ ID NO: 146238 - DNA, 1580 bp, Cannabis sativa
  modified_base (1537)..(1539): a, c, t, g, unknown or other
gtcgtcagtccatgaagcagccaaggtgacatactcgtgtataagagccattatttcgttggtgtaagggcccaatggaggcttgaagcaaggacattacacctcccgtcagctgaaggaatatgaataacgatacccgactcaagatttagaacttgatgtagtggtgtttcctttgaagatttggcggcattatctctacggagagaaatgtgaaatttatacagaccataagaatctcaaatacttctttacacataaatatttgaatatgagagagaggcgttggttagagttggttaaggattatgattgtgaaatcctttaccatacagggaaggtcaatgtagtggttgatgccctgagtaggaaggatcccgggcaggtaactagtatgattaagatttcacctcagttagtagaagacatgatcagattgttattggcaaacttcataacttgatgttgcaatatgatctattggaatgaattaaagtcgcttagttagttgatccagaattagtgaagatccgagatcaggtttcatctggtcaagccaaagatttgacggtatcagatagtgggatgctattgtttaagaccaaggtttgtgttccaagtagtgtaaaacttagaaatgagattcttgaggaggctcataccactccctattcattgcatcctcgcactaccaagatgtaccaagctcttaaaccctacttctggttgagcgagatgaagaagaatgtggtaatctcagtgcctaacttgtcaacagatcaaggctgaacaacagagaccggcaggtttattgcagccattgacacttcctgagtggaagtgggaggatatcaccatggactttgtggtttgattgtatgattaaatttgggttgtggtggatcgattcacgaagtgtgcacactttctacccgtaaaaacaacctttacactggatcagtatgaagagttgtacgtaaaagagatagtaagattacatggtgttccaaaatccattatatcggatagagatccgaagtttacttctaagttttggcagactcttcagcgagctatgggtaccaaactgaaattcagtgaagctttccatcctcagactgatggatagtccaaaaggacaattcagatactggaagacattttactagcttgtgttacggtttgagggctcctggagcaagtacctgccactattagagttctcatacaataacagctatctaagtacagtagggatggctccctatgagttattatatggcttgaaatgcaaatcttctattcattgggatgaaacagaaaaaaagaaatacttaggtctagaatcagtgcaactgactaatgaggctatagagaagattaaggccagaatgcttgcctctcggagtaggcaaaagagttatgcagatctaaagcgcaaaaatgtagaattttaggtaggggatcagttgtcgagtgaatttcgcaacaccaaattatattattttattaatatcaaagagaattttatgggtannnaaaagtgcgagtattcaacctagaatggcgagtacgcgact

SEQ ID NO: 146239 - DNA, 642 bp, Cannabis sativa
ttcaaataattatactattttaattattaattaaaataaaaaactaaaatattaaataaaactaatactacgtggcttggcacgtaacaatcacctagtatatatacttccattattatttgttttctatttttttaatattattaattaataataagtgtttttttttaaaaaaaaaaaaaaaagaaaaatctacataatatacatagaactattgactttcaattttttatttttctattttttttttcccatcattcaaccacgagtgtttatccataaattccatcgctctttgtatgccatgtaactctgtcgtttttaattaattaacaaattaatcaagaaccatatttaatccaaaaaaaatacagtaatgattcacagacaatgactcctaattataattgcaaggctctctctctccacatgtagtacatttttctaatattaaatatatcttcctttatttgatggttagattgacgtctagggtgattatatatttttatattatatatggagtttaaaataaaactatatttgattttttatgcttacatattcttgaaatttttcccttaaactcataatatttgatatttgtgggatatgacacattttataatattcctaaaatac

SEQ ID NO: 146240 - DNA, 1144 bp, Cannabis sativa
ctgagcacacctgtcgtactgtctatggtgtttagaaatactcttcttaggaccatatcacccacaaagaatttctaagccttcacttatatgttgaaatattgaggtactttttgctaatgggccatcagctttaagtttgttatggtttgcttctcttcaatttcatcaagtgattcggcaaggagtacgtgattggcttcttggctatacgtcaatcttttgcgggatagtggtttgagttctacgggcagcattgcttcatatccatatgccatgacaaatggagtctgtccagttgtcgttctctcggttgttcggtatgaccatagaacttcaggaagttcctccgaccagtttcctttagcatcctcaagtcttttctttagtgtatccttcattgtcttgttgactgcttcaacttgaccatggtttgcacaaaaatcagtaaagtcttgaaccggcatattatgttcttcaccacaaagtcttgaacttttttggacgtaatggttgctaatggctcggcttctgtccacttagtgaagtaatcaaccgcaaccactacattatgcactccacctttgcccttgggtaattgtccgatcaggtcaattccccaaatggcgaagggccaagggctttgcatttgggttagctcatttggcggtgcacgaggtatctttgaaaatctctagcatttatcacattttttaatgtaggcctttgaatctttgatcattgtcggtcacaaataaccttgtcttagaattttcttagataaattctacccggtggcgtggtttccacaaaattcatcatgcacttcagactgaagtcgtgcagcttcttcttgggtaacacatttgagcaatggcatggagaatcctcgtctatacataattcacacagctatgatgtaccgtgcagccttccttctcatctttcaagcttcattttgattatctgggagttcctccaggttgaggtaggttgcaattggcgtcatccagtttggggatttatcaatcatctcgatctcttccgtgtcggtgatgctaggttcttcaagaaactgaataggaataagatttgctctatcacttatattactactcgcaagtcgagctaatgcgtcagcagt

SEQ ID NO: 146241 - DNA, 734 bp, Cannabis sativa
tttctttttcacaaataacactggagcaccttaaggggaataactcggtctggtaaatcccaagttaagtaattcttggggttggatcttcaactctttcaattctgctagagctatttgttatggtgcctttgatactggtttttctcctggaactaactctattacgaactcaatttctcgggtaggtggtaatccaagtaaatcctctggaaatacatctaaaaatttgcacaccaatctcgtattctcaggtcttgatgacataggttggctagtatcaaatgtagtaactcggaatcctaggcaacctttgtgcatcagatctttagcttttaggattcttatactgggtattgtaccttacccacaaacaccgctggattggcactatcgggttcaaactccaccatcttccgcttgcaatcaatcattgcgctgtacttggacaagaaatccattcctaagattatttcaaaatcagataattataactcaatcaggttggcggttaattcataaccgttaatccaaaaaaataaagacctaatccaccgagtcgatacaattaggtttctagagggtaattgggtaccaaaccccgaagtatacacatcaaacagtttatgaaaactctttattactctactcgataaataagaatgagtaattcccaaatcaaataatactgaataagaacaaccgtttatggacaactgacttgtcaccactga

SEQ ID NO: 146242 - DNA, 653 bp, Cannabis sativa
ttcgatccttaaattatagtgcatatatgatttattaattccgcactttattcataatcatgtatgtttcagtttatacatataaatgtctaacagatcacactactataaaaatgccttttaatgacccgttttgagagtgtctaaagtattttagtaatattttaatgcgtgtcactaatgcaggtgtcaggaaatatactttttagagttacaaaatgtgtgtcactatatcttttttttttatttcatatatatagtaactgaaaatgtgtgtcactatatcattttttattttatttttaatttaatttttcatttcatatatgcattaactcaaaatgaccgtcagtattaatgtatagatatattttttatattttttattttaaaaatattaaataatattttaattgtttttttaataaaattgattcactaatcaataatttctaataatcatgctaaacccaaagtttacaaatgaataacttttttttaccaataataatttttttcatatacaaaattgaaaatgcacattttaaacccaacacaaacaaaatcaatactaattatatcaataatttctcaaagataatacaactccaactcgatacatcatacatttttgaaaaagaatatcatttaca

SEQ ID NO: 146243 - DNA, 545 bp, Cannabis sativa
gggatggggcggggatgggggtataaataggtagcggggatgggggcggggattgcattccccgtacattaaccgaccaatttccatctctacttgtatctaacactccacatacactcacatcagtttctttagtgtattcttcaaactatatcattaaaatcttactttatttattttattttaaattattacctcatatattaatttctttattttctctacgttattcaaatatattttcattcattttgaatgttataatattaatttaataaaataaatttagagtattaaataataattttttttacatgtggatagaagtactattcattattcaaaaaaaaaaaatactaaaagacactaatatacataatttaatttaataactattatataaaatatcatcactaactatttactaaatattggcaatacttaaaaaataaagggggtttttcaataatatacttaaagttaattttatttataaaaatgcctttaagaaaattatttgcacaaataccgttgtgccacgtcag

SEQ ID NO: 146244 - DNA, 675 bp, Cannabis sativa
aaagaacccgatactataaaatatttaaaatattaaattgaaagcttactcaaacaacatcacactaatagctaaaaataattgaagttaaccatgcaaaacacttcatttttttctaatattgttaaatattgaaagaaaaaataaatagattaccaagtctaatatagcacctcaaaatttttcaaatgctatcaacaccgataaacaccaacaaataattaacaacacacaattaattaaataattaaatcaaattaattaaaattaaacttataataaacttttttccctaaaaataatcataaacttataataaaatatttatttacctaaatttatacaataatatattttactaataataatttttaattttacctaaactaaattaaaacaactaattcacttttcaataacaaataaaataaataaacattttacctaaacttaaatcttatatattttaacatatttttctaaatattttttactcgtcatattttttacaataataactaactttaatatacattaattttcttaaaccacatcaaatatttacacattaaatttatatattcacaaataattttaaattaaacacattaaatttaaatatatatattcagctaaacaacatatgtatataaatatatatagggtaaataccat

SEQ ID NO: 146245 - DNA, 1047 bp, Cannabis sativa
taccgagtctagtttaattatgccttaagcgcataattcataatcccaatatatacatatatccgacatgccatagtattacataacatatataactagggtaataaccctaggctattaaccgctcatattagggtaacaaccctaatccggttgcaattactcacttatatcgtattcaacataagtgccaccgcgcatactctacgtgaaaactattatcttacctgttgtctggtaataatagagattccaaacccctgggcgctccttattaggtgccggtaatcctagtcacacaactcgggatttcacaaatagggttaatccctaattccactttcataaaatataatcatggcattcaaaatacatataatcatatagatcttggaacgagcttttcagcgatataaagaacatccaaaacggagtcccgagccaaaagttatggccaaaacaaaatcgggaaaaagatggctctctgctaggttttatggccgcggtcactgggttcgaaaaacccagaacaccagattttaatttctaaacatgcccactttaccatatattcgaaccttaataaaaccatacccaaaattaacttcttacagataaaatcatcacaatagagagctaacaacatcaattccaacattaatcaacaacatcggaccaaagcttcaaagcttgagctacatctcaagcaaatttccattaacaagaacttacactccaacttcaaacaataaatatcagagctcaacaaaagaaaatcacactaatcaaatcctctaatttctgtccaaacctaacccatacaaacttatgaagttaaagctgaaagcatgctcaagacaaccctaacaaccaagaacatgcatcacaaattcaataccacaaccacatcatattatcatgctcttcaataattaatttcagcaataaaaactcagattaaaaccagagaaagttacctcaaactcaatccaagaacaagctcaaaaatctacaaactcaaagcttcaattcaaggccaattccaag

SEQ ID NO: 146246 - DNA, 926 bp, Cannabis sativa
tgcttaagggagggagctcccttttaccctcctggcttccccacgggctgccgtcggtgcctgaggagggttgttcgagggtctattataatcccaggttccctatgcatactttgctggcaccatcccgaccgcgagtgcttctgactcctaagctttaaattttgttagctgttcgctacttttctcgtgtatagtctttgtctgtattcgattgttgtttattatgtctttctttctctttttttttcacgtttctagtcatatttatgtaacctgtgcttgtaatctctgaatggatttgcatttattacccttgttgtcccttcctatattttttgtttgcttcatataaggttgggggagctgcgactctattaagtgtatttattgcctatcatttatacatatatttatacgtactcattccgagagtgttgttttttgtttttttttttaaaaaatggggtgctttggaaagtggaaagacatatatactcttaaggatgcttcttgaaatttgggcgcacgtgttttgcctggcacgtgttttaatgccataaaggtgactctttgtttccgtatttatggcatcttcattaatctgcatgcaatttttgtataaataggcttctcgttgagctcctttttttatctaagaattttctcaactctcttttctttttctgggttagttcagttgagtttttcgtttatccttcgtgcattatgtcttccttactcaaaagccagattcctcactcaaaagagccttcctcctctaatattttctcaggcttgtagccattggatctttcttttctttctttgaaccctttttctagctttcgtgatttcgagcccactacacttcctccattgcatttttcagaggtctgcagctgtccctgttttgagcaagctgc

SEQ ID NO: 146247 - DNA, 546 bp, Cannabis sativa
caataaccaatatgcgaaaaattttaatataagaagacaaaaagtgttaggttatttttattaacaattttagattaatttatttttaatttaattttactcatgtttggagcaattctacgctattatattttatttttgaagatttaaaataaaagaagattaaaaaaatatcagaagaaaatgataaggaaaaagataaaagattgcataaaaggataagagtgcacatggagcatgtcgtgcacgtgacgaagcttgccttgaagacgtaggaaaaggctacacgggccacggcccagcaaagtgggcgtcgcagcccacccctatacaacagccaaaaacatatcttttctcaacgtgggttttgtggcttcctaattcaaagttgaataggatggttagcatgtgcaattttctttctttttagtccctcaattgctatgtaaggagagaacttcaattgatttcgtcaagcgatttgggggaggaaataaattgcaaaagacggagtacgaatttgagagatcaactgcaatattggag

SEQ ID NO: 146248 - DNA, 620 bp, Cannabis sativa
tttggtaggaaggagagagagttggatggatggagagttgataaaggatggagaatataaaggaggaagaggagagtaataatcttattatattgtttggtaggaaggatggagtgattgaaggataattaattattaaaatataaaattactattttgtccttataattattttttaataatatttattgaggctatttatgtaatttacaataattaaatgaggagactcctaatccttcccttattagagggattacaaattagagatttgagtgaatttgctatcctctcatctctcctttctctcattcaatccctcttgccaaacaaagggatttgttatctcctcccacctctctccctcctctcccctccatttctccacttctccctcctaccaaacatcttattagagcactcccaatagatgagctaaaatagctcaatctttaaattatagaaaaaaaaattacaaaattgagcttccaacaagtgaccttagctattttacatatttttttagctcaatgaatagtgtttagctaaatgtagagataataaacatttttaatattatttttctttaacttttttatatatgtgtgtaatattatatg

SEQ ID NO: 146249 - DNA, 1095 bp, Cannabis sativa
aatccgtcagggattggtcgagattgaagacagttacagaagttagaagtttcctgggtctggctagttattattgtcggtttgttgggagattttgtaagatctcaacacccttaacggaactcaccaaaaagaatcaatagtttttgtggacagacaagtgtgaaacaagctttcaggagttgaaacagagattgatcataactccggttttagccctaccatatgataaagaaaagttcgtggtttactgcgatgcatccagacaaggtctggagtgtgtactgatgcaggctgatcgtgtcatcgcttatgcctcccatcagttaaaagaatataaacagtgatacccaacgcatgatttagaactttttagaacttgccgcagtagtttttgctttgaagatttggcaacattacctctacgaagaaaagtgtgagatttatactgaccataagagcctcaaatatttctttacctagaaagatttgagtatgaggtagaggcattggttggagttggttaaggattacgactatgtaatcctttaccatctagggaaacttaatgtggtggctgatgccctgagcaggaagggtcccaggtaggtaactagtatgattaagattttacctcagctagtagatgacatggccagatcatgcattgagtttgttgtagaaaaacttcataatttgacattgcaatctgatctgttagacagaattaaagctgcccaaataactaattccgaactggtgaagatccaagaggttttagctggtcaagctaaagattttttggtgtcagatatcaggatgctgttgtataagaccagagtttgtgttccaggtagtgcggaacttagaaatgagattcttgaggaagctcatatcactccatattcactgcatcctgacactaccaagatgtaccaagatctgagaccctactattggtggtgcgcgataaagaaagatgtggtagaatttgtatcccggtgcttaacttgtcaacaaattaaggctgaacattagaaaccttgggattgttgcagccactgacacttcctgagaggaagtgggaggatgtca

SEQ ID NO: 146250 - DNA, 565 bp, Cannabis sativa
tccctggaacattctttgcatgtagcatgcttcgacatgtttctgcaagatggcgattcttcctctcagctactccattttgttgtggcgtattggtacatgtgaattgatggcgtatgcgacattctcgaaaatactaaaacaattcatctgaggtatattcaccaccgttgtctgttcggaggcattggattttcttgccgacttcttctactatttctttaaactctttaaattttgaagaagtttgggatttttctttcataaagaaaacccatacgtaccttgagaagtcgtcgatgaatgtaaccatgtaccgcatgtctctgattgatagttgtttgactcgcccaaacacgtcagaatggaccaaccccaatggtgctttggctttgaactttgaatcttcatacggtaattgatgcgccttaccgtattggcagccggcacatacggtctttgtgctgacctcgagttgaggaagacccttcagcataaacttcttcatcatcaccttgagtttatgataactgacatgtcctagccttgcatgccacaaatctgt

SEQ ID NO: 146251 - DNA, 1056 bp, Cannabis sativa
  modified_base (917)..(918): a, c, t, g, unknown or other
ctccttagactttgatatctaccaaatcatgcctctcaaactttcacatgtactaaatcatgcccactgaactttcatccatgctagaattttgttcataaaattagataaaagtcattaaattcaacaatctcaatagtttaggggcatttttaacgaccttaaaagttcagtgggcataatttggtatatgtcaaagttcgggagaaaaaaaaatcctaattagcctaattttttcattaactaggcagtatctgtaataattgaattatatgttttcttgggttaattttattattaataagttgagaaatacattttttttctattcattaattaaaaatatgtttatattatattttattaaaatgtacttatttttgtgagtaagttacacaatacaatcttattctctatttaagtataacacataatttatagagatttttacaaaaatattggattttggataaaattttacaattttactatcacacgaatttttttacaaaaatactattttttataaaacaactgtaaaacaacaaaacagaacaattaaaacaatagtggaacaactagaaaaataaatgtgaaacaacagtgaaaacttaacacagtacacaatataaaatttacatagtatttctgaaaaaatatatagtatttttgttaaaaaaaatcgcccaatagtaaaaaaataaaaaagttgaaaaatccttaatttatattaatctaaggggtaaatgagggcataatctatgtggatatatcttaaaaattataaaaataaaactaaaaattaaaacatataaagtaaaatagatatacaatgtaatttcctcatgaaatggtgcttttaggactttaatcaacatgttttcttcaaaatatatatttattttatttttttttannaaaaaatattaatttaaatttaaattgtggactctaattagtttacattgtggactttagttgacatgttttatttattgaaattaagggactatttgaaaaaaaaaaagaaagaaaaaaacacaaaaataataaaaa

SEQ ID NO: 146252 - DNA, 702 bp, Cannabis sativa
  modified_base (30)..(35): a, c, t, g, unknown or other
  modified_base (503)..(507): a, c, t, g, unknown or other
ggttgcataagagcaagaagagtaaatacnnnnnnagaacattctctgtatttataaagagtaaacattcacgaaatacattctctgtattaaatacatccataaataatatagactcgtggactaagactcattaacgcccgaaccacgtaaaaatccttctctaattttcttacagctctctaatcttataatattttattagttgccgaaaacctcggtcaacacataatatctcataaaaatcgattttaatttttttttaaaaaaaaaaaagagatcaatttcaaaaagatattgaggcataaatatgaaaagaatcagttccataacaaaataaataaacacaattaataacacacaataactcaaatataatataaagaaactggttatatttatcaactagttaaaaatttaagaaaaaataaataaataaataaatataattgaaatataacttgttctgtaacataataaataaaaataaataacataaaatnnnnnaaaccaaatataattaaaatagaaccggttctataacaatattataatgaataaaaaccaataacacgaaataacttaaaattcgtcataagttcataactaaaataaaaccggttatataacataatgaatgcaaacaagtaacacacaataattcaaaccgattacaattaaaaaataaaggggaaatcagtt

SEQ ID NO: 146253 - DNA, 878 bp, Cannabis sativa
caagaagtaagagaattatcaaaatagtagacaagatatgacttagtatgctcgccgctctaacagatgatgatgatttagaaatgataaaaggttacatattgttggtgaccgtatgttgttgaagattacttcaataaagaaatgttatgaatttcaagaggaagggcgagcaaagcctgagataaataggttctttacacatgttggccaaatagtgtatagacttgtgctaccacctacgatagtggatatgcatcactgattcaatatctcaatctgaagaaggtacgtatccgatcccacgcagatgcttatacgacacgttagtaggcgtggtagaaaggggaactaaaatataagagtatacccctagataaggtcctatatatagaatggaaattctaacaggaacattgtgaatgggtagggatatgagagaatgataccccgaccatatgtaggtaaaagtaaatttcgaggacaaaatttctttaaggaggatagattgtaataaccaaaatattgactattattctatggtacttagttttagtaatctcgatgtggaaatagttgattgcttagaatatattatttttatagtattttcttaagttatgaaaattatgtaattttgataaattaaattttcaaagattattgtgggctttgggcataattcatttcacaatttggtttaggagatgttattttattacgagataactatttattttataattggtcatggacaaatattattaattggggctttaaaactttattaagtagactagtgaataaatattgacacttatatgagaattaagttacgaataaatatgagataagatatatagtaagaattaaacatt

SEQ ID NO: 146254 - DNA, 681 bp, Cannabis sativa
acatatcttgatttatcttccattattataaaatctctaacacattataccccttagattaatgtaaatcatgtgctacatttaagtagagagtaagaatatattaggaaactcattcataaaagtaggtagattttaataaaataaaggctaattagaatttttactccgtaaactttaatatgtaccaaattatgcccctaaatttttttagccgttaaaaattcccccgttagatttaaggatttttgtctaattttattcaattttactatttaaagtgattatttaagtactaaactatgctcttcggattttggtatctaccaaattatacccttcgaactttgacatatattaaattatgcctcttgaacttttatctatgttaaaccttttttattaaaataagacaaaagtccttaaatccaacaatctcaataatttaggaggtatttttaatgatcttaaaagtttatgaggcatgatttagtatatgtaaaaatttgatgggcaaaagttctaattagcctaaaataaaatatgaagttatttataattaattgatacaaaaaatgggatattttcaaaaatatgggaaaaatgagtcatcttatgataaatatggcaacaaaactaaatgccacaaaatatggcattaactaaggaagcaaactacaa

SEQ ID NO: 146255 - DNA, 759 bp, Cannabis sativa
tatagcataatcgacactcacatctcaaatctcgcatcaaaatcataaacagtaaattggtgatcagataattaaaagtaattaagtacgaatgaaatagaatatatatagaaactgagagaaaattaaatcatattaaaactacaaatcaatatcaaacaatctccatctagaccctaatgaactatttagctactcatatttattgtagcaatttcacacatattaatttagaataaaagaagaaaatagagaaaaaaagaatgctgaaaaatatatagagaaagcttccaatattgattttgctctctgaaatccgtactctttgattgcttctgaattactttctaattaagagtttctgataataataataatgtgtctatataggctaacaagattacctaaaagatactaaaaagatttaaaatttaaacttaaactgttaaacaagataaaaatttcatatgaacaaaaatttcacctataataatccagaattttacttcaatcatacccttgattcactcaattattttattcaattcatgaaaccataattagcacttaactaatagttgaaacaatttatccatgccaattacaaccatcaatccactatcccaaaaatatttcatatgcctgttatacttatgattatccactagtataaatcaatgcacaacaccaagaatcaaaaggtctttctaggcttgtaatgtcactacaaaaaacagctacttttagtgacaatttttt

SEQ ID NO: 146256 - DNA, 503 bp, Cannabis sativa
aaccattgtctgattgtgtaagtgatagtgtaagtaatagtgtaagtggtattttggtaattaaaatcatagaaaatgtataaatgttgcctacaccttataaaggtatttttataaataaagtgtcaatttatattttctatgtaataattccttggttaaaaggtttatttatttatttttatttatttgataagaatataatattttaaaatatattcgatgcattacttaaaaaaatatataatataatatttaggaatacatctatagaaaattcttcgggttttttgcttaaaaaaagtacattatttaaaaaaaattattatgttataaatatttttggtaaggagcaaagattatgtttagtaaacaactttttagaaattactcttggtgcaatcaaacgaataaaaaaatctattgtaatactaataaataaatcaaatatttttaaaaaataactaacaagaatattataaattaaataaaaaatatattta

SEQ ID NO: 146257 - DNA, 786 bp, Cannabis sativa
acttgtgcccaagcccaggctggccatataagctcatcttagccaacctatatgcgccccttatttggccagacatggtggtacaactccttgacggttcacttaactcattttacttgctacttgacagttttaccataccttgtaaggagactttgtcttgctatatggaaaagttgtattccatgtgtacttggtcttggcctatgtggacatgccacgttaggtggaaaaaatttaggatgatatttaccccccaagttcctgttcaaacatctggttagatagggactttccagctctcgtattgcttgtagtaggcttgtctagccaattgttgactttttgcatggcatgcttttagatctttaatgttctctctgtacatatgcctcatcttctcttctttaacatctcttctttgaacctgtcattgataagtttcaagctttttaagcttttagaaatctttttattctcatgttagattgtaagctttttggtatgttgatccacatgacagttttagaatgtataatttgtgatttcctaatgaaaaagagttgattttggcctttattgttattcttgactctttgagtcataaagaacacgaggcacacattcgagttttgaaaaaaaaaaaactcacatttcaattcagaactaaccttggatggccttagggctcttgtttgagacctggtcgaccctaagattcaatcatggaagtgttaaataaattaacaattaacccaagatctatttgtatataacatagaacac

SEQ ID NO: 146258 - DNA, 989 bp, Cannabis sativa
  modified_base (371)..(382): a, c, t, g, unknown or other
tttctatcgatgaataacatggaataccctaaataacacagaaatggaaaaaactagggttcccaaaattgccccaaccggaattccagttctaggctggaagccaaccgaaattcttgttcctacaggcctccccgaaccagaattgcagttcctacaggcctccctgaaccgaaattccggttcagttcaagaaagactaaaaatttcataactcatgcaaatcaaccccaattcaatccaaactttccagacctattctacacaccctagtgaacatattcaaggcaacaaaacatccacccataaacaaaatcaaattccaccattaaagctccaagtttgagtccaaaactcaaacttggttaaannnnnnnnnnnnatcaacaaaacctgcttgaatccacataactaaacatattatagctactgaaaacataaaccaacaacagcagcaagttcagcaagcaaaactacaattcatggaaaactttctttttcttacaactcaagaaaccaacaaaaagctacaagaagcttgccaagaacttgggattaccaaatccttgagaaaacagcttgaaatgcagagaaacaaaccaaaccctagctgcctcaaagggggccgaaagagagagagagacttgagagaaaaaaaaagtgattttcctaacttttctaatttttgaataaaatgaagtaaagaaatgattttccttattttgtttcagccaaactaagctaaaaaaaattagattaataacttaattaaaaaaaatccataaaagacaaagtacatatgggcaaaatgacctttttgccctctcacattaaaatgacataaaagagtactgaggttattttgggaaatctctaaattccaagatgtgattctactgagccatacaccgcgttccaatgttgctgggcactgaacatgcaaaaatatgaaatttctaaatataacatatagaatacattctgaattc

SEQ ID NO: 146259 - DNA, 578 bp, Cannabis sativa
ctttctaataactctctgacttaattagtgcctcgaaacccagttttttcctcatgctttgagagttacacttgatggtttttaatttcccaatatttgcttttggggggaaattgaagcgtccggggtatttggaaatgattaccccttttcaccaaagtgcctacaaataaggctggaatttcctcataatttacttttactgatttttctactaaacaaactcatagaaagatttttacttcaagtctgtcgtgaggttcccaccaaaggcattcgaacagcttcatctggacttcatttaggtgtcaagcagtgagtaagttttcaatcttctcctcttttaactttccatgtttaatttctgggtttccattatagattatacatgcgttcttgacttgttgtagaagatagatagaaaatctaggttcgaagctttgtggttttctctgtaatagtccgtacggcttcatagttcacgacacttgcctttaatctcacattgttcttctttcaccttactcattcgaagcttcgtgaaatttaactcgaaacccaaaaatttcaaacttcta

SEQ ID NO: 146260 - DNA, 589 bp, Cannabis sativa
cggtgaggaagccaagggtcccttgatattgagatttgatcacccgtaccaatggttcgagtgacacctgcttgtaacaaccccttagcttcaaaaatactcttccatatagatatttaaattttttatttattaccattaattataattaatattcccttttttatgatttttcttagtttctaaatatttgattcttatatttgtataagtaagagatcacctattgaaataaaatactaagaaaattatcatctcttctctattttcaatctctaaattataatattttataatacgttatcagcacgagcctctaaccaaagtataataatgtttgttatatgtgatctcgaattgtttcaaagtcatgatacgctaaatatatatgtatatatatatatatatcaatctgaatgaaacacattcgagctagcttttatttatttattttgttatgaatcaatatttatacaatacgtatctatgtttatatatatatctatataaatgcctatgtattatatatgtgttgatttgtttattaaattatatattgtttaattttattttcttattctatatttta

SEQ ID NO: 146261 - DNA, 695 bp, Cannabis sativa
tacttgatttctactgtaagacagacatggcaaagaccgtcatatgtcatagttttttgtgtgcctactgccattttccttttggggttagaaaacgatttctttacttagggatcgtcaagagtgtaaagtgactttcagactcttttctttttcctccctttttccttctctttttttattaccttttggatgtttgcaccccatgtttgcctaggagaatctctggatttcttatctttggcagacatccagagagggcctctttcaagcggttaggggacccccattcgcctcatttgttttaagatttggtttcggggctaactgcaaatttctttttcagatgagtgaggttcttcgcgaccttcacaatcacggtttcttctgctttaaccaagagattgtagagcttcatcaaacccagacaatgttagcccctacttcaactggagcaaaatcttcaaacaaggatcccaagaaactggccacctttgaggaagtgatgaagggcccggtggttcacgagaaatacacctgctgatccattggctgggaggcagacaagctacactcgaccttgacctgtgctcacaaactggagaagatagttactattgaagggatcaagccatccgcagccggggttttctgttgggttttgtgcactaaataaaaccctttacaatctgatt

SEQ ID NO: 146262 - DNA, 1178 bp, Cannabis sativa
  modified_base (836)..(837): a, c, t, g, unknown or other
aaagtaacatgaaaataatatttaaataacattaaaacaacaacaaaaaatcaataataaattaacaagagtacaataaaaaaagacggtatttttggtaaataaaaccaaaaaaatcgtaaaaataattaaaattccgtgaaaccctatttttgtaatttttttgttgtttttttttttgtgtatttgtaaaataatcccttaatagaatgccaaaatattagtgtgcattactatattttagcacacttaaaaaaatattgttattggacaccaatagtgctagcgttatgacactaaagagggtgttaagcactactacgaataatatcttttagcaattctctaaaaaaagctactattctaatgatgttaaagtgtactaaatttggcacatgttaagagcactcccattttctagtctacctctatcatttaaaatattttactaaaattctactttatctattttacttcacactgttatataacaccaaacattagttactctattttctctttatataatttaaatattatattgtttgatatattttattcatttaatttattttatgtatttatagatataaataaaggtaaatattattttggaccctgcgttttgtaaaaattattaattggaccctatgtttagttaaatgaaaaaatagaccctgtattttctaaaattgtacaaatcgaaccttgcactgattttttgtcaaaataaaacttaataataatctgatttaaagatgttatgacaaaactagttacattttctatatttgttcgtgttagaaattgaattaaagttagttatattaaaaaannaaattgttgaaaattgagctcatgatcttatttttaccattttgaaaaatatagatattatgtcatttaacaaattagatggttcaattaataacttttgcaaaacacaaagtccaaaatgatatttaccctataaataatgtgaaagaaaaagaagaaaacaacaaaaaataataataaaatatgtttagctaagaggtaaacctcccaacagcttatttactctattctttaaaatgcatcaccaaaactctactttatctattttacctcaaacttttacattatatcatacataagcttctctattttttctctaatatcatttaaatattatattt

SEQ ID NO: 146263 - DNA, 1111 bp, Cannabis sativa
tcatgtgaaccatgcaacctaaaaggatttctgatctttatagtaaatctaattatattgaaatgagttttatttagggtacaaaacccaacactgagtagaaaaggttagagtgagataaatacagtgaagcaaatctcccaacagttagcagatgaaatgacctgagctaaaatttattttgttgtggggcaattggctaatattaccctacaatctactcttttggagcaaatcaaaaaagcactattacaagatccagagtaagtaaaatctcgagatagggtttcgactcgaaagactactgactttacagtggatgacacgggaatgctacgatttatgaattgtgtttgtgtgcctatgaatgatgacattaaaagagatatcgatgagtctcatacgactccttactcaattcatcaaggatcaacgaagatgtatcaagatcttaagtccatgttctggtggccaggtataaaaaatgatattgttgaatatgttgcaaggtgtctaacttgtcatcaagagaaagttgaacactagagacctgcagggttgatgcaaccactgaatcttctgaagtggaagtgggaagatattgccatggacttcttggtttgattgcctaggaccacgggaatgtacgactctttgtaggtcatagttgatagatttacaaagtcaacgcactttttacatgttcggacgaacttctccattgatcaatatgctgagttatatgttagagaaattgttcgtctccatggtgtcccaaagtccattgatctgatagggatctgaagttcacatcaagattctgggagaatctacatagagccatgggtactccgttgaagttcagcacaacttttcattctcagacaaatgaacagtctaaaaggaccctttagattttagaggacatgttatgggcatgtgtgtttgattttcaagaatcatgggtaaagtaccttccccttattgagttctcgtaaaacaatagctatcaagcaatgatcgggatggctccttatgatcttttatatggaagaaaatgcagatcacctattcactgggatgacgtgggtgaaagaaagttcttgggtcc

SEQ ID NO: 146264 - DNA, 1183 bp, Cannabis sativa
caaaaacttgccttagcaccaagtttctaacattgaatagtcttttcttgactcttttgttgaagtatcttataactcggtgttgatacgctgcattagagacttgcgtctttgtttgtttttcatcaagcagattcaaagataactttaggagttcttggttttcttcttgattataaaactctcatttatgagtcgatatgttcacttcaacaagtagcattgctttcgagccgaatgctagcgagaagggaatgtgtcccgttgttgtcttctcggtagttttgtgagcccaaagtacttgtagctcgtcgacccacctgcctttggcagcatctaacttcttcttgatagtagcctacaaggttttttaacagcttccacttgtccattcgcctgaggcttgatactcctctgagacttatcacactttttgacaaactcatgggtgtccttattgatcgtaggctagtaatatccttgtctaatgatctttttagataggctatgccaacctgcatgatccccacaaaagccttcatgaatttctctaatgatcttgtttacttctgtaggaacaacacaccgaagtagaggcattgaataacctctttaatatagtttgccttcaattattctgtatcgaggcactgaatacaagagttttcgtgcctcattttttttagttggaagttgtccatcgagtagatagttgactataggagtcatccatgtaggtgagttgtctatcatctctatgtcttccttttcaaatatacttggttcgtttagcatctccactagaaccaagttcaattcatcaagatcattctgtgaggccagttttgccaaggcattagcgttagagttttgttctcttggaatttgctcgattttaaagtaatcgaatcattccaagtttccgaaccttgtctagatacttagccattttcaagcctttggcctggtattccccgagaacctgatttacaatcagttgtgggtcaccatggcagatgagattctttactttcaacgcctcggctatcttcaagccagtgatcaaggtttcatactcagcctcattgtttgatgcgtcaaattgaaatctcaaagcataatgaaacataaagtcttatggtgaaattaatattactcttgcacctgagccctgctcgttgga

SEQ ID NO: 146265 - DNA, 829 bp, Cannabis sativa
aggtttgatcaaggtgttataacggttcaactccactttcgtcaaatatgtttagtcgagaacctttgaatttcatttttttttaaatgatgagtttgcattatacaatgtatttccagatgaatttcagttaatcatacataaatgccccttaagtaacttttaaagaatgaagctttgtaattacttaatataaatgattctctttattcataactgaagttttaagtttacatctacgagttacatcatttatttattaatagtagggtcacaaatgttctgcgttccagtagttctttattagagagccctcaagtcaagccaatttatagactccaactccaactactgcttcgatgacatacggaccctcccagttcgggttgaacactcctgctgatgcatctctcgtatttgcaaagactcgtcttaacaccaattctccaacattgaatagtcttttcttgactttttgttgaagtatctcgtgactcagtgttggtatgcggagttggtgatttgcgactcagctcgtttttcctcaagtagatccaaggacaattttaaaagttctttgttttcttcttgattatataactctcttttgtgagtcgatatgttcacttcaacaggcaacattgcttccgatccaaatgctagcgagaaaggagtgtgtccaatggctgtcttctcgatagttctgtggacccagagtacatgaggtaattcgtcaacccatctgcctttggcagcatctaactttttcttgatagtatcctttagggttttattgacggcttctacttgtccatttgcccgaggcctg

SEQ ID NO: 146266 - DNA, 757 bp, Cannabis sativa
agaagaagcgcaacggcattggaacaaagagaacttggtttatgcccacaagactttctgtacgaactttgatatttaaaaatggacatgaacattttgtatttgtgctttaacacaaccaaatctatgtttttatttaaaatgtaatctattctgtgtgcttattgtgcaaagcaacttacttggaagaacgatgagtgtggagaggatggcgaaggagcaagagtggtccactctttattacgatgcagatttgactttatgtcacactgtatttacattttcttgatacttttgtgctgtatcaaatgtgtttagttcacttttttgatgacgttgtttgttttactttgtcgcagatggtgatacccctattggataccgagagtgctccgcactggtttgtggtgaatctgaccatggataatacaacagtggaaattagaggctcgttgtattctgcaatgcataagaggtcacgtcggagcacctgcctagagatggtatacacgtgtgtacatagtttgttgttgtattagtgtaattgcaataatctcagctgtaattgttttaatttttttgcagctgcagactttggaccaattgtttgcctctgtcaagccaggaaacctcaattttagcgagtttgtaattattttttctggcaaggactacccacaacagcaaaatgggtacgattgtggaatttttgtaatgaagtacatggaatcaatggttgaggaaaatgaaacaatgg

SEQ ID NO: 146267 - DNA, 775 bp, Cannabis sativa
tagaaggcaaggagaatgctcaagcctctccttctgtcccaaatattggtggccgcatgaggagaccttccatcgtggttcccagaatttgtcctgatgatgccacaattcagatgctagagtttgtgcacgacaacattgacctccttgtttgacaaactgcaactgttgaggtggtacgtgacatgtccaactacgaaggtggtaccaagacatccttcaggtacgtgatggactatttatcaaaatgtattgataatagcctatcttttcatgtgcacgctcatatttatatgatctcatatccttgtattgtactaacactctttcattctcttttttttttttagggtgtaactcaattcgtggtctcccatcttaattcttcaaatttacaagagaaactagctgccgcaagaagcagcccttaaggagcagaaaaaagcctctctgctctttcggacgcaaagtatgagcgtgacaacgatgaacttaaggacattcttggtaggaggctgacggaactcaatgattcgcaaacccggatggaggagagaaagggtcaagttaattattacgttgatcagaactttgctcttgcgaagaagaatacgacactagagagaaggcgttatagataaaaggtgtcactctaaagaacatgactcaacggttaaagctttgaaggacactattcagaagcatgaggagagggcaacgagagaccgtcagaactacaagcgtgccttcgacgaccaattttatcagttgtgga

SEQ ID NO: 146268 - DNA, 627 bp, Cannabis sativa
tcattcgtgcttaactacttttaactgtctgatcaccaattaattgtctatgattttgatgcgagatctgagaagtgagtgccgattatgccacaggcggacccaaaattgaattttagggtgggcttagttatacatttaatataatctaaaacaataaataactagttaaatttaagtaaaatgatagtttagcagcatctccctattctagtggtcataaatttgatcctagtttgaactttatacttcatttatttttttaataaataaaatatagatacacatagaaaaaaaaaggcgaaaaaatttaaaacatggtctcccatgtaaatttaaagtatcttaaccaattgttctatttaactactatgtatatataaaaataaaaattgtatattaatatatttttaaatctcagggtgagctttagccctccgtcaacacccctgggtccgcctatggattatgctatagtgaaatagaactgaatttcgatataggacgagagtacttgtatggtttagatagcttatgtggattctgtgcttaatgcctgttgcatgttaaatttatcacgagagtagaaagtttgcatgtaattgagatttatatatctgagaagac

SEQ ID NO: 146269 - DNA, 1025 bp, Cannabis sativa
  modified_base (59)..(66): a, c, t, g, unknown or other
  modified_base (183)..(183): a, c, t, g, unknown or other
  modified_base (539)..(559): a, c, t, g, unknown or other
  modified_base (711)..(715): a, c, t, g, unknown or other
gtattatcaagatctaagcccgattcttcttcaggttgtttggattcttcatagtcttnnnnnnnntgattgagtactagacttgctataggtgggcatgtactcactcactaaggctcgaaaaaattatgaataacattcaagggatttcaaaattagaaggaagaagaagaagaagtctcnagaactctctagttgtctgacaagctgtaaactaggttatgagtcattagtttgattatgagaccatcctattctttttatactaattcacttagggttataattgaattatatagaataaaaaataataaaataatagccaaaatagggattaagtagtcgaccatatgtgggccccactaattatatttttaccgttttttcaaccatttatttattatttcacaaatgctatattttctaattttaatcctataaatgcacttattaaaaaaatcctataaatgtcaaaactatttagttaataattataatcaattatcaaataaaattatcatttatattatttattaatnnnnnnnnnnnnnnnnnnnnnattaacaaataaaccctaaaatttattttcttaacaattaagccataaattagtaaaaattcataaataagacatcgtctaattttaaaattataattgattaataaaaatcaattaacagagtcttactagcagtattgtctcaactagtnnnnngaccatggacctatataactgagcttccaataaatagctctagaatttaccaagtaaatcctctaacttattaattcctctctgcaccactatagatttagaattgtactctcaattatatagagcgctctatatgttctacgatatagatacgctatgaaattatccattgttataatcctaataatcaatgatcatctttagatgattcacattgagtagggacaaatttaccgttacacccttcaatgtttttatccttaaaatacttagctaccaataaatgatatttaagtgaactaatataatc

SEQ ID NO: 146270 - DNA, 859 bp, Cannabis sativa
  modified_base (570)..(574): a, c, t, g, unknown or other
aataactctaatcccggttgctagcttctcatatatatcatattccatataagcgccattgtccatatctctacgtggtaattactatcttacctgatgtcccaaaaatatggagaatctgaatccccgggtgctcctaactaagtgtcggtaatcccagtcaacaatcccgacaataccacaagattatggttaatccctaaatccatttccacaaattataaaattgtcatttaaactatagatattcgcatagagcttggaacgagctttccaacgatataaaaaacatctcaaacggagttccgagtcaaaagatatgaccaagacaaaaacccgaaaaaaatacaataagctgccaaaaatagccgcggctactaggtttaaaaatccaggaaacccagtttccagccacgaaaatgcatccaaaaacaccaatttatatgctaaaccagcccacaattatagcaaactttcacctagcataaatcaaatatattgagatgaattacacctaattctctctccaacaacaccaaaaactagcaacaaatttcagccccaaaattnnnnnaattcaacacaaacccaaacacaactcaagctaatcattcacccaatggaaagtacctaaacaggcattaacatacataattttcatgcttaaacaccagctaaacacataaaaatttcaaattaaacaatataaaattcaaagcaccaacttgagcaaaatcactaagaactcatattcaagcacataaacttcaagctagcttcaactcctttttttttcagcaacgaaatatcaagcaagacttgaatctaaacatggaaattaccgtaaaaactcacctag

SEQ ID NO: 146271 - DNA, 587 bp, Cannabis sativa
tccaatcaacccaagttttaataaaaccaataaaatttaatgtaggcccaaataaaagtctaacaacaaattgttaggatttacctccttaaaaatttgtaaagtcattatgattataaatattagttgaatattttgatgtatacttgaatgttaaattattaatattttatattaaataatttatacataaatatcagaaaatttattatatattcatatttgagactgtgacttatattgtacaaagaattaagttaactagccatggataaaaaaatagtcagcaacatattaaatttatcaatttttttattaacagatgctggtacggttcactgatgctcgttattcgatggaagcaatctcgatttagattgttgacgtagaaagacatctaagtgaaggtgttgcataataatagagattatatacaagatggactgatatgtaattaagaattttctttatcaaatatgtcatttgctataatgacctaattcatatcacaatgacgatcaattagtaaatcggtctgaatcttgagtaatcatgaactcatgttcatgttattaatttcttaaatt

SEQ ID NO: 146272 - DNA, 712 bp, Cannabis sativa
tcgttattagatgctttgaatccaaacttgattgcagcatgcaggtgttgccccccaggcatgacaagggcaattcctacaccagatagttgatttgtagcctactcgtctacgtgtagcttccaagtcatcttatcttcactgttatttggctgagttgtttgtactggctcggggttgctttctggtacgctttcttctttgcttgtgcattctaccacgaagtctgctaaggcatggcctttgattcctgttcggggttggaaagtaatttcgtagtgacccaactccaccgcccacttgagtagccatccagaggcgtctggcttttgcaatatttggcgtagtggttggtcagtttacacccaaacggaataagcttgaaaatagggccttaactttcttgttgctagaataaggcagtaagtgagtttctctatcaatgggtatcggccttcggcctcaataagtcttttactgatgtaatagatcgggtgttgtatgttgttctcttctctgataagcacgacactcacaacatgctccgtgacagccaagtatattccatgttcttcttcgtccataagttttgagagtacgagaggttttgcgagttgtgcttttagcacctggaagatttttcacattccttcgtccgctcgaatatcttgtttcctcgcaggatattgaagaatgggacacacttgtctgt

SEQ ID NO: 146273 - DNA, 541 bp, Cannabis sativa
  modified_base (52)..(59): a, c, t, g, unknown or other
  modified_base (302)..(303): a, c, t, g, unknown or other
gaaaatgatattgaaaatatctatttgattattttcaaatcatttatcttannnnnnnnttaatttaatttgataaaataatctaaataaatccagatattttaaaataagtttgaatttttaaagtttgaagagatattttaggttgttttaacaaccttaaattttaaaaattagttggttatttaaatgataatttaattatataagtaataaatatcttatttcacatttgttacatgggtattgtttgttttagcgtcaataccattttggatccaggggcggacccacatagaggnnaggtggggcagtcgcccaccctgaaaaaaaatatatgcattttaggtagttacaacatatatttataaataaaagtgatatctataagcataaaataagctttggtataatgttaaagggtaaagtcattttttgtatctaatggaggtcatgagttctaatcccaataaaagcatgtttactttagtatttttattttacttttttaatcctctaccaataatatttatatttaatg

SEQ ID NO: 146274 - DNA, 558 bp, Cannabis sativa
cctttaagaatgtctgagaccgtttcacggtcaaaggtgcttcgcagcttttgaatatcccacttcccattatttagcataaggtcagccacacagttcaggttggaagggttaccctggagtggtttcgggtggaaaccttttctatgcggaatccaaggatcaccccagatcttcgtgttctccccattagcaaccaacttacaagctcctttcctcaaaatggaagttgccttcaccacactcttccaaaaccaagaatctgaatctttgtatctgcagctaaggaagtctttccctttgaggtatttggctataagaactcgacaacacaaagattggcttccattcaagatattactaagaaattataaggggatacgtctagaaggtgttaaataccattaatactcaaggaatgcttttttttcataaatatgtttgagaagaataagaacacgtctagctctctctaatcatcaatcaatcaatcaatatcaatatatataataaaggaatgcacaaaggattcctatgtggcagcttatatgagttttt

SEQ ID NO: 146275 - DNA, 1131 bp, Cannabis sativa
gtcctacgggtttggatggaggctgtagactcgacgatgaacgagtgactcgttttgacacagatgaagggggtgacgacagagaaggactagtctttttagacaggggaggagccttaccttgaaacgtacgaggtttctgaatgactagaggtgaacgcggtgacggagtcgactcaggactcgagtggcgagcagaaccaccaacctctgactggcagaggacaatgtcacgacaaggattagatagattagtctcgactgtagatacgactacaggatcaacagtagttgccacggatggaacaaacatagcaataggggtactgcaatgggagtggtattctccattttagagagaaagttgtgaatgttgcaggacttagggtttctgagagtaaagtgaaagagtgagactaatcactttccttaggccttaagtataggctccctgacacaactgagcaggcaaagaaaaataatgatgatttttttttttttaaaaaaaattgaactttgccaaaaaaaatgtacacgcccaaattgaatattttccaccacataatacggaacacaaaacgaaacaaaccaaagtcatcaggaaatgagagtaatatagagacttgaaatatttcaaatatgccagcaatatttgcacacaacccacacttgacaaatcagataaaaaatagacacttagagatactcaaaattttagaagaacaaacagggatcaactgaccaatgaacattaatagagcttctgagtatttaaaaaatgcacaccttgagcaacagatcatttcatcacatccatccacaatgatactcatgggatcactaagacttgaatctccatacgtgtgtgagcagtgatctcatgtggtccaagaagagagtagatcagctggaccactctctcaattcagcataaactgatatgtgaatatctaagaatgttgtttgtttttttactataaagcctttttttttaaacactctggctctttctttagtacaaagacatggctatcactctcttccagagatgtagccgtcctctttgatccccaagaactaatacagaaggagcatactacttattagtaaaaggtttaagagagctcttcc

SEQ ID NO: 146276 - DNA, 635 bp, Cannabis sativa
atgacttctaatattgatgaatctctaaatgcagcaaactgagcagctagagaactaccaatcacaacactaatggagtcattgagagctttgatacaacaatggacagacacaaacaagaaaaagcacaaaaaaccacaacatttttgatacctaaagcagagaagaagctagtcaacaactttgtgaactcattgacagaaaatgtaaaatctctttaaactttaagttgcattagagtttcttaatagttgtttttaagtttactgtacaatttgacaattgattatattgacctaatttgcagataaagccaataaacgagagcatgttcgaagtggtagaactaacaagatcatgggtgatcaatctaaaggaaaaaacatgcagttgcaaccgattccaaattgacgaattaccgtgtgctcaagcgcttgctgtgataaaagagataaacttgaatgtttacaactactattcaaaatattacacgataagaacatggcttgaaacatacatcaactcaacatatccggtagacaatcacacaacatgggatgtaccacataacataaaagatatccttgttctgtctccaaaccaaaaaataagatctggaagaccaaggaaaagaa

SEQ ID NO: 146277 - DNA, 994 bp, Cannabis sativa
  modified_base (98)..(102): a, c, t, g, unknown or other
taattacaatttagaggttatttttatttataactggcccaaatcgggacttgatttttttataacaaattaaaggttattcttgaatagagtattcnnnnntagaggttctactgtatatttatagagagagacctctcatttgtattttgttaggtatttcatattaactgtttatgtactttactcttctttgcccaatttatgtaaaatcccataatttagaatttttttctctaatgatcatgaaaaagtatatatatattatgtttgtagattcttaaaattaactaattaattagacttttatattttgaaaatatgaataaaaaatgtatatacatataaaagatatatagatgataaagattgatgcttctcaaatttgtctaattagaacatacaacacacttttatatgcttgactacttctagagcaaattagctaattatgactaattttcttaaggggaaaattattatagttagatttattgagtttgatcacttatactcttttgtcaaattgattttaggtatcgtgagagaaaaagtaagttattccatatatatttgtgtaacataatctctaaagttgaacatagttttatatatataataataaatttagttaaattaaagtagaaagaagaaaaacgttgaacttagttttttttttccctttatgacaagtttgaatgaatagaccgatatataaagaaaattgtacatatataattatatatagtttaaatgtcatattttcaaaaaaaaaaaaaaagtcataattaattaataattaagatctctattgtgtaagtaagaaatcatgcatccatcactacaaaaaattgctacttttagttataattttatagtcacaacataatttttttgtcactaaatgtgacttctacatatcacaacaaaatgttacttgtgactaaaacatagtctttaaatacaagttgtcactaatttatttttagtcaca

SEQ ID NO: 146278 - DNA, 839 bp, Cannabis sativa
  modified_base (799)..(799): a, c, t, g, unknown or other
cggggaggtaatttttttttcaaacactataatcaaaaggttagtaattattttttttaattttattttcttgtgaatatcttcttatcttgtctaaatatttttgaaaaaaaaattatcaagaaattcaaagtatgctctaaggttgcggttttatccgatcttccttatcagaaatgatttcttgataaaaaaaagtttatttcctttaatttttatttcattctcactttgacttttgtttagtatgatagtttatattatgttgtagttcttttttttttagagttttatttatctttttctttttatttttattttagtattcttagaatttaagtccttaaaaaaattataaaatacaaaaaaaagtgagttctaatttttgttctttcataaaacgcttagtattttgtacaatagtgtaatattatatatgacccaaactaaaattgttctgtctagaaaagttagtttttaaataaggtttgtgttagtgtaccctccactttatctgggaacctcggttctatctaggcaaggttgagacgaagcggtaccttggcaacctttccaactggcctgagaatatttttgtgttagtcattgtaatattgtatttttgtgctctttactataaaaaaaaattaaaaattaaaaaaaattatgactaaaataaatgagaactgaatgaagaacagaagcaacgttttgagctttattttccaacatactatgcttcctgtagaaattttgcaaaatatagtactactgatggtactaataattttaatggtgnatttcaacttagcgaaagagagaaacttcaagctcaagta

SEQ ID NO: 146279 - DNA, 594 bp, Cannabis sativa
taattaaaaaaattattattattaatttttaatttaaattattagtattattttttcaaagttaatttaaattatttttatataggtatatattttcaaaaaataattttacttcttatcaatatttttgtactaatagttaactataataaaattaattacttaagtatttttgctactaatttgtttagatacatagttttaccataattatcttttaaattaatttactttattacttttttatgaagaaatataatttttattaattaaatcaagccaattacccacaaggggattccccttcaaaatagaaacttacaattcttttatatttttaagaacaattttatttatgatagatgctacccctaattttgcccaatatatgtggaccaaccagatagggacacgtagattagaacgtcttaatgctagaattatttgctaagtctttatgatataaggcagcatccgggacgtgcctcccagagaaggacagttgagccccatacgttcccggatgcctagctaatgttaaggcatctccgcgaggtgtcaggcttcccctgagcagtcaattcacatttaatg

SEQ ID NO: 146280 - DNA, 626 bp, Cannabis sativa
ctctatcactataggcttgaaaataatgaagaacaaaagagggggattaaaaaatagtaaaggagggagctctcaaaaattctagttgtctaacagaataaaaactaggttattaggttgaaggcttggatgagaatgagagcatcctattccttttatactatttaaactagggttatgatttaaattatatggaataaaaaagataaaataatagcaaaataaaccacatagtagccagccatagaagatgggccccactagttacaattttgttattttattcaacaatttatctttcttttacttatgtcatattttttaactgagtctacaagcagtattatctcaactagtgtggcgaccatgtgcctatataattaagcttccaataagtagctctaaaatttaccatgtaaattctctaacctattaattaatatagaacgctctatatacttaacgatatggatacgctatgaattatttattgttataatcaaaatgatcaatgatcctctatagatgatttatatcgagtagggacaaatttaccgttatacccttcattgtattttatccttaaaatacatagctacctctaaatgttatttcagtaaactaat

SEQ ID NO: 146281 - DNA, 850 bp, Cannabis sativa
  modified_base (42)..(54): a, c, t, g, unknown or other
ttatgatatcttatccaagattaatatcggtcccttccaatnnnnnnnnnnnnnatccgatactggtaaactttgcgaatgccctggaaaggacataacacttaagcaaggtttatgtatatcttattgccgatgatcatgtcagtctaaatccagtgaactaaaagatcatgggaattaaacttttgaacatgtaatcataattatattccactgtgctgacaacactataattatgaaaaaatatatatatttacatacgtgttaacggagattttcgttaaccaaatttgagcctcacattaacgatttcactcagaaaaataaatgatataaaaataaaagtatgaacacacaaggttttttacgtggttttgtagttaaaattctacatagtccacgagtcaatcttattcagatttcttattatttttcagggcctcctttctatgagttttttcgtccatcttctcatcttgcttgccactatatataataatatagtgagcaggtaattacaaacttgacggtaatctttacagcaattattccctcaaatcatgtgatttgatttacaaattacgctaagtaaatgcagtttttatttagaattcacacagctgtgaatatcccgcttttattgggccgagatgaacgcacattaacgatatacggtaagccttatttcatggggatgcctcgctgagttaactttgatggcatgctagagctcgtcatacaacttcccgaggttgatattgattttacttttattctgacaattatagtttttggtgtcgagatgatcttgttagcccaagatatgtttccaagaggggggtgaattgga

SEQ ID NO: 146282 - DNA, 597 bp, Cannabis sativa
tgggttgtatctgctgtgtatcttgatgttctgttttgaattgttcttgtatatagtacttttgtaaaacttttataacaggattctttggaatacgtttgtagtgtcgttatgatgtccgcttttaatattttactttattcaagtttttaatattatcacggttcttaataatttattagtctattagtattaaactagtttataaatcacacatgtggaattcctatgggttagggcgttacaacttggtatcagagtagccatgatttttaggtcctgaagactactcaaatatgtacaattgttgtgaagacaggttgactcatggtatagtaagtgtttatataaattgttattgcattacctgcttagacaaatataatgcatgttacgaaaaaaaaaaaaaaaaaaagtgtagagatgtctatgataagaatatataatggcttatgcacattgatattgatatctgtttaaattctaaatggttgaaggttttgggttacaggcacattggatcatccagcggcgatctagccgtttgaactgcgagttggggctcggggtaggtggtgagggagagcatcctccacc

SEQ ID NO: 146283 - DNA, 620 bp, Cannabis sativa
attaggagggagggagataacggatggacttttcgcacttcctggaagctaagcaatacagagaagctcaaaacctttctgctattgcagtcgctcgaggtaaggatgtaatacctcccattcttagatctggaaacatagttcgaaatttggattctcaatttgctggctccccgtctaaataaaatgttaaaatcacaaaggaggatatccaagaagaggtagacttttggaccttttcaatagtctgttatgttcttggggctaaccccccaatgtcgattctggacgattttgtgaggcgggtatggaaagataaaatagacaaagtggggatgatttctcatggtgttttcctggtgcgtttcagaagtattgcagaccgagatcagatcttatcaggaggatatattttcttcaacaaacgtccagtgattatgcgagcttgggatcccaatgttaacttcaaaaaggagaacattcactctgtgccaatttgggttcaattgaagaatttagacctgaaatattggggagaacatgttctcttcaagattatcagtcaagtgggagaaccagttgtggtggatgctttcactaaggccagggagaaattgacg

SEQ ID NO: 146284 - DNA, 616 bp, Cannabis sativa
tttacgtctaagttctgggaaagcctgcaacgagcaatggctaccaagttaaagttctttatagattttcatcctcaaactgatggacaatctgagaggactattaagatacttgaggatatgctgagagcgtgtgtaatggattttgaaggttcttggaataagtatcttcctctgatcgagttttcctataacaatagttatcagagtactattggcatggctccatatcagatgctttatagaaggaagtgtcgttcaccgattcactgggatgaagccagtgaacgtaggtatcttggacctgaagctgtccaaagaacaagtgaggccattgaaaaggttcgagctcgtatgcttgcctcacagagtagacagaagagctacggtgatccaaagcgtagagatattgaattccacgttggggattttgttttcctttgggtgtacccaatgaatggaatttggaggtttggaaagaggggaaagttgagtctcagatttattggcccgtttgaggttctcgaaagagtaggtcaagtagcttatcggctacctttaactcctgctctatccggggttcataacgtgttccacattgttgggttttatgccc

SEQ ID NO: 146285 - DNA, 537 bp, Cannabis sativa
acctaattagggtatacacaatattttccaaccagtaattcacaaaaaaactcattgtatcaaaatatgccatcaaagatcaaagctttgagcttaaagctcaaaattgcataaattcaacacaacacaaccaaaccagctactagaggctaaaattaactcaaatcaaacttagaattcgaaccctaagcatttctaaccctaacagctcctagttatcaaaatcacatacttaaattaacccaaagctttaaaaatacataaataaaggttctagggttttacctttgctttggattcacaaagactttacttaatattcagaaaataccaaattgaagatgaaatcctcctggtttgcttcagccgaaagagaaagagagagagttctcaattttttactttttcttccaatttcttttattttctaaaattagaattaaaaataacttaattaatccttgctgaataaataataggccatgtgtcacctcctagggcagccaccaaatcacacctttgcaaaatgactaaaat

SEQ ID NO: 146286 - DNA, 598 bp, Cannabis sativa
ataagatgaaataaagaagaagagaagaatggggctaggtaatgtcgcccctaaaagtcgcctctaatagttgtacaatgtcatattcatatttttaggggcgacaaatgtcactcctaatgttattagcgggaaaaatctccccaaataaattgggtatattttgattttattttatttaataagttgctcctaaaacttttagaggcgacaaaagtcgcgacaaaagtcgcccctaactctatacgaattaaaaaaaaaaatagattttttttaggggcgatactgtattgtcgcccctaatacctctattattagaggagactttatgtcgcctctaaatttgtcgctcctaaaacctatatttgttgtagtgacaagcatgacatgaataatgtaaacataaacatagcacgacatgaaaagtatgaaagcaagacacgaaaacataaattttttagcacgaaagcacgatagataagcacgacataaaacacaaattcaaattcataaaataattttttatttagtaatttatctactctttcatatcaagatatgacacgaacataattataatttttcttattgagattat

SEQ ID NO: 146287 - DNA, 804 bp, Cannabis sativa
ttcaagcatgtttcttaatttttgtcatattaatattttcatggtcaaatttttcaaaatactcatttattcttgtaaaatgttatttttaagcaaatttttgttatctttgttacttagaatttttctagagttataaaattcacatgccaaacttcgtggtaagatggttgttagcacatatttgcttagaaaagctaccaagtttaagtgttcatgtttttgtgggtggcgagatttgagaaaataacttttgaatttttattgattcttagaaatggttataattattttggacatagtactggagtttgattggatgttgctttaagggataattttttttatagacaaatcttattaaggagcctttgtgtaattattttctttatgtgcaaaaaaaataaaaagaatacaagagcaacatttccatcattatatgttgcctcttgttcaaaaaaaaaatagaaagaaagaaaagaaaaaagtttgtagtattttattttttttttatttgttttggctcctagaataaatgtaaaagattgtctattttcatttaaaaatcctgaaaagctagtttgtggtactcttatggtggtttgtccaaataattcttaacctatctttagttcaatgtttattcaaatgtttgtcctaaattgatctattcttttcgagtgctcactgttcagtttccaactccatcagtgaaatccttagccatgaataaatattttcaaaaacctgtgaggctaatggagttgagacttctacttggtatattttttcgaaagcatttat

SEQ ID NO: 146288 - DNA, 507 bp, Cannabis sativa
  modified_base (109)..(112): a, c, t, g, unknown or other
atgggacaaatcccaaatgattgtcatctgttagacaaacataatagtgttagatctcgatagataaatatttataaatgtaacatctagttgtacatccaaagatgannnnttagactagtgtttacaatatgaagtaatgaagaaccttataaaataagaataactttgactctcgcctaccaaaaaatcgttgaattcttattttaatagaaattatcctttactttttcctctcagctttttcatgtcgaatttgcttaaataatatatcattggatgaatggtttataaatccttttcttatgatgtcattctaatttctcttatgaaattaaatggcacagatgactatattcttgatattctataccgaagacataaatcctcgatcttagaaaatctcctacttgtatatgcttactatatgcaatctaaacttagtgttaaattagtagttgtggtccaagctagaataaaactcaagaaatatttggtataaattta

SEQ ID NO: 146289 - DNA, 1477 bp, Cannabis sativa
ctggtaaaataatttccaacagcgctaacatctcatcttcgactgtggtccaaattgcaaacatggctttccacgctttaatcttccatttttttttaaagtggaagcatcctctggttgtgtgacttcattgccaccaacgatctcccacaagtcttggccttggagatatgcttccatgtgcatcgactacgtgttataattttggttgttaagtttcttaattctgccaaccgcttgaaggtcactcatcgtgtaaactctgtagtactaaaccatacacgatcactctaagaaactcaacaaagtactctttcggaacaaactcgatccggctatgataccacttgttggacaccacaacacgcgaaaatgtaattactttattattgtaaaagtaattacaccaagacttgaacactttttactagaccactatacaccaaacacttacttttttattttattactagacacctttactacacacttgtgtataactcatacttttgggacattttgtctttagacacttattaagaatccacacacttgggtgtagataacttagcacacactaagacttcacttattttttgtgcacccacatccatgagaccaaaagtctatttatactgcctcatggttggttgatgaagccactttaatttactagagaattctagcattaggcttgacccaaaaactagatatatctagtgactattgtttctaaaaatttctagaaagttattttctagtcatttcttacatttatctagacttttctactaatctttggcaattacaataagttgtcttaaatcaattaacaaatatgtaactagaaatttttagaagtttagaggaggtgatgatttctaacatacagtagtttggagggttttaccaattaccgtcaaaatttaaccttatagaattaagtgcaagtagagtgatagttaagagagtttaaccgcaataaactatataaaaaagttttttctttctttcctctatttttttaataatatttttttcttctattagttctttttctattgatatttattttatatagtttatataatgtttttacaatcttgaagaatctagcggtttgtcccatgcatgtgtcaggccttggaaagacacacaagcagatcaccattttgggccaacacccactactgtgacattctcacaacatactgatgactcatgccctagctctcactagggatgcacatttttcccacaggaatggggcccgcagggacccgcccctaacagggcgatgattctccgtctaaatggggaacgaggcggggacgggaattattttttgtccccaaatattaaacgggacgggggcccgtttagtattatcttatatttctagtaatattttataatttataatttatgtttacatttttttagtatattagtatcttttttatgaattttaagttgt

SEQ ID NO: 146290 - DNA, 822 bp, Cannabis sativa
  modified_base (515)..(522): a, c, t, g, unknown or other
  modified_base (769)..(776): a, c, t, g, unknown or other
attccaccatggcagttaacacccaaaaatagatggaaagggctaagtgctaacagattttgggtttaggaggttttaccaccaaaattttagaatttgtagttagttgcgaaaacctgatcactaaaggaggttatgccacaaattaccctaaaataaaaactaaacatctaaaataaaataatatactatacagtaaaacttatataccataaaaaaattataacttacaataaaaatatatataataacaacaaataaaaaatatatatatatagcatgctaataaaattatatatcacatcaacaaaagtacaatagaaaatagaacttaaatactatttaaaaaaaatataccgcacaacaaaaaatacatatactattcaccaaaatatatatagtaacaataataattaaaaaatatatatgttactaatatatatactatactaaccaaattatatatcacaattaaaatatatataccaccgttgtatataataaaatagaaactnnnnnnnnattatttaaaataaataatatatcttacaattaaaataataattaaatatacgtagcatgctaataaaattatatatctacattacaatgtatgtgttatgctaacaaacttatataccactattatacataacaaaataaaaaataaatatcatctaagaataataatatatcgtacaacaaaatagaaatatactgtacaataaaatctaaatacaaaaaattgctacttttagtgacaactttnnnnnnnnaacataatttttttgtgactaaaacaaaatgttacttgtgactaaa

SEQ ID NO: 146291 - DNA, 711 bp, Cannabis sativa
ttgtacaattttgaaaaatacatgatctattttgtcatttaacaaaacaaaaagtctaattggtattttttgcaaaatacaagatccaaaatagtgttataaaaagcgtaaaatttagcatatgttaaaagttatgttgaatttgacacaatgtatagtattttattaaatttaggacacaataaatgctaaagtgctaaataaatagtatattgttatttttttttagcacttttcaataaaaaagttctccaatggtatgctataagttgtgtcaaatttgacacgtgctaaaaattaagccgaatttgacacaagatttttagtacgtgtcaaatttgacacaagatatagtattgtgacaaatttaacacgcaataaatgtcacttttttaattacagttttatcattaatcattaataacatactttaatacatacattttatttataatattaccattgtcattaatgatattatgttatgctaaatataacatttgttcattttttgtgccaaatgttttgggccccgaaaaatgtacatctatttttttttaattatatcatatatggtaataaaatgtgatacttattaaagtatctcgaaattgatactttctaaattaagggtgtgtagaaagtcatccaatctaatttcaaccgactgatccaatcacaaccgatccaatagaattggatatccaatca

SEQ ID NO: 146292 - DNA, 677 bp, Cannabis sativa
  modified_base (571)..(578): a, c, t, g, unknown or other
atatctggagctgattagtgaaggcagtatgccttcctatagcgagacggatgccttgctatccctcacttaggttcttctagctttttatacatagcaaggttgatgcctcgctatgcattattaatgttatccttatgattgtgccttctgacgtgaaatggtttctcgtcaatacgtgaatcaatagttcgtacgtccttgtctcgcttaagactatacaatcaatgagttataaatatactctatcaactctgcattcaatgagttattctattttagtatcctttaatataattgtcattatattcgttgattcgtattctctaaggtgtacatgtgtcatcctctgaagtgtcagccaaatttaaggtataacaagtattaattttccaataaatattatcaaaattacaaaatttaagttggtccaaaattaattaaataattaattttcaattcaaatttaattttctataaatatatataactgaattcgaaatccactgtattgaaataatacattttcaaaatttcatattaaaatacaataaaataaaactggaaaaannnnnnnnatttatgttggtccaaaattaaataattaattttcaacataaatataatttttctatttaattaaatttctacgaaaaatatcaaacatttaagtgtct

SEQ ID NO: 146293 - DNA, 584 bp, Cannabis sativa
aaaataaaaggataaaagaagaagtatttgaagtatttaaacagctggagtcccaggctcttggtttgagtcttcttggccggcaagagctggaggatttgttgtttgaacgggaggtacatcagcattctagccggaggtagaagaagctgcctcagtttcaccataagccacttgggaagcgtagaactcaaggtacatgtcctttgttcacccaagtagtcgaagtttgcttagggattagccttgcagcagtcctttcatcttgaaggctgttcatttcttctcgtccacccgacgaaggaccgctcgaagagatgtcctttcatcttgaaggttgttcgtttaaacagataaagtctcgatggtctcctcaagtcggtcagaagcctcgagatgcttagtcagctcaactattttcttatgggcagtaaaaagtttctgttggcttcacccaactccatcccaacagctttaagttttgccctggcgtcctcagcacccttcttggccaagtccacctccgccctcatggtgttggacaaagctgcgttcttggaagtagcaaacttagcccgggagta

SEQ ID NO: 146294 - DNA, 1138 bp, Cannabis sativa
caccacctgatcttgagcatctctgaccaccacaccaagactatgttttttcaggttaagatcaattgcagcatcagtattgatcttgtatctagagggagccactgaggaaataagactgattgaagaccgctgcacagcacataaaccttcagctttaagattggcagactcaaactcctgcaaataagcaactgcatgatcaaatataaacatgggagacaggcatctctgatgatgcaaataattgtttcgttgtgaccacaccatccagaggaaacaaaagaaaatacatagcatgcgtttatctaaagtctcaactgctttcgaaataaaggcataaatagtcaaagatttattttcagcataaaaactataaaaggaggaatttttccaggcagttttaactctagaacattcaaggaaagcatgtgtgaccgtttctgaagctgcatgacagagagagcataaaggtgcagggataatgtgtctatgataaaggttataggcaacagggatagagttcaaaagaatacgccaaacacagtgcttaaccttcgcagggatggaagagaaccagagtttagaccaaaactgtttatttcccaaaggagatgaagaggagggaatatctctagaagtaagagcaagatgatatgcagatttaacattaaaaatcccagaattatccttcccccagattaaaacatcagaacacgaatgacctgctataggtatatccaagatatgatcaataatgaaagcaggaaaatgacctctcagtttgttcaagtcccaagcacctgaaggagaaataaagtaagataaagaaggagagggaagagcggctatcaaatcagaatccttgatagtaaaattgggcaaccatcgatcattaattgtgttaatagtttgcccattacctatcttccaacaaaggcctctcttaagaagatctctaccccatatgatacttctccaagagaaagaagggttatgacctggaacagcatcaagaaaagaagtatgtgggaaatatctagcttggagggtaagactaagtaaagaattaggtgtttgaagaattctccaagcctgttttgctaacatggcctgattaaaatgaaccagggaccta

SEQ ID NO: 146295 - DNA, 536 bp, Cannabis sativa
aaagttcggaggaaaaaattactaattagcctaataatattggatatccattttcttatgtattccatagtacactatgggttgaattaaaattaatacaataacacttatcctctaaacatagtagtttaatacaatatgaaaggttgatacagaatgtgaattgaatcctaagatgttaaagtactgttatcctaaatcattagtcaaaatctgttgtgctatttactaattgttatccaatcaacatatctatccttcatgctgttttttaattgtaattttttttttgtcaaaacatctttcataatagtaaaattttaaataacacatctcaagtaaaaccttctctcaaaaaatacaacatcttttctctcattcgtaaaaaccattatttaaaatgcttaggattattctcaaaatttctgtttctatcatctacatttttgtcattttccattaatcaggatatccatcatatatttcaacaccaataatttactatatattgccaccttccacttagtatgtttttc

SEQ ID NO: 146296 - DNA, 520 bp, Cannabis sativa
caccttgtcggcagaagtgaatagccttcaagaggaaaggggagttcttcgaactgtcttccgtcggctggaagaagagaagaagactaaagaggaggagcttatagttgaggttgagaagtacaaatcggaggtgacgatgcaggaagagaaagtacatgccttagagacagtgagtctcgagattttttatgacttttggaaggctaaccctcaggcaaattttgattacctgggcaaggccaaagacatgtatcttgagaactgcgcttcccaagtggcttatggtgtacccgaggggactgcttctacctctggctagaatgttgatgtaccttccattcagacaacagatcctccagctcctaccggcccagaagacccgaactgagagcttgtaactccagctgtttaaatacttctttttttatctttctttttaatatcttattcggccataaggcctttttttaagacatcatgaccggccaagcggtctttaaacttggaattatttttc

SEQ ID NO: 146297 - DNA, 554 bp, Cannabis sativa
acccatctacatgtagtttccaggtcggcttatcttcattgttacttggctgaggtgtttgtaccgactcggggttgctttctgctatgcttcctttcttgcccgtgtaatctaccacaaagtctactaaggcttggcctttgattgctgttcggagttggaaagtgatttcatactggcccaactctaccgcccacttgagtagccgtccagaagcatctggcttttgcaatatttggcgtaatggctggttggtgtatacccgaacaagatgaccttggaaataaggccttaactttcttgttgctagaataaggcagtatgcgagcttttctattaatggatatcggccctcgacctcaatgagtcttttactgatgtaatacactgtgtgttgtacgctgttctcctctctaattagcacgacgcttacgacatgtgccgtgacagctaagtatattccaagttcttctctgtctagaggttttgagagtacgggaggttttacgagttgtgcttttagctcttggaaagatttttcacattcttccgtc

SEQ ID NO: 146298 - DNA, 603 bp, Cannabis sativa
  modified_base (446)..(451): a, c, t, g, unknown or other
  modified_base (563)..(578): a, c, t, g, unknown or other
aagtgtaaaaatgaaaaaatccctcaaaattattgtgtttagtttggtataagaatgtaatggaataaaatgtatattgactaaaatattcctattacttttactattataattataaaatatttaaataaaaggtaaaatagacttttgaatttcttttattatatttttactataatattataatagtcttataatggattgtaattgtgatgacatttacaatagttttttattgtaatgagaattatcttatacaatgtaatagattacaaaatttaaaaaagaaaagtaaacaaagtaatgaatatgttgattaccattacaattcccattcctataaactaaacataccctaagaatgagacttcaaccaaaaaattaactagagtaatttggatcataaataattaagtttaacttttagttgtaaataaatacctaannnnnntttttagcggtaataatacctaagctttataattctagaacttttgtaggtacccgactgtaaagtgttaagtaaattaccacgtgataattcctaattggtccaagtcatnnnnnnnnnnnnnnnntttaaaaaaaaataatttaaatata

SEQ ID NO: 146299 - DNA, 506 bp, Cannabis sativa
gagtcaaactttacattaagacataaactagccataccacgaacatatttgagacattagtatcagattcggagaacttttatttttgagcaccctaagcacccggtgcccgggcacaggttgacaatttgtcaacctgggccacttccaagcatcaaatcgaaaaatctgactttcgcatcttctttgtcttcatcaaatacgggaaaacaagtgctttcgggaaagaaacaggccaacatgggggccaaaacaagggcccattgcctaggttgacatttctgatgagttttttcaaaaattctttcgagcatactctattttttcatcaaagattaagattcaactatttttggggaccaaccgaaactttcagatggcctaaaaatggacccagcgtccaggttgacacatgacactaggcccaacgcatattttcaacctgggctgtttccaatcagttttccaaaaaagtattctgggtatttttttgtcattagaaataa

SEQ ID NO: 146300 - DNA, 766 bp, Cannabis sativa
ggtttaaatttttggtttaattatttaaatttttggtttaattataaatttttggtttaattataaatttttttaataattataaatttttttaattttttaataaatttttttaattttttaagtatataaaatcaaatttcccttctatatatgcatgtgctttgaattagctagatatgggtcgtcataatctgatttatatgcattcgcgccgcttactttttgtgtgatacatcgatcattgcttaaagatggataacgaattgcacaataatgatattacatgtgctaagcaccttgtacatatatacatgtatacagatataatagtgcaattgttaataaggaaatttgatttttttttatgatttattagattaaaattatttttttaaatttaagttaactagtaaaataggttaatattttataaaacttaattctaccccttctatttcagtcacctaatctttcctcttcctcccttatctctttcgctctatgaactcaccctagagatttgacccgcattccaccaccataactttggtcccttctctccacgaccaccataaccacagatccaaggacccacagacccaatgactaccgtggacccagtgacttctccatcaactacaacttccctatcgacaatgttgtcaaaagaataaattgtatgattaatatttgttatctgtgagtacatgttagatttagggtcgaaaatatctagatctgagtttcgggcaaaaaattagtt

SEQ ID NO: 146301 - DNA, 621 bp, Cannabis sativa
tatttattttaaaattacgtatgacatttgaaaaaaaatcataactataactaaaatctaaaataaaactaactatacgtggctagacacgtaaattctgcctagtatatatatatatatatatttatatggtcgtgaagatcattgagaatttgagatatggagatccatgtcttggaagaatttaattttactaattagcaagtggcattatttctttcggatttttacaccacatattaaattttttaatattttttttactgtaaggcaaaatatttttcaaaaatactgtgtactatgataagttttcattgttattctacagttatattttagttgttctactgttgtttttaattatttcgttttgttgttttacggttattttataaaaatacactatttttgtaaaaaaattcttgtagtagtaaaattgtaaacttttgtccagaattcaatatttttataaaaattcctatttctttttaaggtagatacctttttggatattgtgttttacaaaagttacagattggactctgtatttttcaaaatagtacaaatatgactctgaactcattttttgtcaaataaaacttaataataatccgacctaga

SEQ ID NO: 146302 - DNA, 1019 bp, Cannabis sativa
tactctgtaaaatttaaaaattgtgacaaccacaggtgagtacagaccacttttaaattactataaaattttatttttggttacaattaacttcagtagagagactagaaggaaaaatagttaacattttgatcaatgggtttcaattcataactcgaaatttgattcatttacgtgttaatgataacacaatactctcaagtattcatttaattattaacttttattgatatttaataaatttatttaactattcatctttataatattctatctttttattattttatattatatatagatattattggatgcttatgtggtgtcggtgatattgaaattgttagagatcgttataaaaaaagagacatcaaaattataatagattagtaagtattataattttttatatacaatttacttttttatttttatttttacttattattaaattctgttaatttttatgtatagttcgatcacattaaagataaccttatgggagaaattgagtgagatgttcaaatctaaatttatataagaaagatggtggtccatttattgtgatagtaacttctactaccgttaaaaaattttgaggtaattatttatttagattccaccattcaatatttgaatacaataatatatgtttgtgtatattaatttaaattttttctaaatagatgaaattaatttctcttctacaagtgcaactaaattctatattaatcttcaaatggattatgtagcatcattaatccaaaaaaattccgccaactccaaaagtgtggaagttattgaaagttataatgttaagaagacaactcttgaaaaagatatgtttctcaacatgatgtatattcaaaaattattagaggctaattggagtgatattcaagtgaaagtttttattttttggtattattattactattatttaaaagtttcaatacctataattttactctatgataattattttagggagctaatacaataggtattgtaatttttac

SEQ ID NO: 146303 - DNA, 659 bp, Cannabis sativa
tgaaaaggaagaccaatggaaggaagggttatatggcgctcaagcatgacatgagtaaagcctatgatcgtgttgagtggggtttcttggaagctatacttcgggtgatgggattcagcgaacgttggattggtttaactcttagttgtgtcaactctgttcggtaccatgtcatcaacagtggtcagaaatttgggccgattattcctactagaggtattcgccaaggttgtcctttatccccgtatttatttattgtgtgtgcagaaggcttctcctcctcgattaggcattttgaggctactagactgcttaccgattgttaaggtagctaggagtgcacctactatctccaatgtgctttttgcggatgatagctacgtctattgctaagcatcggaagaagaagctaatcatgttctttcactccttcagacctttgaagatgccttaggttaaaaagtcagtctccataaatcttcggctttcttcagctccaacactaggatggatattaggaaccgcatttgtggtttgatgcgagttcaagaagctggggtggatagcatgtatttggggcttccaagtattgtcggacataacaagaacgctgttttggggttcttaaagagaaaatgagaaagagaattaataggtgg

SEQ ID NO: 146304 - DNA, 743 bp, Cannabis sativa
ttacaagagtgagagttccaaaaaatggaagacttagtacgagtctcatcgaccacgtccttgtgaacatacatcacctggtgcacatccgtatgaagaagaggaagaacagtcctacaactcttactatcagaatagtcttgatgattatagttagaagccagattacaactgtaatatgagtggagttgtgaggaagatccgtcatttaatcacaaaagttctgatgattatagttggaagcctgagtgcgactataatccattatatgagtggaattgtgaagaggaagattcttggttttcttataactctcagcatctatacagcagttccctcaatgacactattgttgagttacaatcatctatggtgacaaattgtgagatgatgaaagacttacttgctgagctgaaacaaattaagcgagaattgagaaagttatctggtcacctggtaagttcacatgctaacggttttcctctacaacaggtgaatgaagcactaatctccaatactacctttcacaattccgatgaggaaagtgtcccctctacaactagtggtgaaaattttgaagaatccactctatcaagtacatatgagaactaccatattgatgtggtacctacattattcatagaggaggatgataccaccactattcagaatgaaactctttctcattctaccattcttcccctacttctggatgaaacaaaatgctatcatactgatgtgat

SEQ ID NO: 146305 - DNA, 882 bp, Cannabis sativa
agagaatttataccacagtcatggcagcaacaatttataatttgtggagcaatagaaacaattgtatttttaacaattactcgagctcggttcggaagatggttcagaatattaaagataatgttttctatgtaattttttttactagtgttcttatagtgtttttttcgtgtttcttttcgttttgtttcagtgattgtggtattttcgtaacatcctttgctgagtattttattgatggcaaacccatcccatcctctgattttgatgtggaaattcaccgcgatcgtttggctgtgtcattttatcattatggcatgaagaagcaacttgagaacattgaaagcgaatccgaggcccctcccaaccttcccaagaaatgatatgtccttttcaatcagattgtgcttgtttttatgttgtttttggaacaaacattggtgttcttttatgtttttttaagttttttgtagacaatatgtaatctttatttctgtatttttttttttttgtttttgttatgtataaacaagttgttatgttaaatgggttagtatttttatttcatctctcatctttttatggatttttttcatatatttttctttttgttttttctgttttttcccaatttcatcatcctccctaaatggaaaatttagttcataattaaatccatgaccattcctataacaatgttcagcatagataaattaaaaaggaatagagaaagaaactgttggtggaatgactctggatcttcactttgatttcctctgttcttcttgcctctttcttctgtgttttagggttccaaatcgcctcccctgacttccaatcgcagttttctatttatatctaatttttagggttcgttggaca

SEQ ID NO: 146306 - DNA, 716 bp, Cannabis sativa
  modified_base (50)..(56): a, c, t, g, unknown or other
atctgaagcagccaccaaattcttcacagacaatccttacttccaagtgnnnnnnngagcacatcaattgcgtggaaatggaaatttggtatgtacaagttgttgctctcattcattgacagtatcgaaattgtttttttttttagataattcattatattaattcttgtttgtgcagtatattctagtggctattgcaaactcttggtttgagaaaaaggcacaaattgtgagtctttgggttggtgaggaatattggcatgtgaatttaactattaataagggatcatcatcttctggattagagcataggttttcttctggatgggctgcatttgcaagagacaactctcttcagaaatctgatgtatgtatctttgagctgatcaacaagaatcaacctaagattaaagttaccatatttagacaaaatgcaagtagtatgactcaacaataaactcttgtaattatatatcaatttaccccagctgaaggggttttgtttttagcacccttaatcaatatcaagactaaaatggttgctaattaatgtacatgttattagtgttttgttaatttttaattaattctcttaagccatgcttatttgatttctaaagttcactttaaaggatactttaaaccaacaagaagattacatcttttagggctcgtttggtacgccgtataaagtcgtattgtattaagtaataaat

SEQ ID NO: 146307 - DNA, 789 bp, Cannabis sativa
gtaattagatcgttcattttttagtgaaactttttatctatttattatgcatttttacttgacaaaacttattattcaattttttatttgacaaaatttttcatttgattatcattattattgcatgtgttattttattgttcactattatactttatgtaatacatctatcaatatatattaacaaataaaaatttaaaactttccaccacaataattataaactttgaaaaatttataatattaaaattgttccatattaataaatcttaaagaaatttaaattattgtttagaaaaaaatattcaaattattaaattaatttaaaagcttaaataaaataaataaataaaaaaaatcattcatttttaaatgattgaactcatgtcattgtacttgatgtaagataactttaccacttagggcaagtttaatgggagagttgttggttgcttgtcaggtttggacttagggttagaatgaggtagaggagagagaataaaaattttagtgagttaatattagaccgtaactactgtttatctacggagcccaacaatttttatttttttaataaaagaaaagtattgattggttactttttttacgtgggtcccccaatagcaatttatgctgcttccgttgatgatggacttacaccatgattattttgttagctatattatttattgtaagattaaataacttgaatactttatacttttctcgctacaattattgttgagtggaaaataaatttaattcaaaattaatatataaattcaaaat

SEQ ID NO: 146308 - DNA, 868 bp, Cannabis sativa
aaattttttattattatagttaattaatctatcaatccttcatttttttcttagtttaaaatttcttaattatttatttatcaacaataattttttggtattcattctccttttttttttataattcttaatttgtctaattatttttaacgattaatgtatatatttaaacaaaagcaaatttaatatagaagaaaaatataaaatttgttaagatagactttttattattatcaatttaattacttatcatataataattattttgatgactaatttataagttttgaattttatatcaagaaaacctaaattataaaagagataacaaatcaatttttatttttttaaagtttaatttattgtatttagccaagttctttaagcataaatattttttttcaaaatgtagtattaatataataaaattatcaacaaaatattttaatgtaatgaattttggagatgtccaaaatgtaatattaagtaaatattattttgaatcttgtattttaaaaattgccgactgggctatttattttgtcaaataatttatatatttttaaaataaaatataacttggaggtgttatgaccaaatttactacacattttgtatctctttgtactagaagctgactttaaattttttatcttaattctattaaaaaaaaaaatttgactaaaattaggtggagatagtagtattatattttatttttaaaaatataaggtccaaattattttttaataaaataaaatgtccaattagtaagtttacatatgttatagattattattattatggataaatagctataaattaataatataagatttgaaaaaaatatgtaatttaaataatgttt

SEQ ID NO: 146309 - DNA, 743 bp, Cannabis sativa
acttccacgaccaacgggtcgttgtgcgggaaactaatcttgacagcatcttcatcactaaatgttatggtgggctcccctgcccgtggtacttttggtttcctttcttcgacaaccagaactacttcttcttgctcatgctgtattgttcgggcatacctttcccgggctttgcccgaatctccagctatgtgcggatctccaatgatgacttgcagatgtccatctactggtagtggtagtaaatcttggttgttatcgcccctttgatttttatggaccttgacatatttttgcacatgcagattattctttcttatcagaaattcaatttcccgctttagattgttgcatttgttggtgtcatggccataatccccatgaaatggcaaaacttggtcatgtctctcttgcttacgtcttttttcatgggtgcgggcttcttgtacggagctaatgattgagtagacatgtaaatagtttctaaatcttctgtcaggatagaaaaacagtaaacttggtaggattctccctgggagcctgtttgattttgccaacaaactttccctttttcccattgccttgcctattgttattgttggaccgtttaccacccgagcttgaaatgcttgggtactggggtagcttgacggatgtcccaacagagggaacttttggctggccaagtttttctcaacctctgctcgttgaatggcttcttcaagcttaatgaaaccatctgc

SEQ ID NO: 146310 - DNA, 515 bp, Cannabis sativa
  modified_base (449)..(456): a, c, t, g, unknown or other
tataatatgtatgttactaatcaatatctcatatgtaacatacactattgaaaaaagaatttcaaattctctttattcacaatatatatgataataatttccacatgaatagtaataaataatattattattatattattatcaatattatcatcatactatatctcatatattaatataaattaatatataactcctatacataaaattataactccctaataataattttatactaattaatatattatatatatgttactatcaataatatatctcatgtgtaacatgcacataatatattaattattacacaactaatataatatgtatgtaacatacatgatattaattatataaacatatatgttgtatatataatatacatataacatatatactttaatatatatatcatatacactactatgttaattccatttttggcnnnnnnnnttgacaaaaatattttattattctttgtatattttggctggcatatattgatatggttt

SEQ ID NO: 146311 - DNA, 1393 bp, Cannabis sativa
  modified_base (1157)..(1163): a, c, t, g, unknown or other
gataatcaaaataatactatacacacaacaaaaaataagaatattcatatctagccaaacaagttaattattcatccgaagagcatgcacaactcatccatgagcaacacagattatggacactcttggaaatctgaataacaaacttgtaaaaactttaaataatgatcttaaaatcatttgaacgggaactctgatagtaaaagcaatcatagttgtaaaatctttgtaacagactccaatccattgtcatcatagcgacatgcaatttgttataaaagcttgctatcatttctctaaaagtttgaatggacaataatgttttaactgcacataaacaaacaatatatttgtaggaccaaaattaaaataatgagtaattaaatattattacaaatttatattttatttttactacaaataaacaaaataagcattaatagaaaaaaagaattataaaaactactaacaatagtcactataaagaaaatatttcaaactgaaaaattataaagaaatgagaaataacttatcttgtcaaatgcaattagtgtctgaagtagatctacgagccctaattcaatcattaaaataattattataacttaaaaaacatcaataactttataactcaaataaccaaaaatttaaaattaaatcttaaatcatattgtaataatctaatttaactattttatatgaaaagatctaatgataggaaaaaaattgtttcaaaaaaattatatgatagaaatttttaaaatgattgagaaatatgattaatgatttaactaatttattaattttattaattagaccttacaaaatatcacaaaatatcttaattaataaataaaccctaaaatttatttttctctattaagcccttgtttagtgaaaatttataaataagacataatttaatttagaattctaattggttaattaaaatcaattaactaagtctacaagtcaatatcatctcaactagtgtgaaaaccatgaacctatataatcaagttttcaataagtagttttagaatttactaagtaaattccctatcttattcctcttgatttcgctatagattcagaattgcactcttaattatatagaacaatctatatgttccaaatatagatacgctattaattannnnnnnttataatctaaataattaaagatcttctatagatgatttacatcaagtagagacaaatttaccgttctaccccttaatgtattttatccttaaaacacttagctttttataaatgacatttctataaactaatataattttattacttattaatttttagtgttacgatatatcaaatactgccatatatatttaatgatataatatatttattcattgtaattataata

SEQ ID NO: 146312 - DNA, 622 bp, Cannabis sativa
  modified_base (472)..(478): a, c, t, g, unknown or other
aatttagggtttgaaaattgaaaaatccgaaattgggtgaaaaatcccaaaaaaattagatttttgggtgaacaacacgtttggagtgcacacaggctgcgttcaacctcatctgcgcgcaggaggctgctggcagccttgtccgcgcgcgcaggaggctgcttgtagccttcgtgtgcgcagctagggagacgtgtgtgtctgaaggcagggtgcttgagcgagaattcaaataaaatttttcaaaatccgtgcgcgtatgctagtgcgatgggcaccatcatgacacaacttcaacccgaatcttcaaaaattcataactctctcaatttttatcggaatcgagttccgtaaaaaccaaaatggattaatttttcactaggaatccaaataaaatatttttagaatgaaaataaaattattttcatggaaaaatttcgtaaatcacaaacattcatcaaataacacatannnnnnnatgaacacatccaaatcaacatacagacaatattcatcgttttaaattgatatttcatgaaagtaaattattattatggtttactaacaaatatgttgaattaacatcctaaatatgaattctctaaaactatgaaaataaaca

SEQ ID NO: 146313 - DNA, 553 bp, Cannabis sativa
cccctactgcaaccgacaaggtctcagtggcctggcttgaagaagtagtagtgggttttccttgggacaaggagcattggtgtcagaaacgaccggagcaggaacttgctcttggatctcgttgtcagaaacctcgagatcaatgggtttggccagggatttcttcttatgggcagtggttttcctttgtctcttggggggaaccacctcggcagcagtggaatccctagggttggttgcccttttcttcccttttcggtccatgatatcttaataacccatgtctacaaaacaagatgaggcgttactatcattaaaaagaccgattaaaaagggaaggaatataattttccacctaagggatttaccaaaatcactagaaggcgaggaattatgccatcacagttattctctttggagcttgtccaacagtgaggggtagacgaatttctcctaaaggcgcaacactttggttggagaaaccatatactagctgttagaaatattttaccaggatctagatttacaaccaaatatgtttcattaacatcct

SEQ ID NO: 146314 - DNA, 1187 bp, Cannabis sativa
aagacaaagatgtttattgtaagttttgcatctttgacgatttaacagtgtggtatataattttttagaacaataatatgtttagttttgcatcacataaatgtggtatattgtttctaataatgtggtatattattgtttttatgtggtatattgtttctaataatgtggtatattatttttcagagcaatgatatattggtaaaaaatatctaataccagtataagatacaaataaaaatcatacaacacaacctaaataacatattagacaacaacaataacagcaaaatctaactgcaacaaggaataaaaataaaagagtagcagaacaaaaaaaataaattatcatatagttacaaatcaaatctaagaacattaataagaaagaatttatgatactggaaaaaaaccagagaaaataaacctctatgaacaaatttgaaaaattaaagggaggagagaaaagaatcgggaggcaatgatccaaaaattcaagcgaagtaaacagaaaattttgagggagaagaagctttggtcgttgtttggattcagcctctgtaattttagatctataagtttgaggtgtgaaatccaatcgaaaaatgaggagagcttcttcacaccttcgattaggagaaagtaggagaaaataattgaaaaaatttactagagagaaaaattatatgagagcataacctttgatcattttttggatgaatgacgacagaaattcttatgataagcttgaacaaaactgaattaattggaaaagattgaagacatgctccatgttttgatcaaggtctgcatcgtttttcataattttttttgaagggataaaaaatataataccttttatataatgaaggatattttaggtattaaaaagtaaaaaatgacacttgctttattattttaaaaaagaggcataaactataagtagagttagaaatagggtcatttacttacatttctctaacaattatttaaataaaggttaaattcttctcctttgggccttgtgtgagggttagggggccattagtagtgggataccacatactggacccaaccctccctcacatcaacaaccccagctgttaaggcccatttgtcttatttaaataattgttgtaggctaattatactagttttacctaattaaaaattgaattagcaacata

SEQ ID NO: 146315 - DNA, 966 bp, Cannabis sativa
tttattgctttttgcaggcaacgattcgtttcctgtccattaatgatccggcgcattcaattggtgtcagacaaatactcaagcatttctagctgccctgatgagcacttatcccaaccgttagatctgcagaatgtgaatcgattgcgattctcaccgcacgatgacgcctgatcacagctgcttttgtacccgttctggcctataaaagcaagccttttcccttcatttggttactttcactactttgccattttttcgcaagagctcttttgagagaaaagatttcagacaccacagatttcttgttgctcttcctccgtcattgtcaatccaccttataccgtcgactgacaccgacccccagccttcaactttcatgtaagttctctggacactttgtgccttctatcgtttgtttgcatgttaggatagaacttctgtgttgagtgttggatttctgggaaataactctgactgagtctgttgtataacgcgtagaatcttctttatttgtgtctttgttattttcctccatttttctttagaatcgacccctctgtcaaaagactgtttagggcatggggcgattttggctcccacattctgcgtttttcgcttttcttctgcttttgctgcctttgggatttttgcacccgatgtttgctaaggaaagtcctttgagtttccatttttggcagacatccggagggggcatctttccagcggttaggggacccccattcccttttttaaaattagggtttggtttggggtctaactactggattctttcttttttcagaaccacacatgtctacccctgcgtcaggaactaagtcttctaagaagggggcggccgctctggccaccctggaggaagttatgaagggcccggttgcctaggataactacacgcgccgttctaacggctgggaagcggatgaactccgctccaccctgatc

SEQ ID NO: 146316 - DNA, 611 bp, Cannabis sativa
  modified_base (159)..(173): a, c, t, g, unknown or other
acttttgtccaattttagtaaagaaagtctaacatggacgaaagttcaagggcatgatttggcacatgtcaaagttcaaggaacatgatctagtaaatataaaagtctggagagaatgatttaatacataaagaattactgaattagtaaaattgaatnnnnnnnnnnnnnnntcctcaaatccaacaatctcaatagtttaggagaatttttaacggccaggacaattcaggggacatgatttggtaaatgtcaaaatttagggggcaaaaatcattattagcctttttttaagaaaaaacgaaaggtaaatttgacaaagcccaataaatgaggatatagttctagctcgacaataggcatacctcgctataaataataaaaatgaaagaaatcctaacaaaaacctcaactaaaagtccaataagccaacaagaatcaagcaataaagaactgtgaagtatactaggtttttaatcccagtgaacatctgatagagtccacctcccaatagttatcaaccaacggataaaactgacctaaaatgttggatggatcttattcgatccaaaaaaaaatattaggtctaaaatattggataaacctaaatt

SEQ ID NO: 146317 - DNA, 909 bp, Cannabis sativa
ggatacaatatctttaaagtgacttggaaaaaggggtttggtgagtatgtctgctaagttagctttggatggaacatggctcatgcgaaggacaccttggttgatcttttctcgaactgtatgacaatcgatctcaacgtgttttgtacgctcgtgataaactggattttctgatatatggatggcagcattgttatcacagtgaagagtggaggggagtgtcatgttgatgtagaaatccttgagaattgaaagtaaccatgtgagttcacaagttgcatgagccattgctcgatattctgcttttgcggaggatcgagagatggtttgttgtttcttagacttccatgagatgagggattggccaagaaatatgcagtagcctgttatagaacgtcttgtgtcgagacatgcaccccaatctgcatcggcaaaagctttgagctgaacagtgtcggttggagaagcatgaaagaaaaggccttgtcctggtgagttctttaagtaatgtagaattcgtgtggaagcttgcatatgaggaagtcgaggggcttgaagatactgactaagtttattcacggcaaaactaagatcaggccgtgtaatagttaggtataggagtttccctatgagacttcgataaggggttggattaggaagtaagtcccctgaatcattacttagtttggtattgggttccatgggggtagaaaccggtttagaaccaagacagcctgaatcttgtaagagctgtagagtaaagggtctttgtgaaactgatattcctttcgaacatcgagcaatctctaatccgaggaaaaagcgaagagggcctaagtccttaagtttaaacctggtgtcaagtgtggtaatgaaagtgttcatggcagggatgttgttggtggcaat

SEQ ID NO: 146318 - DNA, 609 bp, Cannabis sativa
gacctgaattggtccaaaggaccagtgaagccattgaaaagatttgatctcttatacttgcttcgcaaagtagacagaaaagctacgctgatccaaagcgtagggatatcgaatttcaagcgggagactctgtatgtcttcgaatatcacctataaaaggggtgcgtagatttggaaagaaagaaaaattgagccctagatacattgacccttttgagatactggagcggataggtcaggtggcctatcgattagctttaccacccgagttattcggggtgcataatgtcttccatatctctatgttgaaaaagtacgtgttaaatccaacacatgttttgagttacaatgctattgagctccagacagacttatcttatgaagaacaacctatccagatcttagacagaaaggagaaagtactccgaagtaaaacgatccctctagtgaaagtcctatggaggaatagtaaagttgaggaagcgacttgggaattagagtctttgatgcgggagctgtatcccgagttattcaggtaaatttcgaggacgaaattcttataaggaggggatggttgtaatatctcaataagcctaatagttaataatt

SEQ ID NO: 146319 - DNA, 751 bp, Cannabis sativa
taaaataatttccaacattatttctatagtttgtgcaagtaaattcaaagcgagcaggctttataatagttttcttcatcaacaacaagtgtattaccatagagttgtttggaactctttgacgttgcccaagccccaatttgttttatggaaagatgtggaccatcaacttcttaaaagagttaacttggtaagattttaggttaagatggacatggttaattgcctggtttatgctactagaattgaaatgcatgaacaactttttttactgttctctatctatgcagctggtcaagcatgtcttcgattggttgggcaaaaacgcttagcctttggacttcttgggttggtttaattggttggctctgtctccaatgagttaattacaggctatagatatctctattttgctagccacttgttattgtatttgggtcaatagaaataattgtattttttagggctattctaatacagtgtctcatatagttaaagaggtcaaaagtgtagtgacttatagattacaaattgttaaacacaagaatgtttctagagaggaaaatgtatacttgaaccaaattctttagtattagggtggttcttgagtgtctagtcaattttttcgtactgctcctttaggttgtatttgtttgtcgattaatgaagattcttccttcttgatcaaaaaaaaaaaaaaagaaagatgaaatagcaattaccattaattcatggaataaaatcaactaac

SEQ ID NO: 146320 - DNA, 1118 bp, Cannabis sativa
aaaatgccttttcttgtagtgtcataagatgataatagattaaagtaaaacctaatttagcgatcttctaaacaagattaaaacaataaacacgacattgacatagaataatagaaacaattttatataatggaaattaaaaattaacattcataatagaaattaaaaattcatgtcttgagttttgaaataacccttaactaaaagaagactactccataatttcaaacataatcataaacataattataaatgaaaattaaaagagtttaagaagaaaaactagacgtagatgtagactctcctcttctcatgagttctctccatcaaaacatagttcaaaagttgctaaaaacaaaccctaaaagtctcataaatactcctaaaaatatcttagttagataaaatttcaaaatttggtagaattcttactctcaccacgaccacgagttcccctcgccacgacaacaacttgctgtcgaaaaattcacgtattcagattagtattttggtcataacttctttaatacaactcaaaattggatgattcaagatgttttggaaagctaaaaacgagatataccttatgttgagctctaagtccaattctacctttaaagtcgtctaaattaattaagctctaccttgtaaaaccgagttcgtcggcttccactattttccaccaaaatgtgctaacatcctttcaaatgactctaaatacatgattattctttaaaatagtctaacaaattataattactctaatcaataatttaaagaatcaatttaagaatattattacataaattggtcatatttataagacaaaatattgacttatcacccgtgatctgtaagggaaaaacccgggagctgtacaatctcacatcgcctcgaaaaggtcatgtgtgatgattctaagaatttgtaggtataaaattatagagttgaagaggacttaaatagattgattagtactacctatatcaataagatgcagcttgtttactagcagtccatcatgaaagaactccacagttaaacatgcttaacctggaataattttagaatgggtgaccttctaagaagttttttaaggaagcgtgcgagtgaggaca

SEQ ID NO: 146321 - DNA, 632 bp, Cannabis sativa
tcattagctttggatcaattggtattgggccttaaacttgggctttggtaacagctaatttcatttaacaaaggtttgttaatatgctaagaatttgtttttgatctatataaagtacagatacattagtattataggagttataactttgtaactgtaatattgatcacatcaccattgagtagttcttctttagcttctcattgtcattaataagttacaaacacaagtaaactctccaagtgaaatttgggacatttcaatggggacaagcatcatcataaatgctaaaagaaaaaaacacacacaagaactcgcttgacttgacttacatgaaatcaacaacctaaagcctcttttattatatttaattagtgagtcgaaagagtcacaacaaaaccaattcttactgttacttacaatcatgacttcatattcttctttatcattgtattacagtaacaagactaaacacataagcaagagtgcatgacatcatatgtaaagaagtaatatataatctctataagacactatcattagcttctttaaaaagaaagtatcaccaaataactatttgagttcaacctactcattattcaagaaaatatacttgaaaaggaaaaaaatga

SEQ ID NO: 146322 - DNA, 1440 bp, Cannabis sativa
cattacatttaacttggcatggcaattacacacatatatcactagggtaataaccctaggcttttagaccgttcctattagggtaataaccctaatcccgattattaaataatcatacctatcattttcaacataagcgccactgtgcatactctacgtgctaactaccatcttacctgttgtcccgcaatagcagagattctgaatccccgggtgctcttgattaggtgccagtaatcctagtcacacaaatttgggattttcacaactagggttaacccctgattttcaactcataaaatttaatcatggaatttaaaattcagatagccatatagagctcggaacgagctttccaacgatataaagaactcccaaatcggagttcgaaatcaaaagttatgaattttcaaaattcaaactcaaaactgcccaaaaactcaagtgcgggccgcggcacctggggtcaactcccaggttcccacaacaggggcgggccacggcatgcccagagcatgccgcgacacctgggttccaaacccagaaactagcatgcatttccataaatttcagctaccaaacacttccaaatcaacccaaaagcatgaacaaaccctcaactcaacaaatagggttactagcaaataatagatgctcaactaaacataattcatgcatcaattccaataataaaccctcaatttcatattgtaaaaatcaacttaaaatcatgttcaaactccaaaacttcaagctctaaacttgagcttcaaacccacatattatcaatatttatcagcaactcattatcaaataaaactaggtttcaaacaatcaaagcttacccaaacacaatccaacatatactcacaaaattcatgcataaacatgctcaaatcaacaaaattaactccaactctttcatacatgcataaacaaggttattccaattcattcatgctttttccacaatcatattcagcaaagaattcaattaaatttagtagagaaactacctcaatctccaattcaaagcttagcataattaattctcaaaaatcaagctccaaccaaacttattcctcacaaaaatcaagttgcaaatcaagagagtaagagagggagagagggtcgggtttgggagagagagagtctagaattttcatttactttcctaaaaaatcaactttgtcaaagtaaatcaaataaggtcaaaagaccattttacccctcgggccatataacatgcataaacactcttaagggcataattttcatttcatacacatttaatttcatataaaattcagatttctcaataccaaataaaatgccaaaatttaattccaaattgcatttcgggcccgaacccggttcggcccaaaacacccggttgtgactatactgcgccaacttgtcagaacacacctgaaaagacaa

SEQ ID NO: 146323 - DNA, 860 bp, Cannabis sativa
tttattattatatatttttatttcaatttaatttttttcttctaaaagaaaataaataaaatagtccagtctattcttaaaccaaacaaaggttactttcagcataatccaatcttgtccagtcgagtccaatccagtccaatcctgcgtaccaaacgggcccttgtagatttagggtgttggatcaaagtcatgcatattaatagctgggtgtgcagaaagtcatccaatccaattataaccgaccaatccaattttaaccgatccaatagaatcgcatatccaatcataattggattggatcaaatgtaaattttgaaaatccaatcaaattggatcagttgttggatggaacatctgatccaatggataactgaccaaactgatctaattatcatcaaatggtcatccaattatatttatatattttaaaaatatatttataatttatatataatatagtttatttaaaaatatatattaattgatttaatattcatttaacacatgagattaaagaaaaaacactttaaatttaaaatatttattctcatcttcctaaacgctaataaaattattaatgctactgaatataaattttattttttagtagttttattatgaaattatgagaatgagactaaactaacatttattatgtatgttggattattaggttttaaattatgttttttttatatatatttttctttttaatgaaatcaacttaactggtagctaaaatatattagatggatttaattcaatacataaaaaatataaattgacattttatttacaaaaatacctccataaggtaaagacaacatttatatcttttatgtgattttaattaccaa

SEQ ID NO: 146324 - DNA, 696 bp, Cannabis sativa
tccatgtctactacatattccttataatagaaaatgcaatcgcgttcggacatgcatggatcttttcatacttcattcctgtggaatttagagtctttttcacttcaattgttgaagtcttctcgagaatgtcttaatgtaatccagatcaaaaaaaaaaaaaagtctttttcactttatatgtagatttcaggaagcaattgtcaaatagaaagatatctttaaaagcaaaaattgagtaaaacatttatcgctcactctattttctgttttgatgttgtaaaactttaccattattggtaatcttagttttttatcacaatcgaacagggggttcactactaaaaacaggttttacgttggtcaacgcgtctggtcaaatttgttgattgattcaaaagtcaacccacaattttttacttcagttatctaccgcgcaaataattattaattagcatcagttatctatccgatgctaaaataaaaatcaaagcaaaagatgaaatataaaaaaaatatatacactattagcgtcagtacacaattgacgcaaaaagctattatatacactattagcgtcagtgcacaaccgaggcaaaaaagcattaaaaaaagaattagttatgggctttagcccattttaaaaagatctaaccctaaaatataagactaacttctaaccctaattttcttctc

SEQ ID NO: 146325 - DNA, 805 bp, Cannabis sativa
ctactagaccgttcctattagggttataaccctaatcccagttactatacattcatgcatatcatcctcaatataagcgccactgcgcatactctacgtactaatcactgtcttacctgttatccagcaatggaaagagattttgaaaccctgggtgctcctgataaggtaccggtaatcctagtcacacaaattcgggataattcacacttagggttaacccctaacttcaactcaataaaactcaggcatggtatttaaaattccaataatcatacagagcttagaacgagctttccaacgatataaagaactcccaaatcggagttcggaatcaaaagttacgaactttcaaaaatcaactcaaaactccccaaaaacacgagggcgggccgcggcatgcccacaccatgccgcggcacctgggaccaattcccaggttcactcagaggagcgggccgaggcatgctccagagcatgccgcggcatctgggtgaagaacccagaaaaccagcaagctccactcgaatattcagcccaaagctcaacaaaactcatacgaattcatatttaaaactcccaaatcataaaccagagttgctagcaaacactaaggatttaaaacaccttatcaagtattaaaatccatcaattaaaccctcaatttagattgcattaaaaatcatagaattcaaacatgttcatggaaacatcaagctcttgaataagagcttcaatcttccagtacaccaaaatgtcgtcaataaacacaatcacgaacctatccacgtaatccttaaacacc

SEQ ID NO: 146326 - DNA, 643 bp, Cannabis sativa
ttttttttataatttatttatatccattttgcacttgtatttgaatatttgaagatgaaagtaatggttttgaagctgttattttctttgaagtgacgctcgttttgcaaaacgatatttaagaatgtgtttttgagtgcagataatattgactgtatcttgtttatggtatttgtggttacattttcaagagttgaagagtgcttggaattcttttgcttatagagtagatgtagtaaaaatgtttggtaggtatatctttaaattaatagttgcagtgttaaattgcactacatagtacatacatttcctcttcaacattcctactcatatggaatcatataagttaatccagtgacaactgaccgatttaattacaaccgaccgacaaatattgaatattcaattgggatcggatcagattggatgttatttttgaatatccaattagatcgaattaaatgttggatggggtgtctaaaaatcaaatacatttaacatgcaatcgaactaattaatgttttcatttagtttagatgaggaattagagtttatattgttacacgtaaaatatatatgtatatataaaaataaacattaaaagtttattctttttttcttggattggatggatctaatccaa

SEQ ID NO: 146327 - DNA, 962 bp, Cannabis sativa
gggcacaaaacccaacatatttataattttcaattaattatttttttttacttatttagttgatgaatatttataaattttaattaattattttttaatttgaatttatatatcaacttttaattaattttattttccactcaacaataattgtagcgagaaatgtatataatattcaagttatttaatactataataaataatacatccaacaatataatcatggtgtaaggccgtcatcaatggaagcaacataaattgttattggggacccacgtaaaaaaagttatcaatcaatacatttcttttattaaaaaaaaaattgttgggcaccgtagatagacagtagctacggcgtcctacaataattaatgaatacatttcttttatttgttaatatatattaatagttatattacataaagtgtaatagtgaacaataaaataacacatgcaataataataatcaaataaaaaattttgtcaaataaaaatgcataataaatagatgaaaagttttacactaaaaaatatctgaacgatcttgattactgttgatcttatctaaatttgtgttgtgctaaaatcagatatacgcaagtgcacgtagtcacaaacaagtaatataatgataagtaaaagagtatcgtctccataggaattgattagaaattaattaagtaaaaatcaatactaaacaatttaggtaaaacaaacaagaagtgctgatgatttgaactaggctaaaaactaaacaagagagtaaataaaatgagaaaggaaaatgagcaaaatgatgagctagaacaatcaaatccacttagaatgcaaattcaatgtaaatgccatagaggaatgcattagtaattaaaatttgtcaaccagaaatataaatgaacatatgatttttctaaacctatatgttatgggctctcaagattaaattaacatattcctataca

SEQ ID NO: 146328 - DNA, 540 bp, Cannabis sativa
  modified_base (488)..(491): a, c, t, g, unknown or other
aatctttataatattattttaataataaaaaaaaataaatactattttttaatataattttttgaagaaaaataattaaattagttaaattagtaagatttttttatttaattttctaaaaaaaataatttaactttttaaagttaatttaatgtatttaaaataatttactaagtttactaaaatatactaaatggttaaaaaaaaaatcttttcaactaaaatatttttttagtatacttagtaaaataattttaatatacttaaatataacttcaactatttgtttaattaaaaaaaaatacaataaaaattatatataaaaacattaaataatatggtaatatataaaacttgaaaaaataataatgcaaatcaaatataaaatcataaaagacaaagtaaattgaaatagcataaaatcataaaaattgacagattcctccagcaatatttacctacccaacctcagggtagtgcaacatgtnnnnggccgcaacaacaacctttacagcagactcagcaatctcctaatgtgca

SEQ ID NO: 146329 - DNA, 709 bp, Cannabis sativa
  modified_base (666)..(684): a, c, t, g, unknown or other
atgtttgctacttccttaacatatctggacccgtcaattgagattgagattttagcatcctcttgcaatgacatccaaataatgtcgaaccagtaaactattctagtatggaagacgaaaaaacattgactttctttgaaaataaccatttgttttcttattttttgcgtctttccatacttaaaatctacaagttttacttgttggagaatttgctcccctgacagtggcaaaggagccaaatctccctcttcagcaccatcgaatgctttcttcttccgtctatcaggatgatttgtagccaagtaccatctgtgacccatataacacatcttgtgtccatttgccaagtgacgagcccatgtgttagtgcaagatattggacaaccttcgtaacattttgtgcttaagcctgataaattattgtaagcagggaaatcaatcactgacagtccataataaaataacactactttcagattaaagaattcttttttaagaccatcataggtctgaacaccattctcatacaattaacgtcaatcaatggttccaaatatatatcaatattatgttcgggttgtttcaggcctgatatcattaaagaaagcatattaaatttcctcttcatcagggaggaagattgtgttggaatatattttaccnnnnnnnnnnnnnnnnnnnaagtatgtttttaacatcctaaaca

SEQ ID NO: 146330 - DNA, 751 bp, Cannabis sativa
attgttaaaaatagagtctattttttgtcgtttaacaaaatagaaaattcaattagtaacatttataaaacacacgatgcaaaatagtatttactattttattattattattattttattattttgtttacacatgggttgtaaagataagcaagatgttacaatgtataaagtcgttgtcatgaacttaaagtagagagctgcccaattattaaaaaagatttcaagtatatggtggatgaatgtcgtgtgtgcttataatagcctaacaaagtaattttgtttttttcttttcatataaatatcaaaatgttttatttacacctttaaaatttataaaaaccccaaatttaatatttttatcttatataaaaagttaggtttttaattttacactagttttccttaattttgttcttccttcttatattcttacaaaatatacaattaaaaataaagtatattttaaatattaagagaaaaaaattaaaaaaaaaaaattaataaaattttatcaaaaaactaaaaaaaaaattataaataacttttagaaagtataaaaataaaattaacataattattgagtttaatatacaagataatatgaaaatgaaaattaaaaaaaaatactaaaagtgatttttaataattaaatttaattttttaaattgttagagtgtacttatagctttattcctttaaccccaaccaagagtcggttagttagttagtctttaactaacttaactat

SEQ ID NO: 146331 - DNA, 730 bp, Cannabis sativa
ggtggtatgttaatcctcttagactacaccaaatcaagtttcaggggttgcgttattgctaaaaattctattgatgagatggtgattactctagtggtggagcagtgattttggagaagtgtaataactaatctgaagtctctaacattagtgagactgaatggcaaaactacatgaaagatacttattcagcctatggaaagttctgtgcagtttttggcactgtacgattaatgaattaacaactagtgttacttactgactaacacagaagtagttgccaaaaagtaatgatacagtatccctagaggagtaaacatatagagaggaatttcacaatgtcaagaattttgtgattaaggaaatataatgatagagaaaggttgtattgattgcaacctgtcagatcctattacaaagagaatactacatactacccttgaactgcatatcaagttgttgagattatatgaaatgtactttttattttatattagtgcaagtgggagtttgttggactttttgccctaaataaaacccatttcaatttaatcagatttactaattactaaagatcagaaatcattctatgttgcatggttcacatgatttattttatgattaagtttaatgtataaattctattgactccagaacataattaagtgtatatatttgtttatgattatagtgtcgtcagcatagtagaattctagatctacttattgaa

SEQ ID NO: 146332 - DNA, 580 bp, Cannabis sativa
atttgattgatgaggaaaaatacaatacttcgagtttcgaaaggattaaggccaagggaatttagttatgatatagtcatatgtagtcatatgatttttattttgaactctatgattcaatctatattaatatgaatagatttgaggtttattgccatagtgaagccttattttaaatttttaattactcgactaagacaaatttcaatcactattcattcattcatgctttctactccttatattagctcctcaactaccctatgggtgcttgtcacgttgatcagatatagctatacacatacacatgtatatacaaataaataccatatatatatatatattttgaaaggggccataattttattacaagcattaatacaaccacattgacacataaattaaaaaaaaaaaattgtttaggtcaattgcagttttttttttttttttttttaattttatcattttatttaaagtaaaaaattcaaacatacatgcacgcaacaatgaatttttgcaaaaatatatatatatgtatactagcaaaaagttacgtgctaaattttatgctaattttttt

SEQ ID NO: 146333 - DNA, 882 bp, Cannabis sativa
  modified_base (813)..(817): a, c, t, g, unknown or other
ttttttctggatgctgaaacaaatagaggtgcatcaatcccttttaaggaggtgtattgtagaatcacccgatattatataccatataccctctacagtagggttgtacataaatttttttaaaccgcccaacccgaacaaccagcccaaaccaaaccgagataacctgacgaaaaatgcaaaccgaaaaacccgacgaaaatataacccgcccaatctttatattggacgagttgaaaataatatcaacccgcccaatcaatctgaactaacccgaccaacctgattaaaagagtttatatatatatatgcttttattatatataatctatacattatataatttatatacatatttataaaaaatagaaagttcaaactactatatttttttatgacagatgatttgaactttaaattcaatatttatatttatctcattatcacaataactaaaatataacaattaaatgtgaaataaaagaaataaatattagtgctcggtttggacgagttaactcgactaaactgacgaattcattgggcgagttaaaacttttttttttcttaattgagtgggttgcccttagattttgtaacctgatctttacattgggttaaataaaatgtaacgtaaatcgaccaaaccgatcgacgtacacccttactctacagcataccacttgagccaatttctattttgtgcaactttctcaccaaaatcaacaagtacattatattaaaatatatatgtattatatattttttactaaataaaatatataaacaaaaagggtaaatagcggcataagnnnnnaaagttttgagtttgtaagcggcataaattcaatgatttttttagtggcataagtacccaatgtt

SEQ ID NO: 146334 - DNA, 593 bp, Cannabis sativa
  modified_base (383)..(384): a, c, t, g, unknown or other
ttagtgatcttgaattcactaaaatgagactaaagaaaaaattttaattcaaaataaactcagtgtctctaaagaatacaagatcaaaaatctttaaacatatataaactacgtttgatttgcccattctaggtacgtgcgcaacctaattgctaagattagctacaatcacaagtcctcagaatcccaaatgaggtcatttatctcatcaaatcccaaacgaggttactcacctctactaaaaaacattttaaatgaggacattcacctcaaaaatctcaaatgaggccatttaccctaaaatatcaaagtgagttaattcttcacaaagttctcaaagatacaaaattttgaatgccttggaactacgtttgacttgattnntataaaaggatacgtaggcaacttggttgctaagactaagtacagtcaccgataccgcaaaatggtataaaacaaaaatctcaaaatttcataaaaggtcatccacctatgaattttcccaaattttcaaatagcaaagaattcctgaaagtagtcatctaccggaattcttatattcaaattcaaaaataccgtattctgaactacaa

SEQ ID NO: 146335 - DNA, 1208 bp, Cannabis sativa
ataaagaatgagccctagcactaaaagaagaggtagaaaagcttcacaaaaacaatttcgtaattgaagctttctactcggcctgggtagctaaccccgtactagtgcccaagccgaacaaaaaatggcgagcatgtattgacttcaccgaccttaataaggcgtgccctaaaggctgttttacacttccaagaatagatcaacttatggacgcgacagcaggacacgagatattaagcttcatggatgcctattcggggtacaatccaatcaaaattcatccactggaccaagaacatacaagtttctgaatagatttgggtctatattgttataaggtcatgccatttggtctcaagaacaccagagatacataataaagattggcaaataaaatgttcaaagaccagatcagacgaaatatggaagtatatgtggatgacaagctcgtcaaatccaggaaggctggggggcatatagataacctggacgaatgcttcaaattcctcaagaaaaacaacatgaaactcaatcccttaaagtgctccttttgagttagctcaggtaagtttctgggctttatcgttaatgcctgaggtattgaagccaatccagagaaaattcaagccctcctggatatgaaatcatccacgaaaaccaaggaaggtcaaagtttaactggtcggattgccccactcagtagatttgtttcaaagtcaacggacaagtgtgttccattcttcaacatcctgtgaggaaacaaagaatttgaatggatgaaggaatgtgagaatgcctttcaagagctaaaaacgcaactcacaaaacctcctgtgctctcaaaacctccagacggagaagaattaagaatatagcttgctatcacggaacatgtcgtaagtgccataatgatcagagaagagaacaatatccaacactcggtctattacatcaacaaaagactcattgaagctgaaggccggtacccgttaatagaaaagctcacttattgcctaatcttagcaacaaaaaatcataggccttatttttaggcccatcttgttcgagtgtacactgaccaaccattacgccaagtattacaaaaacctgacgcctctggacggtttctcaaatgagaaatggagttgggcaagtatgaaatcatgtttcagccccgaacaacaattaaggggcaggccttagcaaat

SEQ ID NO: 146336 - DNA, 713 bp, Cannabis sativa
tcttctctacaaaacaaagacactctttccttaagatatgaatacagttcaaagtgtatgaaacagatactaaacctagcttctatgaggggtatttataatcaatatacaccttattgacaactcatacacggtctgaacaagatcacaacccactagaaaattccctaaattaaaacttcaattagcacaggaatttccatttctacaacctacaaaatcgtgagcagtaagtgtaactttctttttatagaaaaggaaagtttagctccagttttctcctccagaaatctgatcaatcaaaatggaaaactcacacaagatcagaatatcacagctagttagatagaaaagaattgagtaaccaaacttaccattttctccttattttctataaatataaaagctagacaaccttccttcaaaaattaaattgattaatataaaagttaagtacacaaaatatagaaaccaacttaaatactccagccaaaatgaaacaataaataataaaatatttttgtcaattaaatatgccagaaatggaatgaacaactcagtatattcaaatgtacaacaacttgacaacaactaaacaacttttatctgttttaaggaggggattagtttcaaaagatattattttggttgatattggcactttcacagcagaatcaaaccatacatcaacaagaaaacaaaaaaaaaaaaaa

SEQ ID NO: 146337 - DNA, 511 bp, Cannabis sativa
  modified_base (249)..(252): a, c, t, g, unknown or other
  modified_base (467)..(485): a, c, t, g, unknown or other
atttaattatatttctttatttttatttttatttttcgaaattattaaataaattaattaatttaaaattaagtaaaccctatatccaactatccaacttgttcgaggtttatgtgttttacattgtttgattatcaaaacaagttttatataacttattatgttttgatctaaattgtcatggttaacttgctgacagatccaatgatctgattttaacccatggttcaattgtcaataggtcgaacnnnnaatttgtaacaagtaaattttacattcttctttcatctgtgtataacctagtaacatgataggatccatccaaatttgtgtgcctgtgtgagcctgtatgtttggtttgggcttagatgcatataggtagcccatttgattttgtaattaaaggttgctaaagaaattagtgtttgggcctattcaattaataatagttgttcattttaaggttnnnnnnnnnnnnnnnnnnncttgtgtgagagttagggagccatag

SEQ ID NO: 146338 - DNA, 728 bp, Cannabis sativa
aatattaattatattaattcatacttttttaaagttttttttttttttaaaaaaaaaaggtggctgattttaattaaaaaaatctatatatgtttataacattaacatgaaattatcaaaaaaataattttgaaaaaaatatgtatactatgtctatccttattgaataaaaaataacttaaaaaatatttttctaatagcatttatatattctcatttattataatatttctaaaacaaaaaactatatctaatttttagcaatatttttaaaacaaaaaaaaaaaaaattaaaacactaactatacagaatcctaatttttttaaacaaactgtacatactaatatttttttaaaaaaagaatccataagttttgattttaatttttttaagaaaataaagctataatactgaattaaatattaaatattagtaggatatgtatatagatttttgcaaatagacccttttcaaatcatattgtaatgcccgtatttaaaacttctaaactcgaaagctaattttattatattataattaattaatcatataggtcgggatcccgagatataaaatacagttgaaactacatttgttattataaaacctcttaatattattattttttaacaaaagacaggcattaacaaaagcaactcaaaatgttgaaagaccgaaaccctccagattgcactgccgcgatatgtacaatcactgctgagctcca

SEQ ID NO: 146339 - DNA, 547 bp, Cannabis sativa
  modified_base (514)..(519): a, c, t, g, unknown or other
aataataataattattaaacggagtcaaaaaaattaattaaaaatcatagaaaaataagaaattaaattctaataatgctggaaaaaagaatcgttgaaaaatgacgactagaactgtcgcacgcgccccacatgccactgccgagagtgggcttcgagaccattctatggtcattaagataagaaagtgtttgtttcaacaaatactacatttataggaatatgactaaatctgtaaacaaagttgcaaagtagaggagatattttcaattccaaacgtattctatcatcttattgtatataagatgcttccactgcctctgttgtcttgacacaaccgatgaggttaatatcattaatgttcgtagacagatagtcacggtaccttgttgtagtgggaaagtttcaaggaactcgccttgttatgacttgaaagacacctatgttaaaaatccactgttagtttaaacaagtaatggatactcagaataagaaactaagaagcaaagccaannnnnntatggttaaaaccattcatatgaagtaa

SEQ ID NO: 146340 - DNA, 624 bp, Cannabis sativa
taataataatgagttaatatataaaaatcatatactaattgcttgaatgtgtgcattatgctcaactagaggagcaacttagttagggacaagttcaggtgtatggctaaaataacattttggcgtaggcgctcgagacaccagagcatcctggacgtgtcagggttgctaggtgtgctagtacttgaaaaatattattttattaattatacaaaataaattatagctaactatatttattgatttgtatgttccttgccaaggcatctaaactatttggcaggaagaaaagagatgtttatgatgctatggctcagaaacagagggagattgacaaattaaaagctaaaatcaaatccctcaaatagaagaaaaatattgtcgagcaagagcaaaatgaggatgagggtgaggaagaaggacaggttgctcatcagacgtatgttctacaacaatatgcttaggaggatgagggtccacaacattatgctcaggagtttgtttccctaaatgagccacctctcatgtacaattttgtgaaccaatatttctttgctcagataatatcgaaaacatagtggcccgagcttatctgtacgaacatgtgttaggctatttttagcc

SEQ ID NO: 146341 - DNA, 667 bp, Cannabis sativa
caatggaagaaaattaagatattaaaactctattgcattataatatgttgaccagcaaaaagattaaataaatataacaatacataatataccatatatatacactatatatattatatataataaaggtagaagaagatatatatatcaatatataaatacactcactcacaacatcgagtgtagaatatatagtggggatcaccatgacatgaacaaggtattacacatttgtccaaaagcttatttcctcctatctctaagcattaagggaaatctctagtaaatagctttgaaaattatcaagccttttaaggttttctagcaaagtgttttcttgatagaaaacttctcatcttctcaaatgagcaccaaaaacctccttttataatgtttaggtgatcacacttagaattcaaatacacaatacctcatttctctcatataaatgagtgttaatatagtttgtaacaactgcatttcataacatttgaattccatcatcaattgtgtaacatctcttttattacacaaaacatgatcaattaaaagaagttacaaaaataattaatcttgtaactcctctccatattacaaagtgtagttacaattttatattaaataaattatatgctacacaatttatttaccaaacacttaatatata

SEQ ID NO: 146342 - DNA, 741 bp, Cannabis sativa
  modified_base (712)..(714): a, c, t, g, unknown or other
taattatcacttcgaggagaaacgctgattgatgattgaatgaatccaacacatcatgtggtatatcaaaagataaaattacacttaataagagatttaaaaaaattacttaaatatgacagatttaactttatctattttgtatgactttttttttttgagttttttataggtttaggtttgtcatattattataaatgtctttctaaattccatatttaatgttttaaagcttctctctctttgtttgaagcataaagcaaagaaatcaaatatatcgtattcaagaaattgattttttcaataaaaaactagttttgtttatataaaagtaaaatttatatatgaattattcagttttttgtggtatttattcttatttatgatgatcttacatttttaagttttttcattttaaaaaaaatattatatttgtacaattaaatttacatgtcatatatatcaaaaaaatattccctatatttttgtacttagtattaagattgtcaatgtcaatggttaaggttcaggcccaattactcaataaaatattttaagattagaaataggaataattacataagatactattttttgtaacaaaattatatttttatgtttaacaaatttttttttcatatttgtacggttttctatagaaataacacgaaaataacaaaaaaaaaaaatacataaaagtaacatgaaaatnnnatctaaataatatcaaaacaacaacaa

SEQ ID NO: 146343 - DNA, 601 bp, Cannabis sativa
tgctaataatatatcaaccaaaattcaagatattccaaaagaactttgtagtttaggaacccctttgtcgttttgtattctaattggttttcaaatttctgtcgtttgtcttttcttggtaggctgtcgttttactagtttgtagaattgatttcataaattgttgtcgttttactgtcttcttatttttgtttgtcgtttgtaatatatatatttgaaggggtgtcgtttgtcgttttaggcaagtgtcgtttacattccggaaagtttgtggtttaatagaaattatgatttttagttagaaatagtcattttcttatttaattttgtacctacaattacttaaatgtcattatcttgattaatgtcttattaaatttatgagaattgttaaaagatattattgattttaagtatttttcttggtgttatatcaatattagtgtatttaagtatcgggttttatataacttaaaccactcgttaggtgtcacttagagaaatttgattttttatacttaaaaaatcttaatattttattcttaaaccaatacatttcaaactaaaaaatatatgacacttttatctaaaatccaaaaat

SEQ ID NO: 146344 - DNA, 710 bp, Cannabis sativa
atatatatagcatctaaatctaactgtacaaaatatgatatttttttaaaataaaaaagaaaacttaaaaattatgggataaatcatcataaaaaaaataccataaaaaacttaaaaactcatatatataaattttacttcaatataattaaaactagttttatgataaggaaattagtttcttgaggaaactagctttttgataaaaaaaaaataataataattttttgatgaaaaactaattttttgataaaatcatcataaataagaagaaatactataaaaaaacttaaaaactcatattaattttacttttatataacaaaaaccagtttcatgacgaggaaactagtttcttaataaaaaatcagtttcttaatgaaatcgtcatagatatgaagtaataccataaaaaatttaaaaactcatatataaatttaatttctatataatcaaaactagtttcttaataaaaaaatcagtttcttaatgtagtttttttgattaaaaaaccagtttctggaatacaatatctttgatttctttagtttatgatttagaaagacatttacaataatatgacaaatctaagcctataaaaaaagaaatttttacatgaaaaatccattttgcacaatttattacctaaatacctctacacgcctatgtctacatttttacttacaaagttggttttattacacaaatac

SEQ ID NO: 146345 - DNA, 552 bp, Cannabis sativa
tgttcctttggggttagctcaggtatgtttcttggattcattgttaatgctctaggaatagtagccaatgtagagaagatttaagccctccttgatatgaagtcaccaacaaaagtgaagcaagtgcaaagcctaacttgttggatagctgcagtcaacagattcttttcaaaatcaatagacaagtgtgttcctttcttaaacatcctctgaggtaacaagaagtttgaattgatatatgaatgtgagaatgcttttcaagagtttgaaaagcatcttgcatatcccctatactcttaaaacctttggacgaagaaggattaggaatatacctagcaatcactgaatacgctataagtgtcatgctgataagagaagagaagaacgtttaacatccaatctactacattaacaaaagactagttaaggtagagggtcagtaccccctaaatggaaaattaacttactgtatattcttagccacaagaaactaaggctgtaacgtccccgctgattgtgacaatcagtactcccgtgatccgtaaggggaaa

SEQ ID NO: 146346 - DNA, 1095 bp, Cannabis sativa
  modified_base (751)..(752): a, c, t, g, unknown or other
ggacccttgttttagggggagtttctttgtttgtggtttgtgcacttttctgtttaaaaagttgttttgtttgtggtttgtgaacttttccatttaaaaagttgtcttgtttgtagtttgtgaacttttctgtttaaaaaagttgtcttttttgtggtttgtaatcttttccgtttaaaaagttattatgttttatgtgttagagtgcgttcatgcaggggagttttttctatactctattgtttttgtttctaacacttgatgtaggttttctccaaataaaatgttttgtcaatcaattatgtgccaaagggggagattgttaattccatttttgatatatttaattgacaaaaatattttattaatttcgattgtggtgtaaatattggtttccatattttgtatgtgaatttaatctatctttggaagaaaaattgtctgctctcctagttatgcaatataaggtaaaaagggtaagtttggttactcatttcttttctacctaaccaactgttatattctgatcttgtgtgcattttccattttttatcagatttcttgaggagaaaaccggagctaaacttttcttttctataataggaaagtcgtacttactgctcacggttctgcaggtacaaaaattgaaattcttaggctgattgaagttttattttaggaaattttctagtgggttgtggtcttgttcagaccgtgtatgagttgtcaataaggtgtatattgattatanntacaccttatagcagctaggtttagtatctctttcatacactttgaattgtattcatatcttaagaaaagagtgtctttgttttgtagagaagagcttgttcgactcttactctatttatttatattttgtattgtctagagcttgtcttcaagtctacaaagaagaagaacaacagtgctacctttgggagaaggtcttacaaagcttctgagagattgctttttaaatcttgcatcgcgtggaagcaagcactcttcaaggagatcgaagggagttcgagctcttgaagtttcaacaaggttcgggtagaaggtggaatacatcaagattgcgacatataa

SEQ ID NO: 146347 - DNA, 1039 bp, Cannabis sativa
gtccaacaatctgttttagggtgtcttccaacttaagttcaattaaattctaaacatattaatgtggatttaatttgtccattatgtaatcttgttcctgagacaattttccatattctgttcaactgtggatttgcaaagtcttgatggaatctatcaattgttactgtgactggtgtggaagctgctaactttgtagagtggttatgtgatcagttgaaggatcggacaacaacaaaattagtaaaaatgtttaaaattccgtaaaatcgtatttttgttatttttttgttgtttttatatttttgtgaaataatccgtattataaataacacatagatatatatatatatatatattgaaaatggtaattgaaaaataattataaaataaattgtttgtaaatacataaacaaaacaaacaatcaaaatttttagaaaattaaaattccatctatatttacttgttggccttttatagtataataaagcggcctgtacttgattgattccaatctttataacattcattctaagattttgacattttatttctaaattcatatttatcaaccttcgcttaaataattatgttcgttctttataaatgtagttgataaatatgatgtaaaatttaataaattataatccatgcagtaatttttatttgattctttgtagttttacgatcatgaaaaggataaggggtcaagatgcaaaatgatcataaatctaacaattaagttaataaatgtctctttttataaaaaattaataaaatgtctatttagttaaaaatttgatgatgaaattacaattataaccttgaataattaagtgtttggtatagttattttgcacaataatatatcatttttatgtacaatagtatattaaaaaaactaggtagtatatattagtttaagattgtagtatattaatttaatgtgctatggtatataatgaacgaaatacggaaattaaaaaatgtggaatattagtttaactttgaggcatagttatatttcactaggaaata

SEQ ID NO: 146348 - DNA, 517 bp, Cannabis sativa
ttactcactaaaacaagaactatgtagaaccgaagatcgaatgtccttaaaaaaaagctcattatttaaagtgtactttaatctaatatttattttaatctatttattttaaaatatatatttatttaattaaaatttttaatttagaaaaactctaaatataaattttaatttaatatttataacattatagatagattgatcggaaaataaattaaattattttccatcttagtaataattttcaataaatatttcaaaaattattcaatttaagtttattcaaaattaattttcaactcaaatttaattttctataaatatatgtagcaaaattcgaaatccaatgtattaaaataaatacattttcgaaattgcttaaaataaaataaaagaaatcttgaaaaaagtattctaatttatgtttgtcaaaaattaattaataaattaattttcaacaaaaatataattttcctatttgattaaatattatcaaaattatcaaatatttaagttt

SEQ ID NO: 146349 - DNA, 704 bp, Cannabis sativa
  modified_base (182)..(184): a, c, t, g, unknown or other
ttaataatgttaaattaaataatttattcaattatttatatatatgtattcataactatatatatgtgtgaagtttgttttttactttgcagaatatagaaaaagtgttttttgttatagagaaaatttgttatgaattcaacaaaaaaaaaaaaaacaggtgtgagattatgtagaaaaannnataggtgtgagattatgaatcaaattttttcataattcattatttttatattccagttatataaaattgatgtcatcattgtagttcctattgatatcctcaaatttttaaatttaacactcaatttatcgttctgttagttgattaataaagtgccacatgtaaatatagtattggccaaactaataattcttttagaaaaaataattttaaaaaataaaaattaattaaaataaattcatattatttaaaaaaaatatatattatatatatattaaataaaaatcaatttttccatcttcttccagccatattatctttacagattaacaaacaaatttttttgtaaggagattaactataaactttgattctcgattcaaatgctatttttcaattctattttcatatattcaaaattgggtttttttcaataatatacttaacattgattttatttgcaaaaatacctttaacaaatttatttgcacaaaaaccgatgtgccacatcagcataaat

SEQ ID NO: 146350 - DNA, 505 bp, Cannabis sativa
tttgtgtttgattcatacgttatttattggtttatttttttagtgtactttttttatttttttgcaatatatctcaatgtttgtatgaattatcttgacttatacacaactttttttttttttttttaactttacatatatatattttttttgaatgggaataactttacatttatatgtctttctttcttctcttttttttatatttaaaaatgtttttttgctagactaataattatttgatctaacaaattgtactagtatgatctagtctttaaaataattattttaatatatgaaaattatatattttttgctagtcgaaatcatagcaaaggtaacattttaatttctttcaattttttttttttttttgttttatttttaaagtttcttttatttttggtttaccaacatttaagcaatatctaaactatgaagtatactaaataaaactattttattttataattacttgttatattatataaaaactaactagttt

SEQ ID NO: 146351 - DNA, 590 bp, Cannabis sativa
gtcgacttcttcactaaatggatggaggtcgagcccctcatttgcataacctgcaagaaattccttgactttgttgtcaagaaaattatctgcacgttctgaattcccatgaagatagtatttgataatagaacccaatttgatggtgacatgttcactaaattctactaaaggaataaaattattaaaagcttctcgttagtatccaggcctcaggaaaatggacaagtggaagccgtcaataagaccttaaaggatactataaagaagaagctagacgctgccaaaggcagttgggttgacaaggtacctcaagtgctctgggcccacaaaactactgagaagacagctactagacacactcctttctcgctagcatttggctcggaagcaatgctgcctattgaagtgagcatatcgactcatagaagagagtttataatcaagaagaaaaccaggaaattttaaaattgtccttggatctacatgaggaaaattgaactgagtcgcaaatcaccaacgccacataccaacaccgaggtacaagatacttcaacaagaaattcaggaaaagactatttaatgttgaa

SEQ ID NO: 146352 - DNA, 608 bp, Cannabis sativa
tagtaggagtaccccgatatttagaaaagagaaaccggtgttttagggatagcattataatgggcactaacagtttgctcaacatcttttataggtgacgctccataattagttaacgatattttttaaaaattattttctcaagttataaggactgacagtataacatcgagaaaggtgctacacaccaaaaatgtctgttagcctctcttaaaataaaaacatgcacgtacctatttgactcaacaaaaatttaaatgataaactagtcatattagattagatagaagaaaaatacaagttctgatttttgccacatacataaattatacatttacatatcttataaatcttaacttgcagcagaagaaatgtgcaatatataaccatcattagataatcaatcataattagcagttcaattcactgagaaagaccttgtctacgtatgtatatactacaaacatttgaccacgtatgaagaattcttttgaacactcccccatttgtattactttcattctttctaaactcctgaaatcatgagtcaaaaagtcgactatttttgtttttgaaagtaataaaattttaagcataaagacaaagta

SEQ ID NO: 146353 - DNA, 643 bp, Cannabis sativa
ttgataatcagataaaataaactgcttctgatttagagttctatgttatatacaaatagatcttgggtttattattaatttttctaacatttaatacaaggtcatagggtgaagtttaccttggatgagtttagaattccttttgaatcttttcttcatattatatgaccaaacccacgtaaagatacttcttgcaaacccacataatttccctgacgatggcgattaggacctcaaatttgattggtgattctctggattgatttgttgaattttccaagttctcgtctcgagggtctaatcccgttgatccatctctctcaagctaggcgaggctttcttggacgttttaaggcgtgtataaactgttttaataatttgataaaatattttgtaaaatgataaattaataaacatacattcttttattaaaagataatataataatataataacaaaaatctaattatttggaattttttgttgtatttatatattaaaattatgattatatctattctcataacaacctgaatttttagggaaggttctaaattattataaaaaaagaaaataatagtaaaaataatttgttatttaaatatattttttaaaatatatatcgtttcttcttttttttttt

SEQ ID NO: 146354 - DNA, 996 bp, Cannabis sativa
ttgctctcgcttcttctctagctcatgttgttctgctgagtcttaaggggtcttaagagttgagttggtgcactcagccacgaagtctgcaagggcttgaccttttatggctgttcttggttggtatgtgatctcaaattggccaagctcaatggcccatttgagtagtcaacctaatgcttcaggtttctgcaaaatgtgtcgcagtggttgagtgtacacctttatggggtgtacctggaagtagggcctcagttttctagaatctaagatcaagatgtaggtcaccttctccatgagtgggtatcgactttctgtgtcgactaaccttttgttgatgtagtatagaaggtgttgtacactgccttcttctcttgtgagtacagcactcacagcatgctctgtgactgctatgtacacgcctagctcttcattgtctaggggtttagacaataccggtggttgggccaatttcttcttcaactcttggaatgcattttcacattcctctttccacacaaattttttgttgcctctgagaatgttgaagaagggtacgcatttgtctagagacttggacacaaatctgcttagtgcagcaatgcgtccaattaagatgtgtacttccttgacaattgtgggtaacttcatgtccgaaagggcttggatcttatctggatttgcttctattcccctagcattgactatgaagccagggaatttccccgagcttacgcaaaaagagcatttaaggggattgagcttcatgttgtagctgcaaaggagtttgaaatactcacctaggttctccacatgccccctaacctttttggacttgacgagcatgttgtccacatacacctccatgttgtggccaatgagatctgtgaacatgttcaccagcctttgataagcggcccctgcgtttttcagcccaaagggcatgactttgtagtagtataggcctaggtctgtcatgaagcttgtgtgctcctg

SEQ ID NO: 146355 - DNA, 700 bp, Cannabis sativa
aaaatcctcaactcccactactggcctctgtccaagaatccactcaaccccctgctgctcttgctcaaaatccataagcttctgcaacatctactaatcctcatcccaataaaaagatgagaccctactgctctaattgtcacaaaccagaccatttaaaagaaaaatattttttcttaatcggttttcctcctggttatggtgacaagaagaaatctgaccaacattcggtccataatgcctccacttgagtcgaccaatatcgcgttcttgctaatcttacaaagcaagaagatatttgttataccacaaattcggtgagcacatcaagggaagacacgtgtcgagctaggaagaacaaagaactcaaacacgcaatcgaaagtacacttggcatggaacaactcgttagaaacataatttgcagagtatgtttataactcggctggctgaatggtcttctgtgagacagaaacatatgaattgctaatttatgtatcgacgagaaaccatatgagtgcaagtgtgcatgacgaggcttcaacctcgctccgtgaaagagaaacgataaagataaaaacacttagcgtatattacacggtatacaaactaagcataaatagtatggtgaatcaagatgacagatagcgaggggtctatctcgctgtaagatggcatgcatgtgaggaagatcatctcg

SEQ ID NO: 146356 - DNA, 634 bp, Cannabis sativa
acaagaaacacagtcgatcctgtattttcaaacaaaaaaaggtaagttagggaaaaataccaaaaaataataaaaaaaactaaaaaaggcaaaaatttaacatattcgacaaacctatcgacattccattgataagaactgtcatttttaatgtttatttagtctttacttatgtttaaaaaaattcacttgttttctagtcaactgttaaaagttttcatttttttgtcttaacgtcgacaatatatcgacatgctatcgacaaatataagtaaaaaatattgacaaattgtcgatacattgccaaataaatgaaattatttaaattgctttttcatcgatatatgtcatattgtcgataatggtcatccctgaccatccttcacatgtcatcgacattttatcgatattctatcgataaattgtcgataacctctggaaaacccagatttcgacagaaaactaaatctactattttaaacaaaaaaataccagttccaataaataccacagatataacgaatgcaagctaaatactattactaatgtctaacaaaatgcttaaaacacaacttacctattataatattgaatgattcttgagtgtgggggtgtggtccggttttccaccacc

SEQ ID NO: 146357 - DNA, 661 bp, Cannabis sativa
ttatacatatataatgtgaaaatatatatcctaaagctgttagaatagcttgagaaaaaaatataaaatattatataaatatatatatatattagaaaaaatcttataaatttaaatgtaaacttaatttgatttttatttttcataattatttaattaaattattattttaatttgaaaaataatactgttttcaaaaatatcttaacaacataaattttgaattttcacaactttattgaatctatactcaaattttttaaaattatattgagctttgtgctcaaaacctttatctattatttgattaaaaccaagatacatttgaatttctacatagtcttacaacccgctaacccaccggaagggtatcaggttgaacccaacccacccgaaactttttaattttttttttttgcgggttcaccagttcaagttcgggcgggttgctcgggttcgagtcaaacccgctcaaaatgttcagccctaagattgtaatgtatatatatatatatatattttttaggaaataaagaggagaattcatgtgtgtaggtaatgtatgtatatacagtagaacctctatctaagaatacacttaggaccaagtaaattatattctaattgggagattataactaaataaagttacactagaaaa

SEQ ID NO: 146358 - DNA, 635 bp, Cannabis sativa
ggacttacagataatgtcaccttggggactaatctgcatcaaatctaactttttggaaatttttgccgcaattattcctattatttaatgggtggataatttagtaaaattatgacttttgttttgtgtaggattcaaaatgtaaacttaatataattcatttatttagtaaatttagattttcagaaactaacttgtatatatagaaagcaatatatacatacaatgagtaataatttatatccaagaatttagttgtataaatatagagcaatatatgcatacaatgagtaataatttatatctatgaactaacttgtatatatatgaagcaatatatgcatacaatgaataataatttattccgtgaactaacttgtacagaatatatttagaaaattaatttatatatatggagcaatatttcatataatgaataataatttatattcagagtaaatatcatgtactcacatactaatattgtgtagtttagttagatgttatcttgttatatactataagttgtgtatataacaaaatactagtactttaatatctatatatagttaacattataatagttatatttaattaatttgattgttgtaaataataaaatcatatcaaatatt

SEQ ID NO: 146359 - DNA, 504 bp, Cannabis sativa
ataacatgtataatttatttttgaataaaataatatttttacactcttgcctctttaatagtattcgacttgttaataatactctttgaaaaataaattttacaataacatagtccttctatcacattctattcaattttaacataaacaaaatacaataaataatagttgataaatagatgcaaagtaaataccttttacttatttttaccttaataaaataaaataaaataaaatattctacttcaacgactgtttcacttttaacagataagtatttcaagtcttttaagtccttatatttagtatgaattgttttaccatcgttctttcacattatctttttcattatattaggtgataatagagttttattttttgttattttgtaggttggtttgtggagggtctacaattacagagaatttaccgataagtttaatttaaaaaataatttgtttgatattgattttcaacagtttctaattagggtgatagtttgtt

SEQ ID NO: 146360 - DNA, 858 bp, Cannabis sativa
  modified_base (208)..(212): a, c, t, g, unknown or other
aatatctaaacgatttcgatttattgtcgatctcatccaaattttatagtttatgacaactttaattataaggtgcttcaaacgtactataaacgatcgaattgccaaccttgtaaagacatgattttttattatttattattaatttaacttttaaattaatttaaaaatttaaaatttttgttttaaacaatatgtatggaatacnnnnnaaaaattttaaggttgtaattattatagtgaacaataaaataatacatgcattaataaataatatttaaataaaaagttatggctctttgtcaaagcaaattatgcataagaaatagataaaaagttttgcactaaaaaaaaatctaaataatctcgattaccgttgttctcattcaaattaaatagtatatgataactctaatgaccgcttaagatcaatattttggattattaaatgattaaggttcattgtaatattgagttattaattatgatttacatgtttatggagatttatttaaattcaaaatgtattattatgctatatatgtgaattttgcattttctgtgcttgtgttcggtaacggtggaaagcgacgtgggccattagagagtcacgtattgtatgatttagaatgtcaatagcggggtactattgttaggcattggagatatcggggatttgtcgggagtggtaaatgactaaactacccttgctacaattaaagagttttcaatcagaataggaggtccaattcaaggtgtaatgcttagccttcttctttatggttttctttagctcaagataggttaattgcatgattttagtgatttgaggttctgtagtgtgcagctagtttgggt

SEQ ID NO: 146361 - DNA, 620 bp, Cannabis sativa
aattgatgaatatttttgtctcttctctttcctagtgctacattttttaaactcaattaagatgtatatacataaactaattaagatgtatattcaaagtaactatgaaataaaaaaaatacaaatattataagtaaataaaagaaaataatcaaatgtataaaaaaaatatattaattttaatttagatatttatataaagttgatcaattgaatatatatttatatataaatatataaaattaattgagtaatgtattcaattgcctctacaaagagaaacaatattaatttttagataaatcggtgtgaataaagaaatattttacttgtagtattttttttaatgaaatataatatatattgtgtttacttgtagctaataagtataatactcacatagtttgtaaacaatgtgatgttagataaattaacaataaactcaaaatctatttgtatataatatagaacacgataataatatatgataattaagtatatgcgtacctgattgatccatagtgattaccgcaatttgatagtacaatactatcaactaagtcttcccccttagatctataaatcaaaagcagtttatttatctgattatcaaaaggtat

SEQ ID NO: 146362 - DNA, 501 bp, Cannabis sativa
tcatgtgatgagccatcacctccctacccttcttgacctcaggcagcacgggcatgggtggagttggtgcctgcacctgctcaggaatcctcctgacctgttcggacccagatgttgttggcccagactccttagacttgggagacttgggagtggaatgatttgtagtagttaactcctcagaaaggtcaatgacctctcaagaaggcctcttctatgaagacccctctccgcccttagacttcttcgccggaggggaggcgctagagacatgtttgcacagagcaaagacatgtgtccgctcatcctcttccttaaggcgtccatcatctgccgagacatgtttgcacagagcaaagacagcgtggttagcaaaaacatgcaaaaaatacaaagtatgaaagtcaagaagctgaaagagaagtaaagcgtagagtgactgcccgcccagaaagtcagaagtccatcatcacctaacatcaactttatctcagccataac

SEQ ID NO: 146363 - DNA, 617 bp, Cannabis sativa
  modified_base (364)..(364): a, c, t, g, unknown or other
gcttattttgatatgtatatatattattattgttgttattttctacatacaaattcatcatgtctcataaaatcatgatggcataatctgaagttaaccaaaatatattctttggtttgttataaaaagaattagaattgagtcgtgactaaatattcatcaccttctacgtacataatattttattattaattgttagttaataaattttttaatttttttatataatattaataatgataattacatattattaatattatttaatatatgaaaactattaagaaattattataaataagaataacataacaatatattaatttaacatagttacatctcaagagtcattacacaagaaggnaatagaatataaatataaatatatatttacatctttatatatatatatatttacaatatatatagttacatagttacatctttatatataaatatataggagaaacttagaatgatgtgataatttttcattctaatattttttttttttttttgaatggtcattccaatattatattttctctaaattgtaatttttttaaagtttttatttaatatttactaataataattaattaaaagagaaaagaatt

SEQ ID NO: 146364 - DNA, 526 bp, Cannabis sativa
gaagttgttcagggatggattgaaaaggaatacatccaaacctccggtgggtaaacgcccacttagccacattatgggcgctaaaattacaatttctactagtatgagagaaaatacaactaataaaagaggaagaggacctaatacaaaatgagacatagttctcaagctcccacctgaactcaatcctgttcagagcgttgatgactatcctcaatcactctccaccataataaacttaaaggcatgttcttcgctacatccatcgcaaggcaacacgccgccgcctgactgcataaagcatccgccaaatccactctagcaatataaacccagtttaccttgctcagataatcccttgcaactactgcgatacacattgagtcaatccccacttttacgtcacagttcaccttgatccaatcttgcgggggaggactccaggcaaccgccaagcaaggaggagagcaagggaacaccgaagcatggtgaactgcataagaagagcgaatactgtcaatgcact

SEQ ID NO: 146365 - DNA, 1156 bp, Cannabis sativa
  modified_base (84)..(87): a, c, t, g, unknown or other
ttttaatataataaaactaattttttctactcatttattttataaaaattatcaaattgaagaaaaactctctctctctctctnnnnctctctctctctcttttcgaacaccatagagccagctagggttctggttttcttcttcaaattttgtattttctagcaagattttagtggtttcaagttcaaggtgagttcctagtacttcctttgttggtttcttgaatttaaagttatataattatgcatgatttgtgagttttgctactttagtttttgttgatgtttgaattgtgtttctgagattaaattaaggttagatatgttgttttgagttggttttggtggctgtagtattgattgagcaagctttgagttttagaactcaagcttggctctttaatggtgatttttgattttgagcatgctttgttgttctgttgcttgggttatttttattggggtataatatgcaggtctggatggtttggaatcgatttggttaggttttcaatttttttggggttttctagtgtaaactggttaaccggttttacaggccctgtataaccggttaaccggatcagctgctgggttccccaaattttttgtgttgtcaatttgtgttagttttagagctttggatggaaaattccctaatagtttagggcattttcatgttaactttcagtagatagatttttggtttaaaacctaagtccccagttgtgatttagcgtgtcacttatccatgttgtgaacgatgtgatttaggagcttgtaattcgccgagcagttgttcaactcaggttgaccgacacacctgaattcgaaacaaagtaagattagtataattttatgcatatgtatttacatatttagcgtacatattgtttatgcctggtagagtacattgatagtagttatagtatacatagagttgtactgattactgataaatgaatgttggctgaaatactgatcgatgctatcacatcaatatggctagagtatgactggcatattgagtataacctgacactatggttgatagtattaccgtatgaatgttcgagactcagtaccatgtgggacacggggataaggttatggttgggtgtatgggggcctaattataacccgagatgttattatg

SEQ ID NO: 146366 - DNA, 664 bp, Cannabis sativa
tgcttagtgaaaattcataaacatgacgtagtcttatttagaattctaatttataaattaaaaccaattaactaagtctacaagccaatattatcttaactgatgcagagaccatgggcttacataatcaagctcccaataagtagatccaaaatttacaagtaaatttcctaacttattaattcttcctaactccaccatagattcagaattacactcttgattacattgaacgctatatatattccaaatatagacaccctattaattatccattgtttcaatccaaataatcaaagattctttatagatgatttacatcaagtatggatgaatttaccgttccacccctcaatgtatttaatccttaaaacacgctacagtgatttttcaattacagtgtcatctttgctaatcaaagaagtttccttgaaaagcatgtataattaaaatttttagattaaactaataaactttataaacttttatatatatatatttacaaaagtcaggatcccgtacttatacttctacaaaatattcaaaatacatttagttagatcgcataacgactacaaaataaaatcccagatgtcccgagactgaacactccaggtcgcgctgccatgacatgtacaacatcatcctagctcgaagctcactc

SEQ ID NO: 146367 - DNA, 964 bp, Cannabis sativa
gttatgtgaaaaaaaaaaatcataaatattaaataatttaatattaaaaagtaaccaatccaaaataaccgatcaaatattcacttttgcggattggattggatttaagctattgcgcagattggattggatccaaaatttaaaatccgcacttagtgcaaatcggatgcattatgagcaaaataatgcggattggattggatgaacacccttatttagtagatgttagatttaaggtcgaaaatggtcaaatctatgttctgggctaaaaactagtttttttgtcaggtctgatggtggtctgatagaggtccaatgccttcgtgttgttaaaatgagtaaaggttgaagacgaagatccgatagtggttcgatagtagcccgatgatatggtctgatagtggcccgataccttcctcacgagcttaatgaatggagtttaacatctataaatgtagcagatatggtccgatggtggtctaaaaactagtttttttgtcaggtctgatggtgatctgatagtcacctgatgctaatttttttttatgttttaaacataaaaaaaattaaaaaaaatgttacagatatggtccgatggtcacctgatgctacttttttttatgtacaaaaatataaaagaaaaaaaaattaaaaaaaaaataggtagcaccggaccaccatcagtataaatgaaaatatagagtatggatggtgtagttagaagagaagagaaaatagtataatgggtatgaatataaagtgtgcctatttttttaattttaataagcttgtgttcaaaaatttaatatatcccaaatgtatacatataaattcaaatttcccaatatatacacaaccccgagggatgtaaaagtcattctaataatccaagctaaacgttttttaggagaaaaatatcttcattaatgaagcaacagcgaatacaacagaggcaaggcaacaa

SEQ ID NO: 146368 - DNA, 567 bp, Cannabis sativa
aatggagaaatataatagaataaaagaaaaataaccggaatcaatatttgtaatatgttgttcactaaaattttttagatttggaataataatgatttatcttattttattagaaaacataatagaatgtttaaattgattaaattgcctttttgagttaaagtatttatcttatttattttatttgtaagatatattttaaaaaaaattatcattatatattttatattattttttttataattttaataatataattaaataaatgtaagaaaatatcttactttaattctcaacatgccattaattataatggataccaattaataaaaaacaaacttcactacgttccaaaatatataatttcaaaattttcaatcagtagtaatcaccggctcaccgcagcagcatgtttgtcgggtgcggtgttttattttttgttattatttaatttatttgtataagtgaatttatttatttatgtcggttttaattatatttttgttttggtaataagataaatgttattggaaaattctacaatgtacattcttttttttttttttt

SEQ ID NO: 146369 - DNA, 800 bp, Cannabis sativa
agaccatctctaatggttacattaattgggtatagaatctacaccaattttagtgtagaattttttactttttggtacaacaactccaataattcacgctaatttggtatagaatctacatcgatttagtgtagaattttttactttttggtacgacaaatctaataatacacaccaaatatcatactaaatatctcactaaataaatatattttgcttaaagatctcatattttatattatttacattaataataaaaaataattaatttatgatgtaattgtaacatgattactagtaagaatttaagatcttaaaataatttagtaaaataaaatatttatgaaatcaattaaatattacacataaaaaataaataaataaattacaccaaatgtttattaaaatattattttatttaatatttctttttagtgttatattgtttttattttatttagtattggtatttttgtttttgttattttgtatttttaatatgttagcgtgctttaaatcttaatcaactattactcttgtaataaattttaatttgtgtataatttagtatgtgaaaatttcacaccaatttagtaaaatgatacaccattaaagatgctctaagtacaataatttatataggggttttaaaatttaaagccttatatcttatttttcatttttcctcttgaaaacattaatcaagattgttttttcttgtagaaaatgactgtagagtctactagtatcttattaagcattttctcctttaaccccttgaggctagctcaagtggccat

SEQ ID NO: 146370 - DNA, 839 bp, Cannabis sativa
cattctaagttctattggcggtacacgaggtatatttgaaaacctctaacacaaatcacatttctggacaaactcgtgtgtgtccttattgatcgttggctagtaatatccatgtctaatgatctttttagacagactttgccagcccgcatgatccccacagaagccttcatgaatttctctgatgatttcatttgcttctgtagtaagaacacaccaaagtaagggcactaaatacaatagttttcgcgccttgcttttatcatttggaagttgtctgtcgagtaaataattgataataggtgtcatccatgtgggagaggtatctatcattttgacgtcttcagttacacatatacttggctcgctcagcatctctaccggaactaaattcaattcatccaggtcattttgcgcggccagttttgctaaggcattggcaatggagttttgttctctcagaatttgttcgattttaaagtaatcgaatctttccaagttcttctaaaatttctctaaatactttgccatttttaagccttttgcttggtattccccaaggacttggttcatgatcagctgcgaatcactatgacaaatgagatttttgactttcaatgcctctgttatctttaagccggcgatcaaggcttcatattcagcctcgttattggatgcatcaaattggaatctcagagcataatgaaacttaaagccttctagcgatattaatattacccctgcacccgaaccctattcattgagtgcgccatccacatttaacatccaggtttccgcgtctcgctgatcaggtggaatttcttttggagttatacctt

SEQ ID NO: 146371 - DNA, 685 bp, Cannabis sativa
  modified_base (319)..(324): a, c, t, g, unknown or other
  modified_base (425)..(448): a, c, t, g, unknown or other
taaaataataattaaattttattttgttacaatttaaaatatataatatattaatttttctcaaatttattttatattttgttatgtaattttttggttgttatgtatatttttttttttgttttagttaaagtattttgtctttttgtgattttttattggctaattaagattttttcccccgaactttgacatgtaccaaatcatgctatttgaactttttatgccgttaaaaattctccttgaactattgagattattagatttaaagacttttgtctaagtttattcaattttactgtttcagtgattatttatnnnnnnaaccatgctccccaactttgatatctaccaaattatgtccctcaaactttgatatgtactaaatcatgccctgaacattcatctatgttagaatttttttnnnnnnnnnnnnnnnnnnnnnnnnaaatctaacaatctcaataatttatggagaatttttaaggagaatttttttaaaatatatacataaaactaataatatttatatgtataacgtcagttattttaatacatcatataccgaacttattttaccgaaagtacaaattaatatatactcatccactgtccctttgcaagatcatgttggcagaggtcgagtttaaatatggcctcagtgtcttggacatcattttgggat

SEQ ID NO: 146372 - DNA, 520 bp, Cannabis sativa
tgtgtgtaattaaaaataattatacaatttgatatatttgtatgattacaaaattacacgttaagtgtataattagaagtaattgagaaattccaattcttatgatcccataaaaattgagtgtaattacactgtactaaaaaaatattatttacattatttcaccaaacaagatattaggaatatttcatatgtaattatcactttatatccaaatacatcttgtgtattaaaataaagtgtaattactaaactgtgtaattaatactctagtaattacacagttacttctaaacatactataagtttaatttcttgcagtaatagtatctacaccctaccagtgaaattttaaattaatatctacgtgtcgttttttattaatgtatttaaataaatttttaaataaaaaataaaaatttaataacgtggaccaattaaaatacatggtcattgacttatacttaatagttttttttttttttttgagaaaagtacttatacttaatagttaggtact

SEQ ID NO: 146373 - DNA, 523 bp, Cannabis sativa
agcctccaacttttcttggaggtattgatatgataaaggccgagcagtggatgagcactattacccgtatcctcgataatatgggggtgacgagaactgaaagagtgaactgtgcagccttcatgttacaagatcatgcccgcgtctggtgggatatcgtgggttgaacttgggatgtcagtgtaatgacctgggaagaatttaaaagtttgtttgaggaaaagttttataacatcgttgtgagaacttcacacaaggaagactttgtgaagcttactcaggggaagatgtcagtggccaaatatactctggagtttgatcggttgtctaagtttgctggtgatttgatgcccacagatttcaccaggaaacagaagtatgtgagaggattgaatgccccaatcagctacgacttgaagattaccacttcacatgacattttgtacaagaaagtggtagagctagccttgattgctgaggaggctgagaaacatgttgcgaaagagcaggctgtaaaggatgc

SEQ ID NO: 146374 - DNA, 532 bp, Cannabis sativa
  modified_base (266)..(293): a, c, t, g, unknown or other
  modified_base (341)..(343): a, c, t, g, unknown or other
caaacacaatatccatgtaacaaattgtgaagatattaatataattaaattattattttagctaaccaactaaattttaaaatttagggttgctaaaacaacctttaatatctttcaaaatttaaaaattcaaaatgaaactaattttaaaatatctaggttttatttaaattactttatcaaattaaattaaatatctaataagataaatgatttgaaataaccaaaaagatattatcattatcattttctaatcttataatttnnnnnnnnnnnnnnnnnnnnnnnnnnnnattttaaaatagatatggttaggctaatattattttaagaataaaatnnnaaacaaataataattatccaaattatatgtcaaaatgtctcaaattaaacctttttcaaatttctacaaaaatatctaggtcatttaaatattatttataaatcttttataagtaaaatgataaaaaaaatattatttttctaacttataatttgtaaacaatcaaatatttcacaaaataacctattt

SEQ ID NO: 146375 - DNA, 685 bp, Cannabis sativa
attcaatttgggttgtggtagaccaatttacgaaatctgctcattttctaccaattaagacaactttcttaatggatcaatatgcagatttgtacactaaagagattgtaagatttcatggtgtgccaaagtccatagtttcggatagagatccgaagtttacttcaaaattttggcagagtttgcaacggactatgggtaccaaactaaaatttagtacagctttccatccttagactgatggacagtctgaaaggacgattcagatactgggagatatgttatgagcctgtgttatggattttgaaggctcatgaagtaagtacctaccgttgatagagttctcgtacaataacaattatcaaagtacgataggcatggctccctatgaactgttatatggcagaaagtgtagatctcccattcactgggatgaaaaaggggagaagaaatacctaggtccggagtcagtgcaacggactaatgaagcgattgagaagattaaaaccagaatgcttgtctctcagagtaggcaaaagagttatgtagatccgcaacgcaggaatgttgagtttcaagtaggggatcatgtattcctacgagtctctctgataaaagggatcaagcatttcgggaaaagaggcaagttatgccctagatttacaagacctttcgagattctcga

SEQ ID NO: 146376 - DNA, 537 bp, Cannabis sativa
cgaccgaacatatatattatataatatatattatttttgtacatatttaatgtacaattttattaactaattttacttatatctattttttttaaagtctcaactattcattgctttattgtagatgcatttgcgtattatatacacacattcataaaaataatacgagttttttaatataactcattaccatattagtagcactattcattgtatcaaatactctattttttagttttcaaataattataaaagttttaaaaatttattttttttttaaaaaaataaagttcggtttggtcggtttaaaccgaccaacccgcggattaaaacaatcagtttttttttacatttttataatggccggttggttttcggatttgaaccataaaaactgaaaactaaattttagatttttttgtgtaaaaaaccaaccgaaccaaccatttctcacttctagacacaaatatatatacatatatttacatatgttctcgacttaatagaattttgtacattaaatataatcatgaaata

SEQ ID NO: 146377 - DNA, 994 bp, Cannabis sativa
  modified_base (849)..(849): a, c, t, g, unknown or other
ttacttccaattacacagttacagtgtaattacatggttagacaacacatgccaaattatgtaattacctccaattacacacaaatccaattacattatagctttgcaagcacacccttaattgaaagactatttctggacaagcatgacactgtctgctcattattgtcttgagttatatcaaatagattattaaaatgtcatttatcaatgataatattgatgacaaaaattatgtggtgcaactagaaaattttgtatccaaagatccaaagaatatagtttgtaaattaagaaaaatctatgtatgaactcaagtaagcttctcgtcaatgattacacaatttttattaagtattctcatttggttttgagatagaagcttttgatgattgtgtatatatcacaggttaagtcgcagtaagaatatgatcctggtattatattggtgaaaaattgcttgccattaatgatatactcattttgtattaggaattcaagatatgttgagaatgttcttgagatattcttgaattgttacaaaagagatatatcaataaagtattcgaaacttttggcatgaaagataatataccaggtgtaagacttatagctaaagaaaataagttgtctaagtcattgtcctaaaagaaaccttagaattcaagaaatataaaagattcttaatttatattggaatctaatttatgctcaagcatgtatatatttgtacttaatatacatattaagaatgttggataggtatttaagtaaccatataaggaacttttggtatgcatccaaataagctataaggaatctaaggagaacaaaatactatatgttcanttatcagaaatcaaaaaatagaaaattttggaaatcattaagatttcagattctaatcttataaagattttagttgtgagatttttttttgtcacatatgactgcaaaattaggaatggtattgaaaactattaaagatatatgt

SEQ ID NO: 146378 - DNA, 636 bp, Cannabis sativa
taaagttaactcaaattttttcttaacaaaccaatagatggccaggaaaaaaaaattaagaatactctataatctttatacaaattacaaagtatacaatgaaataaattgatctacatatcattgaatgaacataatggaaataattttttatcaaacagttggtgtttcctttttttttttgataaaatttgaaagcaaatataaaaaaaaaatacacatatagaaacacacacatattacgataacacatatatatatatatatatataaatatacaaatattcatataccttctacagatttaatattggagcaatttccaatcttatgagctgcaaataattaagaaaaattgtgagataaaagaaaagaaagagaaaattttactaatcttgactatacatatatacctgaacaatgatgaagatgagtccggcagagtcggtggaaatgtccacaacggtggaggcggtgggaatgttgttgtgtggtcgaaacggtgggctagtagtcgatgatgaacaaggggaggtaaataataagggttttgatattgaggatgaagaaggagagatgtatgtttgtggtcaaaaattttgaggatgaagagggagatagataaataaggatact

SEQ ID NO: 146379 - DNA, 605 bp, Cannabis sativa
  modified_base (259)..(263): a, c, t, g, unknown or other
acttagaaagatacaacagtaagtttataatacctttactaagatcaatatcggtcccagttcaatttatactccatacatccaaaaccagcatactttactaatgttctggaaagaacataacacttatccaaagtgtaagtatactttatcgctggctatcacatcagtgaaaatccagtgcactgataaatcgagggagattatcttttcaaggatataatcacaattaccttccactatgttgacatcactgtannnnngaataactatatgttttggacttatcagattttgtacacattaaaccacaaacatgaaaactacatgtaaacacaaatgacttctaatcttttattgataaaaaatcagtttacattgaaatgagttttatttaggacataaaatttcaacactttggggaagtaatccccgtcaagaatttatgcatgaagttccctatgacaatggatgtattggaacgatcaaaggaaatcaaaaaagtgctaaaaactatttcaacaactcgagtcgggttgtgttcatggttctagaaaaaactgttggaaattaaatgactccttctattcagatctctaaccctt

SEQ ID NO: 146380 - DNA, 964 bp, Cannabis sativa
  modified_base (916)..(928): a, c, t, g, unknown or other
aatcttaaaaagaccaaaatcttaaataaaattagcaatacgtggctcggcacgtacattcacctagtatatatatatctatataaatatatacatataatcaggttcgtcaaaaccgattgcggccttggtgaaaagatataatttagcttttttcttagtacaagtttttgacagttaaattatctcaattatcatttcacttgtaattaattctcgaatcttaaattttagcggtaaaatcttctaaactactaaactatagcaaatttaaggtgtcatccggttaacaaccaccatgaactccttatgtgcatactcacatggaatattattatttgaaaattattttcaaaatttatttaaaattaaataaaattatacaaataaaaaatattataaaatttgaaatatttttttttttttaaatgataatattagatatacaaatataaacctgtcacgtgtataagagtgtatacagaagcaatctatgttagcagttaactgtagaatgaggatgataccttaaatttacaaatagttaagtagttttaccgtcaaaatttgagtttagaggattaagtgcaactagagtaataatttagaaggtttagccgcaaaaaattctttttatatatatataattgtaagaatttaaaatataatattttgaaaatataattggatttttcaaataagatatcaaatgtattttaaaaaataaattaggtctattttttagaaaataattatatttttaaataaataatagtaaaaatattaaatataatatttttaaaagagaaatttaagactcttttgttaaatgatttttggattattcacaccatatactgaaatttctaatttttttaactttttactgtcggacggaatttttttcaaaaatacnnnnnnnnnnnnntactgtgtactgtgttaagttttcactgttgttcta

SEQ ID NO: 146381 - DNA, 587 bp, Cannabis sativa
ctaaggcatgggccaagtggttgttttgggcagaatactcctacaatactactttccactcctcctttggttgtaccccattcaaggtgttatatgggcgtgatccgccagccttaatccggtattcagagggatccacttctgtcctggccctcgagcagtatttggaagagcgagatgggttttgggatgacctcaaaatgcacttgttacgtgctcaacacaagatgaaggcagcagctgattcttctcgtcgccatgtggaatttgcggttggggaccaagtctttcttaagctccgcccttaccgacagaagtccttagtccttcgaaagaatgagaagctagctgctcgtttctatgggccctttactgttctgaaacggattggtgcagtagcttatcatttggaccttgccacatcatcagcggttcaccccgtcttccatgtgtcccaactccgtactgcggttggtacggctcactcgtctcctaccattcctcctacattgactgctgatttggagttgttggtcgaacctgctgaacttttgaatgtgcgtcaaaggcctacacctacaggagct

SEQ ID NO: 146382 - DNA, 1008 bp, Cannabis sativa
  modified_base (138)..(143): a, c, t, g, unknown or other
agggtcagtcatcaatccaggaagcagcgagagtggcgtactcgtgtataagagccattagtccgtgggcgtaagggcccaatggagacttgaagcggggacgctacactgtaccatttccgtacaagtgttggtagnnnnnnaatcataataagcatgcacatatatttcacacatacatacattcgcatatatatatatatctcacatattctacactattctttcctcatttctgaattcaagtgagttggctgacctgataggaaagtctcgtgttggatggatgccctaatcacacagcgtaaccaggtaagtaactccccaaaaccctaatccgagaaacccgaacctccaacttaaggttctgctattactaattgaaactacaataccctaagaaacagggaatcaccaaaccaaggctctgaaatggacatgaatcgaggaatgaattgtttggggaatttgccaaaatcggttaaccgattttacaggtcctcgcaaaccggttagccggtttgcactaggtttccccaaaaaattctaaacctgctcaaaacatgtctaaatcccaccaaactttcaagaacacctataatgaccttccacaataaattccaatcaacagaaaccaaaaaaacacaaaaaatcaaaacatgccattgttgagcaaagtttgagttagaactcaaacttgctcaacctaagaattaagcttcaaaaccagtaaattcagacttaaaacaatattactaaacatcataaaccaaacacacaacaaacctaacttccacaacaataattcatcaattcatggattaaaactcaacttaaaacttataaattcatgagataaaggtttctagggttaccttcactttcaatactttgaatccttgctggattcaagcaaaactaaagaaatcaaaattgagttcttctggttgtgtgggagctgaaccaagagagagagagagagaagatgatcctttttttttttttttt

SEQ ID NO: 146383 - DNA, 559 bp, Cannabis sativa
  modified_base (517)..(517): a, c, t, g, unknown or other
agttgaaggtgcttcctagtcatctacgatatgagttcttgggagaagataagaagctgccagttatagtgtcagcctcactttctaatgtggaaactgatagatggctcagagtacttcgggcgcatagcaaggctatagcatggacactgggtgatgtcaagggaatcagtccctcaactgtgatgcatcgaattctgatggaagaaaatgtgaaaccaacaatcgatgctcagcgtagactcaatccacctatgaaggaagttgtcagaaaggaagtggtcaagtggttggatgatggagtggcctaccccatctcagatagtaaatggttagtccggtgcaagtagttctaaagaaaggggggatgacagtaattaagaatgagaagaatgagttaattcccacaagaaatgttacttgttggagaatttgtattgattttcgaaaactcaacaaagcaacccggaaagattagtttcccttgcccttcattgatcagatgctagacagattngcagggcaagagtattactgttttcttgatggctactctgga

SEQ ID NO: 146384 - DNA, 966 bp, Cannabis sativa
gaggcattcaaaaaactaaaagaacacatggccaagccaccaatcctatcaaagaccgttctcggagaagacttgttcctatacttggccgtatccgagaatgcgatcagcacagccttagttcgggaagaggagaaaactcagcatcccgtgtactatgtcagcaagcgcatgataggggcggagacgcgatatccagtgattgaaaagctagtcttttgcctcctgatggcctcgagtaagttaagaccctacttccaagctcacccaatcaaggtattgaccaaccatccgctccggcaagtcttacaaaagctagaggcattcggaaggctcttaaagtgggcaatggagttaagccaatttgacttgcattacattccgcgcatttccataaaggggcaggcgctagcagacttcatcacgaagtgcaatgaagctgaagctaccgcaaacatacccacaccatcagtcctagcgtggaaagtgtttatagacggagcctccaacgagaatggatccggagcgggggtcacaatgatatgcccaaacggactttgactccaagcagccctatggttttacttctcagtttctaacaatgaggctgaatacgaagccctaatagcagggctaagattagcaaaaaccgtgggggctaaaagggtagaagtctacaacgattcccaactggtagtgaaccaggtgtcgggagaatatcaaacacccagaaaaagaatggccgcatatgtagcgatagtctgagaactgctccacgagttcgcggactataaagtggaaagaatccccagagaaaagaatgctcactcagactgtctggctaagttagcttcagacagcgaaatcgagaaactgggggtggtacctgtggaacggttagtagagccaagcatcaaaataaaagaggccataacaacggttaggcaagaacccagctggatggtc

SEQ ID NO: 146385 - DNA, 752 bp, Cannabis sativa
  modified_base (525)..(534): a, c, t, g, unknown or other
tgagtttcaaagctcaagcttactgaattccatcaccatagctcaaaactaatatcctgaacttaaatcaattcaaaataagcttagaaatcagactacacaatctttaaaccccgacaacccctaatacttaaaatcacctaatcaaaccaaagtaaaagcttaaaaacacaagtctatggattctagggttaccttagcttgaatcccacttgaattccttgctgaaaacacaaaagattagcagcaactcccctagtttttggctggttcgaagagagagaagggaaagaaagatgttgttcttgaattttggctttttccttatttttctcttatttttcttccaatgaaaaactaattgttctcttgctgagttaaaatgaccaggtgtccacaccctaggcagccaccaaaccaccctcttggcaaattacaaaaatgcccctaatcttacaacttaggtattttattttttctaaaatatttcccactaagagttaaggttctaaacttacccatgtnnnnnnnnnngccatccatcgcattttctgttgtctccgagcaaaaattacgtaattcatatataaatcaaataataaccctagagtttaataaaatctccgaaattgagaaattataaccctaatgtccatttctaataatggggtccacaaataattaaattcataactaattataaaaataacaggcattagtgctaattgcctttactaatccaaattactaaa

SEQ ID NO: 146386 - DNA, 885 bp, Cannabis sativa
tgtccgagtttggaaatcctataaatcatccaatactgatccaaaaattaccaaattttgccaggaacctaaaaacatcataatgaacatatttcatgaaaaaacctcaatcaaattcttaacagaaatcaaactaaatggccgtcctaaaactaccaaaatcggatggcccgaaactccttgtccgagtttggaaatcccatgtctaaaaataacggtcattacaactatccccccgttaaaaggatttcagaataactctggatatattgagtcagtccgtcctccctcatttcagactctaactcccaggtggcctcttccaccttgttattcttccatagtaccttgattaagaagatagtcttgttccgtagaactttgtccttcctatccaggatttgaactggttgttcctcataggatagatctggtgccaactctagtgtatcataactcaagacatgagttggattagatacatactttctcagcattgatacgtgaaaaacattatgcactgctgataatgctggaggtaaagctaatcaatacgctacttgtccaaccttttcgagtatttcaaatggcgctatgaatctaggacttaacttgcccctctttccaaagcgtttaacacttttcattggtgaaatccgtaggaaaacatgttctcctacctgaaactctatgtctcggcgcttaggatcagcataactcttttacctactttgggaagtaagcatccgtgccttgatctttttgatggcatcactggtcttttgaactaactcaagacccgaaaactttctttctccagttttgtcccagtgaataggtgatcgacacttcttaccatacaacaactcatagggagccatccct

SEQ ID NO: 146387 - DNA, 620 bp, Cannabis sativa
ccgcaaatgtagcaatgggggtacatgcagcagcgggatttggacagcctacgggcaaggtgtcaacagtatctggatggacaatatatgtatagttggatggtaaatgacacctccaccccttcctaagctctcaaatgaagcgtccgtagctttgaccttcaatctggttggggtaaaaatgacgttgcacttacgattccggggaaggtgtgtgttcactatttatctcccaatcttcaaagcttgaattggagaggttgtcactagataaagatgtactagcgcggaggcgaggatgatcctcgtatagaagttgaagcagatcctggtcgatacgatgtttgcttccccaaaactcactagggttcatctacaaaaggtaggaaacaagatgagtgtttggtcgggagaacaaacagaaacaggttagttataccgaccaagtccgatcaagggataaaaaatagaaattttacataataatgaggtttgcaatccagaatttcaaaattttgaattaagatttggtttgcactaagcctcaaatgggtaagtgaaagtgagtatcgtggaatcaaaattaaaacgcagttatgatcaagcaacgtgattaagca

SEQ ID NO: 146388 - DNA, 530 bp, Cannabis sativa
cccaaggtgacacactaggtcgaataaaccctatgtcaagcaacccctggagctgaattctcaattccttaagttcaactggagtcattctataaggagccttgggaactagttctgctctcggtgccaaatcaattataaaatcaattcctcgctgaggtggtaaacctggaagttcttcaagaataacatctaaaaattctcgaaccaccttgatgtcttctgaccgaacagagtctggccgactggtgtctaataccacggccagaaaccctaaacatccgtcacacaacaattccttagctgataaggctgaaatcaccgggatccgagatccctgaaccgaaccgacaaaaacaaacggttcttctccttctggttggaagattaccatcttcttcttatagtcaatactagctaaatatttggataacaaatccattcctagtatgatatcgaaatctgctaagctcatttctattaggtcagcacttaactccctatcgtcaattctgatcggcatagaccta

SEQ ID NO: 146389 - DNA, 559 bp, Cannabis sativa
acaacttaagcaagtgagtactaaaaggcattacgataacattaagacattgttaatttaattcttaacttaaaagaccactgatcactattttattagaagtaatcaaaagctggctgtctagtgcaactcataccgttagtattctgcctcctaagtcctgcgacatgccaaaggagcggcgaagaccaaatcaaggcaaaattgagacccttgaagaatgggtgtttcttaacttcagccgctccgtatttgtgtgcctttgttggaagctccatttgagagagaagagtatatcttagtatttctgtatgtatggaaacctatgtcaaaaactgaataaaaatggagagcagtaatgtgggaaagattatatatatgtatgcttattatataaatatatatatatcttaggtttttttgcattctaggatttagttttgattggttttggggaacagggttattgattctcttacagaattcaggtcatgcgttcgggctagtggggaccaagaatattgtaaaattatatcaatattggaatcttgccaatcat

SEQ ID NO: 146390 - DNA, 542 bp, Cannabis sativa
attgtcatcatagcgacatgcaatttgttataaaaactcgctatcatttttctaaaatgttgaagggacaataatgttttcattatcctgtcaaatgcaattagtgtctaaagtagatccacgagcactaactcaatcattaaaataactattataacttaaaaaacatcaataactttataactcaaataaccgataacttaaaattaaaacttaaattatattgtaataatctaatttaactactttatatgaaaagatttaatgatagaaaaaaaattgtttcaaaaaaaaaactatatgatagtagaattttttttaaaatgattgagaaatatgtgtatgattgaaaggaaaattatttatcaatacaacattttttatcaagataattttaattaataataataaaaaatatctacatgttcaaaatagctttttataaaaattgggttgtaccagctttagcttttaattttttcaaaaactatgtcaaactggcataacatattataaaattattatgaataaaaagaagaaaa

SEQ ID NO: 146391 - DNA, 608 bp, Cannabis sativa
aaaaaagaaattacaaggacaaaatagttattgcttacatgaattaattatagaaattcaaaattacaaaattaatttctttattaccaatattacacagtacatatctcatatcactacaatttttttatttttttattttttagattttacagtagtatatttcttaaagtgtttgccttggattgaacaccgatataaaaacctaccaagtgataactttcaaattcaaaaaatctagacatagtgtaggtggcaataataggctaattagcaaacgtaaataactacaattaaaatatatttagaaaaaattagcctattttaaaatccttatatcatatattttggggtaaatgctattttggattctgcgttttacaaaagttaccgattagactctgtgttttattaaatgacaaaataaaccctatattttccaaaatggtaaaaataggacattgaacttaattttcaacaattttattttttaatataatcaaatttaagaaaatttttaatatgaacagattcagaaaatataactagttttatcataacatctcaagattagattattattgaattttattttgataaaaaaaaaa

SEQ ID NO: 146392 - DNA, 1407 bp, Cannabis sativa
  modified_base (884)..(886): a, c, t, g, unknown or other
  modified_base (954)..(956): a, c, t, g, unknown or other
cccattcttccaccttgtcgggccaccatctcaatatgactccaaacattagtatgatattgtctgctttgggcctaagccctcagttttattttgagcaccttcctaaaaatgcctcatactagtggagtaggtggaaatcttatatttaaggcaactcttgcctattcttttcatgtgggacttgagttgatatcccaacaattttaatgtagcctagaagaaaaaaaactacctttaatgataagctttgagtcacaacataaatttttataattaaatgtgacttttaatcacaacataataattttcatacacaaatttataaggttatatttataagatcttaaaagaaataacctacatatttaattagtatttatttaagtaaattaaaactatttcaaaaaggtaaagtaaataatttgttaaaaaaaagtcaattaaaagataataaaaattatatattaaaaaagatataatacattctatttttattctttttttaaaaaaaaaataaaaaaaaaccataggacaattaattttttatgcattataaatatattctagtaatgatataaaaaaaaaaaaagtcaagtttttatgcttaattttttaattaaattagaaaaatttctctttttagattatatgggtaggggttgttccactgaaagaaaaaacttaaaaaaaaaagttttttgacaaaaaaaattgagtttgacttaaatattttgtatataaacatatttttgatataatgtaaaaaaagattttttttttaattttttttaattaagtagctaagttaagcataaaaattcgaatttctcttttattatttgtcaatggatcaaaatctaatggtttaatatttttaaaannnatatttatagttaaatttgtttggtaaccatcatgagtaatacccattaaaaagtgttctatatatannnatatatatatatataaatgaatatgataattttaattagtttttttttttgataatattaaattgggggttttacaccacatactgaaattttctatattttctcttttttagtgtgtggcaaaattttttttcaaaaatattgtgtattttttatactgtatactgtgttaagtttttactgttgttttttaattgttctactattgtttgtaattgttctgttttattgttttacggttgttttataaaaagacagtatatttgtaaaaaatttcacgtgacagtaaaattgtaaacttttacctaaagtttaatattttttgtaaaaaaccctgtttaaatttaattaattaatacatctctttaacattctgttatatttgttgttttttattgatttaattaactgaattataatgttttctcttttattatatttaagtgaactc

SEQ ID NO: 146393 - DNA, 505 bp, Cannabis sativa
tcacccaacgagacgttgtcactcccctcaagttgggtgtgtgggatcaccaaacgatgacagttgtcaccccctcaagttggaccccgtggggtcacccaacgataacggttgtaatcccctcaagttgggttccgagtggtcaccaaacgatgatggttgtcaccccctcaagttcggtctcgggggatcacccaacgatgacggttgtccaccccctcaagttgggtctcgggggtgttgcccccaagtatgggcttcatccctgaaggcagttgacgaccatgtcacacctataagagaccctcgtcatcagtaactctttcaaatgttcaaatcccatgaaagactcaaagatagttgtcaacccacgaaaatagcgggatattatcttgaaaatcagacttcaactacctctaaaattcaaggggacggttgaggtggctccgtgttggtcgcgtctcctaaagcgagaagcaccgaccccctcccctatataaggggt

SEQ ID NO: 146394 - DNA, 622 bp, Cannabis sativa
agtcgatacaaataatattcaagatattgaattatatagtagtattaataattatgataattataatttcaaagttcaaaaatagatatatttttttaaaacaaaattaaaaaataaataagtgactttctaaatctaaaaaaaatataaattgagagactcaaggatttatttgattattttataaaaaaatgtgaaagaaaggtatactcgttacttgaatgaattttttaaaaattaattatcaatgttcaaattttaaaaataaagcaatttatatttttatttagaaaaaattagaaaatagataaataaatttgaagtaattttaataaactaataaaaaattataaattgagagaatggagagaataaaaagagttaattagagagattttagagtgtcatctctattcattaaattataattattgataatgttatttattaaaagtttatttagtgtgttttagttttttatttattaagaagtttaaaatttatataattaatgtatagttgaattttaaattgcttttcttttttcttccaaaagataaataaataaatagggcaaattacataaaaattagggaaaaaaacaaaaaaatacaaaaaagga

SEQ ID NO: 146395 - DNA, 502 bp, Cannabis sativa
  modified_base (116)..(119): a, c, t, g, unknown or other
actaaaaaataactgtggaacaacaggaaaaacttaacacagcatacagcataaaacttacacaagatttttgaaaaaaattccgccccacagtaaaaaagtaaaaaaattaaaannnncagtatgtggtgtaaaaactccatgattatataatttgttggaagtgggtttctctgtagtgaatagaaacatttttttcttgtatcatttccaacaaggttgacaaactaggtggatacgtaaatatattctttttggtgcctagtatcctctttggtgtcatatagtgtaattaagtatcaggtctcatatagcttaagataataaattttaggttatatgacttattataagacgctacctataaaaggtattgtacaccactagtactttgctcttaaataaggaggtgcacatattttctctctcttcactactacaaaaatgggttatcccaacgtttttaaatagtcgtttaaagtattcctgtcagtttctataa

SEQ ID NO: 146396 - DNA, 983 bp, Cannabis sativa
actttgatcttgattgagagtgataatttttacttttcgaactcactttcttgggtgatcttcctcttattacaagatacacttcttctttcttaatttccttttccaattataattcaaaatcttttgacttaagtgtgacaagaacattctccaatgcaatcacgtctctgccatacttgatagcagcctttacttcttgatatgcaattgggagtgatctcatgagaaaaatgatagtttgactttctttatcaaccttgtgatttatattagctaatcctacaataatctcattgaatctatcaatattatcatctaaagaaaggaaagcaatcattttaaacctgtataacctttctagaaaattgatcttgctagttgttgatggattaaatataactcttccaacttgttctagactcttttcgtcgtcttctttgtgatgagttttcttcaaacactgtttgacaaatacatgatgattgtgtaatacgccatctcctccatttctgctttttcctttcttcttggctaaaagtttctcatctccaagaaacttggaaaccttttggtgcactaggatttctttcaagctttctttccattgcgcaaagtctcttgttctattgaatttctccaatttaaatcccgtcattgatgacattaaagtttcttcaagaattatagtggaaagaattctgattatgcattcttgatcgattaccaagctctgatttgtggaaaaattacaactagtagtgtagaatcaaatcaactaaacttaaaataatcaagcttttagcaatgacaagattgacaaaacacaaacaataattgtaaagaaaagtagagattaatagagtataaacaactagaaatgattaaagcagaaaaataataaaatcaacactaagatatatactgattcaagtctgatatatcgatataatctttggctctactctagttctggaatacca

SEQ ID NO: 146397 - DNA, 725 bp, Cannabis sativa
aaaaaaaaatactattcttaaaatttgtgtattgataccatataatgatattgatgctatgttttttttttttcaaataaaaattaaaaaagtgttatatataatagtttaataaaaaaaaatatttatatatatattataatgtgtgaaaccatagttaaagtatttttaaaatgtgttatactagtggagtatttttaaaaataaaagtgtaaaaaataatgtaaaagaaagataaaataaaatattatatttttaaatgatgtggagatatatagcacatttaaagaatattaccattaaagatgttttaatgggttgaccataaaattatttttgccacatatataatatggtgatcatttttaatgtaattttattaatattattgtttatatttaacagcaatgtgccattactttataaaatttaataatttaaatggtaatatgtgagaccatggtggacaacttttagagttatcaaccattgcagtaatttttgtatgaacaattgttaaatcttatgtggatgagagagaaaataaaaataaaatatattttaggatgatgtgtgcacttttgacaattataagagcatctccaactataaaattcgggaacatgtttctacatttttcaactgtatataatcaaaagatgttgcacagtgactacaaaattgtgagccctaactgtcctgaagatctaatatttcaggtcaaa

SEQ ID NO: 146398 - DNA, 1141 bp, Cannabis sativa
  modified_base (971)..(977): a, c, t, g, unknown or other
gcacatatgatccataattatttttgtgataatatatctcctaagattattgttattacttttaaaatatcaccgtatattatctatgaccatatattaactataactcttctagaatatatgcgtggacttctaaattatggatgagatcgaggttctaggaacttcattaattatccaacttattgaatcatatgtgtgtatatacaatattgttcatatcaaagtttcaaattttaagtaatatgaacataacacattaatgataatataaatttttattagcgccaataatggtactccaagaccatacatttgttacatttttattatatgatcttaatttccatatcaaatgatcatatatctataattattgatgcatatgaaatactttaagacttctctactaatgaacaaactatatacatttaatatttctcactatataaaaagaaataaaattatgttcttcaatcatttataatataatcaaaaactcttcaagagtctatcacaacgtataatttataaatttatattgcatagataattatacgttttcttaactaataatttacttacatgtctttatttcatataaagatttttgtcatatagtgcgactttgaatttataccacttaagacatgtgtcaaattcttctataatttttaaataagacatattttaaattctcaatatatttggagctccaaataaataatcttttgttgcaatatttatgtgacacttataaattctcataaaatatattttagactataatcaaatcatgattatattttctcaatatttaagtcttatttcaatcaatctaacgtctatgtaaattttgtacaacaactttattgtgtgtacaaatatacaaatgtgcaaatttctcattagaattttatatttttgtagaaatatttatttgtgtatcctacaggtcttacttcactttnnnnnnntaaatttgtctggattgcgtcatattattttggccaaaaataaaatgtatgtccacaattctcgataattctaatatcatgatccttgctatctcacgttagtttattgcatatgcaaacattcaacatctattgtcgataaaaattttattatatgataattt

SEQ ID NO: 146399 - DNA, 689 bp, Cannabis sativa
tcatggacaaaaataatgtatatgtggaagttagttctattacttgatggtttcaaaccaataggttgcaaatggatttttaagaactaaaatgatgaaaggggacatatagaaaggtataaatcacgtttagtgacaaaaggctttactcaaagagtgtattgattacactgaaactttctcacttgttttcactaaagattcattcaaaattattgtggatttagttgtgtattttgaatcagagttgcatcaaatagttgttaaaactgttgttctgaatggagaattgagtgagcaaattttttatgtctcaatctgaaggcttcgaggaaaatggaaatgataatttggtttgcaaatcaaaatgatccatttatggtctcaaataggcatctcaccaatggtacttgaagtttaataaggttgtgacactgttgggtttcatcgagaacaagtttaactagtgtatttatatgaagatcagtgggagtcgtcatatttttcttattctttatgtagacgacattttacttgccagcagtgatttttcattaccaaatgagaccaaaatttttgtgtctaccattttttcgatatgaaggatcttggagaggcatcttttgttttggagattaagattcatcgtgataagaatcgaaaatttcttggcttatctcaagaagctt

SEQ ID NO: 146400 - DNA, 678 bp, Cannabis sativa
ataattgctatagatcaatcaagtacacatacctaattattatatattattattgtgttctatgctatatacaaatagatcttgagttaattgttaatttttctaacactttcaaatagctagataaacagagcagcaatgtcatgcattctatatacgccatttgagggtatacagttttttctttttttttttcttgggatagattttaataataccaaaataatatttatccaattacttttttctctagattgttagttaacttttattcgactaactcatatcaagttattatgtatatacgtacaaatgatctatagaaacaatcaaattatacattatttttgtatctcacgttattattttggaaaatgctaaatgactatttgtaggatcactgccgctttgtcgacactagcatattcaatttatcaacgaaaaaatggacaatccaattatatgcagacccggctagaatgaaaagtgcaaaatacaaaaattacactattgtctctgtcgaagcaaaggaagattaaaatccacccatgtgtatcattatttttcttatctaccatttttatacatgtgttatctttaattatcaacaatttagagattaatttttaatattcttttttatcttacacacatttaagttatgtttccttaagtatt

SEQ ID NO: 146401 - DNA, 1027 bp, Cannabis sativa
tagccagcaaaccttttgggtttgtgctgtccgattgaatcggagtggtgcctaagcgaggcattggccatatttgcgatgtgctaacgggtaaaagtaattgagcactatcgcgagttttccatatacttgctattttagtatacaaaaattaagtgcttgagcttgcctcttttaagagtatataagcacaatttgtcaaataattttgcaaaaatgagcacactcagggctcgccaatttgcaaatagaaatacactagcgaatttaataatgcaaaaatgagcactatattaggctcgcccatttgcaatatgtataaacacaataataaatttattaagtaattatgcgagaatgagcacacatcgggctcgccaatttcgcaattacaaaaaattttagtctcgatgtataatagccttatcaattattttcagatccacataaatatatgcataaaaaagaaataagataagtgcacctgggagtgatcaacatacgcgagaaggctttgagtcgtcgtactcatcacattccactgggcccacatacatatacttgaaaagacaataagcgaggctttttatactgtgttgatgcttatattacagggattgggccaatcatatttaatgacattggattattctaaggataaactcaaagtataattgggcctgaaattctcagtattaaggcccaacaaactttaatagggttaccgtaccttatcataactcttgtatacacagcagtgtcggcacagaacgaaaggtggtgttttggccttttggtacctctttctccatccgttgagctacctcctttatgaatttgatgtattgatttcatcaagccgttttagcatttggttacgatgcgtgatgaaatttattgagtcgtttctgatggagatgtcgcttgggttcaccgattagattctctaccagcaatgagaacgacaatgtaaagcccgcttagttaatttggaaattagcagttgttatgtttaattatgaaatta

SEQ ID NO: 146402 - DNA, 621 bp, Cannabis sativa
gagcctaagattcttaaaggaaaaaaggaaaaaacaagaagaagaagaagaagatgaagctcagtctgaagcttgcagcgatgtcagaaagaagaaatggaagtttggtttttgccattaatggccagaggttcgagcttccaactcttgacccttcaactactttgcttcatttcttgcggactcagactcgtttcaagagtgttaagctcggttgtggcgaaggttttcattcttcactttctctctagttttcaatctcttaacgtttgtaaaattaagtatattatttgagagtctaattaagtatatgtctttctctgtagcacgtaggatgtgttggatttgtagtttatgagctttgttagaaaaagtaggcaaattccacgttttctcgcagtttgaactggactcttgtgtaatttgttacacaagtcttgattttgaatttgttagtattggaacctaagataacaaaattattgggaaatctggtaaatatcgattcaagtcctgtgaaattttatgtttttttttttcaggtggttgtggtgcttgtactgtgctgctatccaagtatgatccagtaaatgacacagttgaggatatgactgcaagttc

SEQ ID NO: 146403 - DNA, 693 bp, Cannabis sativa
cgggagaccatcgaccaggatctgcttcaactcctgtatgaggatcaccctcatctttgttctgctccgccctcttcaagcgacgaacattttagttcaattttcccgtccagccacaggatgatggcttgcactaaacaaacaatgcgtaaagtcaacgcgttttaccctcacgtggcccagcacgccaccttgcccagcgccgaacaggatccacccgtgtaggaggagggggatcatgaaggggacgttgaagtccatgaagtagaagaacaaggcgatgtccatcctggtagtcctttcgaggcggaggaagaggaggaggctgcacccccaaactttgggggatataacgagggtgaggagccggtagatgcggatggcgacgtcttggtcgaggttacgtcactgaggagcttactgccacagtttctcaaaggaggcaaagtgccttgggtgctaggtgggtgagccctccgtccaaggtcactgaggcacatttatgggatcttgaccagggaggcaatctgggcgagctggagtgttacgttcccgcctcgaacaatcaagcctcaaaccctcagagggggatgtgcgcctggtcgagtgctcatgccaaataaggggcactactgactttgcacccgtacttgaggaaggtggtgtaacgccccgatttcccgagacgtcaca

SEQ ID NO: 146404 - DNA, 516 bp, Cannabis sativa
  modified_base (135)..(150): a, c, t, g, unknown or other
acagttttagttagaaatattgatgagattattgtgataagttgattttagaaatattggagtattttaggatactcgaagttggctaaataccttataaataaatatttcttagtggctaaaaaataataagannnnnnnnnnnnnnnnagtttttattaatattattatattattattaatattatatttttaatatatgtaaaacgaaactgataagtttcgttcgtttcatatatatatatgaattaagttttaagatataacagtgaacgaagaaagaaactctcgttctccctccttcgataaaaccttctcccgttagatccattttcttcgattttcaattcaaaacttagcaatctaagctccggtagtagcaggatagtaaatccttgaagagggaaagcttaagggctgagattatcgatgatagttctccacttaggttggtcgaaatgtatgaacctgaattaaaggtaagaaaagtatattgtactgtatagtacgttgtat

SEQ ID NO: 146405 - DNA, 523 bp, Cannabis sativa
ccaaacccagacctagacccggactcgtagtttgtattaggatcgagtgtattgaaaatatattataattttacacaatttattaatacaagtcagtaccaaatattgtattgtattaaataatattaatataatacaatacaacacaatctaacacaatacaatacgtcgtaccaaacgatcccataaaaatttatttacgtaaaaaagtgatattaatattataaaaattactattaactattaaataattgttataaagttttggcctttcttcagtaatttgaagtttttgacatataataagctcgtatagttaaattgaagattaaaagttatatttttaagggagaatcataattttgaaatattgatatttggatttaaaataagatacatactattaatatgattcttgaatttaaataaggctaattagtaatttttctcaactttgacatgtaccaaatcatgctcctgaatttttttggctgttaaaaattctcccgaactattgagattg

SEQ ID NO: 146406 - DNA, 509 bp, Cannabis sativa
tccctcaaaaccctagcctttaaaggtagtataaaaacccttttactggctgaaaccctggcacccaaatcaatttcttttcctctaaacctagcagccgaacaaaccccttcagcctctcttcttcttatcttcttcttcctttgaaaccctagtagccactcccttttcttctcaaagaaaagcttcagccgaatgtctccttctcttctccctttctttcttgctgcagcagcagctcttcaatggcagaaaacaactgttgcattttcttcttctccctttctccttgctgcaatagtagccaaacttctcttcttctccttgctgcaaaactttacagccgaacctttctttctccaagctttagaacatgcagaaaaacccaagaataatacaagagaagaaagcaaaaataaaaaactagcaaagagaaaaaactatagacaccacaacaattgatttcggagttccctctaaattagaaggtacgtctccgtcaagcgacc

SEQ ID NO: 146407 - DNA, 637 bp, Cannabis sativa
agaggtatgtttcaaataaatataaaattagaggcaaatttagataattaattaataaaagagtcatttttcaacttacccctttccatttggcattatttcaaaaaaaaaaaaaaattataaaaatagtactgtataaattttttaaatatttttactatttttagattttatttaaataaaatacagttttttttgatatattttcatgttatacttttattattttgttgttaagtttttattatttgtatattattttcatgtaattttttgtaataatatatataaaaaaacttataaatttttatgaaaattgaagtttatctaattttattcaatttgactattttaataattgtttatgtactaaactatgctcttcaaactttcatatatatcaaatcacggctctcaaactttgaaatatactaaatgaagcctcttgaactttcatctatattagactttcttactaaaattagaccaaaatttttaaatttaacaatctaaaaatttagggaacaaaattcttaattagtctggtaaaaatataacttagatataattacagtaaaaaaaaagggaaatttacacagtttactgtgttttcccattttctttcttttatactgtt

SEQ ID NO: 146408 - DNA, 545 bp, Cannabis sativa
  modified_base (63)..(70): a, c, t, g, unknown or other
ggatacttcatctcgacccaatttccacctttgcatctcatttttacacttttttaatctttnnnnnnnnttcccagtaacctccttaccccaatcgaccaacttttccctacaaaactgaattttatacatcacatcatcagccccacaaatctccctactatctttaacaatctaatagcaaagaggttccctcaaccacgcattttcaaactgaaaccgcttcacaaaattgtggccagcagcaggaaccataccataagaatcggagtatggtctgagattgaaatttcaagattatctagcttagcagaagtgaacatgttcacccaagcaagattatctagccccctatccaaacacacttcgatccaatgattagtccccctcccacgcccccaagtaaacaaataaccacataactccatgtcttgaagtccactatcaaccaaggctattgaaaaccttggattaaaaaatcagagtacctattaccgcccttttttcatcatgagataatacattgttaagatcacccatcacac

SEQ ID NO: 146409 - DNA, 662 bp, Cannabis sativa
aagaaacttctaacttctgtaactgtttttggtctcggccaatccctgacgggttctatcttccccagatccactttgatcccgtctttgctaacaatgtgcccaaggaaggacacctggggtatccaaaatttgcacttcttgaatttggcgtacaacttatgttctcgaagctgttttagaaccattcagaggtgttactcatgctcctcttcttattgagagtacacaaggatgtcgtcgataaatacaataacacaaatatcgaggaaatccttgaataccctattcatcaggtccataaaagctgcgggagctttggttagtctaaaagacataaccagaatttcataatgcccgtacctagtgcggaaagccatcttaggaatatcctcctcttagattctcaattgatgatagcccaatcagagattaatctttgaaaagaccatcttcccctgaagttgaattttcaattctttaagttctgctggagccattctgtaaggggccttagaaaccaattctgctccaagtgccaaattaatgataaaatcaatttccctttacggtggtaaacccagaagttcattaggaaaaacatctaagaattcccgaaccaccttgatgtcttctgaccgaattgattcaggccgagtggt

SEQ ID NO: 146410 - DNA, 537 bp, Cannabis sativa
tcctcgcattgattaggccgttcgaatccagctcacttcaccaagctttttcttatttttttttattattttttttttatatttacatctatttttttttatttaagacaatctgtattttaatagctgctttattttctaaggggagacaatgattaaggcctgtccccgggccctttgtatatatatttttttgacctgtccttggggcaggatttttatatgcacgatctatcttttttttttctcgatgcatgctctttctttcggaccgaccctttgggtcaggatatttatacatatgctcctttttgatgcataatttttcctttttggacctgccctttaggtcaggatattttactttcggcttgttttccatctgttcgtgtggtatgctttagtacccccttgagtggcgtgaaaactttgcttttaaggtactcagttttatttaaaatacagaggttgcatacacttagacggtacaaatcctttaaacaaagcctaagctacacatttggactattggtaata

SEQ ID NO: 146411 - DNA, 864 bp, Cannabis sativa
ttctagggtcctagttcggtgattcttgttcaggttctaattttgggtcccatgtctaggtttgggttccggtttggttcttcgtttgggttcttgtcctactctgagccccatatctagacaccgactattggtctgttcaaggcgccgttacccgaatcccgagtcaagatctagataacggtaacgggtctcggtcttgttttagttcaggtcctaggtcccatttctaagttttggtttgtaatcgagattggggtgcggttctaggtcccaaccctggttctgtgtccctagttttgttccattttttggtctaagttcaggttcgggtttgggtcccaagtccaggtttgggttgggatccgggtccggctcctaattcgcgtctaggtctgatttggagtctgagtccttgtccgattacggttttggatctaggtccaatctcagttatgattccaagtccaagtcctagttccagtcccagtcaacttcaagtttttgttccaatttcgggtcacaaggtacgtgttcgggtccactttttagttttggactgggttcaggtctgggtgtgggttccggtccttgtcagggtttgggtccatggctaggtccaaatcaagacattgactacgggttttgtccaagccctgggtccagatccggatccaaatgtcggcacccagtctaattccgtttctggtgcggggtcacgaactgggtcctaggttatagttatggtctaggtcgtgtactgggtcgcggtcctagttctgtctccctggtcccatactgaatttgggtccagatccgggttattgtgtgggtttggttcccggtctaggttcgggttcgagt

SEQ ID NO: 146412 - DNA, 699 bp, Cannabis sativa
caaccgtcagatcaaataactctctcatctgacggctgccgtacatcactgattacaatccgtgaaagtacaataacgagacaaaatcatatccctaagaacatatgtctatatttatttgatatatatatatgtttatttttgttcaatttttttgtgtttaatttttaaagtattaatttatgtgttcttttaagttttaaaatttatatcttttttattaatattaaaaaaaattatatgaatatataagatgaattcaagctttaatagagatcaaagagggagaggtaaaaataaatattattagacaccaacacaagatagtgtattgattgagtatcttctagagttgagtcaaaatctaacatggcgagctaattctgaatttaagaatggatatttgcaataaatggagattatgttagaggaaaaattatcaagctcaaagttgaaggcctcatctcatattgaatctcgtattaaaaatttgaagggaaagtattcttgcttggcaaaattattatctttaagtggttttagttgggacaataaacattctattttattgtgtgagaaaagtacatttaatgaagggcattttacaattttgtatacattattttaattaattacaaaatatgtacaaaaaaaacttattaccattttctcatatatttttatatataattaaaaact

SEQ ID NO: 146413 - DNA, 888 bp, Cannabis sativa
cgaatccagcctatactcagtactctagtcatactgatgtggtagtagataactcatattacctgatagcttagcatatatctgttgggatctcggtgcaactctatgtacacctcactgatgccctgatatgctaatctgatggctatatatttgcctaacatatatctagtggtatctcagtgcaactctttgtacacctcactgatgccttgatacgttattctgactgcaactaacatgtacactaaacatgtataaacatatgcatatcattatactaatcttaccttgtttccgaattcaagtgtgccggccaacctgagtggaacaactgctcggcaaattacaggcccctaaatcacatcgttcataacatggataagtgacatgctaaatcacaactggggacttatgttttgaaccaaaagttttcctactaaaaattaacatggcaataccctaaaaaattaggaaattaaccaactaaagctttgaaactaacccgaatcgacaacactaaaagttcaggtaaccggtttctgatccggttaaccggtttacagggcctgtaaaaccggttaaccggttttatactaggtaacccaaaaatttcaaaaacctaaccagttcgaatccaaaccttccagacttgcataatataccctaataagcatattccaagcaacaaaacaactaaacaagctcagaatcaagattcaccattaaagagccaagcttgagttctaaaactcaaagcttgctcaaaccttataacaaccaccaatatcagttaaaaacaacatatttaaccataattaaacttcagaaacacaaaacaacatcactccacaactctgaaccctaaatactcaaaatcattcaaga

SEQ ID NO: 146414 - DNA, 1779 bp, Cannabis sativa
aaatcatcgtttcacttctaactatttatagaagttatagattctatatctatgattaccgctcccactcaattgcactaccatgtccccaagatgtaagtattgcgtcgatccaaatggtcagctataacgaacaagtcaaagaacacatgtaatatatttaagccaaaacctaattatctcaggattaagatctattgatcgaagatcaattaagtgacattgacttagaaaagacataacagtaagtttatgatattttttccactgccaataccggtctagtccaatgtatagtcaatacatccaatacaagtttactttaataatgctctaaaaagtacattccacatatcactgtgtaaataaactttattattgattatcacgttagtgtaaatccagtgcattgataaatcatgagactaaatagtttgaagcatataatcacaattactttctactgtgtgatgatatcactataattgtgaataactatttgttcgaaatttaatagaacttatatattaaacctataatcatgataaaatatgtgaacaaagcatatgacaaggtcaagatatgatttttgatctttattgaaagtaaataagattacaatgaaattgaattttatttagggcataaaatcccaacattacatgcctctaacacatctccacactagtatataaataaatacataaatatatacataaatatggacttagttaattaataagaaactagagtattgatttagaaatctagatagagatttccaagccacacgcgctcctagattggcaagaataaaatatttgttaactataaataaagagagacaacaatttatagtagttcactctctgtatcgcgacagtaatggagctacatctacttcgattttgttttcttacgagatggcattatataaaaatgttaagtgtttcacctttagtttctagagaaagatactctgaccatgtgggtagttttttgaatgtgaaaggagctaagggagctttcctgttgtaggtggaggaggcccacaaaaataggaaaaaataattcaaaatatgaaaaaaaaaattaaattggctaattttgactgtagatgatgatctaatggtcaaaattaacatctgaaattgatagtcagtttttggtgcccaggtcgcgacaacaggatcttttccaagtaagttgtggcttatttttataactcccttgggggtaaaatttggagtgggtaacttcaaaattgcgacttaagtgtgagacacgaattgatagatcattgaattcacttcaaaatgcaagttgaattgcgtcaattagatcaatattgagtgatttacgaccgttttactgaagattgttcatgacccaacgccaagttgacatccattgcccaggagatgtactttatgtggcctaagtgatactttgacatcacttagtttttgtgttctagtaaagctcgtcactagttctcgaagatgttgctattctgcagaaatgagagacgcgaaactcttcaactcttcatttcttagtaagtttcccatgttggaaatgagaaatgtgaagttgtgaatttgacatctcttaattcatgtatcttagttattgtaaaaaaaaactagatggatggtcgaatcagaatcaaaatcggataagcagaacccaatgcaccaggccattgttgggattttatgccctaaataaaactcatttcaatctaatttgataaatttgttatcaataaaagattag

SEQ ID NO: 146415 - DNA, 872 bp, Cannabis sativa
ctcctttaaccaagcgtgggaggccacatcctaagaagaaatcaaagctcagtgtggaagagaaaatggttgatgaagtttctaggaaaaaagctacagttgctgccgatgttcgaaccgaggttggtttttcggtttcattttcgtttcccccttttttgaacattttattgtatttccagtttcagcatttttgtttcttctagtttgtgaaattttaaggtttcgattttaaaattttgtttgatattgtttgattttttaggtctttaattttgtttgatcaattttattttgttcttttgtgggtttggctttttaattttattgttattactttcgttacattgttcgtttgtattttaggttttgtatgtgtttgtaatttattgttagatattttaaaacttctatgttcgttttagtgtgtgtaatcagtgggttgtagtttcctcttagtttgtttatagtttaatctgtttatgtttgatgtgttttgggatttttattaggtatagttgtttggtgttagtttttaggtatcaatacaatttcagatgtttgcagtttatattcgtataattgtttctgtttggagtttgtttttagttttgttatagttttattatagtttctatacttgattattgacaatttatatttattgttgccatgtttgttatcttgcaggtctgggactacaaatttagtctctctgattattacagatctaaatgtgtgtgcactaaccttttttctattattgacaatattaagaaaactttatctgtcaatttactgtccatgtttcgtgagactcaatttggtcattttctagatatgtctgtgtatgttttccatccccaagttgt

SEQ ID NO: 146416 - DNA, 686 bp, Cannabis sativa
gcggacaatacttacctatttagttgtctacaacaatacgagtaatttgcagtaaataacttctgattgtaaataaatatttaaatttaaggtttttttttttttattttaggaaaatatttaaatttaagttttaataataataatacaagttatatttataaaacttctgtaggtatgtgaccattaagtagcaagtcgatggtcacgcgctatatgaaagctctagaaatataatttaagtattattattgataaaaattaaacttagggtgtgtttggaatggtttaatgctaacatgggaatggtagtgtgaaatattatcttgtttgttttgaggatttagccttggaatgttattcccttagtaatataactacctttgaggatggtaatattgataccttaaaaaaaagtagaattgaattattactttctattatattaatttgaatagcatttttaaattaataaataaatttaaataccaataatattattatttattatcaataaaatattacgatatatatttagtttgtgagattattttttttaactgacttatttttatattattagccataacatgtatacatatatattcattagtgtacataaataacatagcgaacaaaaataaataacatagtaattaaatatatagaaatgttcattttaatta

SEQ ID NO: 146417 - DNA, 557 bp, Cannabis sativa
aaattatttcggatgctaaaacagataggggtgcatcaatatatctattttaagggggtttttcctatactttatatctactttttatttttattaggtgagtcaattagaaattctaatttgataagttatataaagttatatttaatattttaattataaaaaaaagtatttattaaataaaattatatttaattaatgtataataaaaaaaaaatcatttttaatttatctcaaatctgaagtgttagttatattttataaatgttgtcacttgaaatatttgcttacacaagacactaaagaaattcaataaaaatatgccacatatatgtagatatacataacgtaaatggcaataaacggtaaaatttaactgacgctttaaatttacaaatagtaaaatataaaaggtgttgctaaaaaattagagggtcatatgtataaaattaaaagatattgttaaaatttacttatggatatatcttgcaattacaaaattattagaggtacaaaagccacaatataaacatacactgccaaatggcaaggaaaaa

SEQ ID NO: 146418 - DNA, 526 bp, Cannabis sativa
ttccaaaccctgtttcataactattgtgtggtctatccaatttactaaaaattttggctgccacataagaatgagtggcctagagtcaaacaacacagagaaataagagtagttgaccgagagctaacctgtgaccactgaggggatggcttctgcatcagcctgagttatcacgaacatccttgctggagtgggtttcgctgcacccttcggtgcctcagtcctgagttggggaaaatcccttttgtaatgccctggcataccacactaaaagcacccctgccctttacagtcccctagatggtgcttttaacaactggggcactctagtaagtgtatcgggtttgagagctaccctgacgattgcctcgaccctgcttccctcaaaaccccttgttctgacctgagccacttgttgcagtaggtgcctttttttataatcagtggccaagccactacctcccctactaaagcctgatgtaggaggagtaggagccccacaaacaactagagtccctcgagactc

SEQ ID NO: 146419 - DNA, 1354 bp, Cannabis sativa
ttcatgacggaggcaacaaaagttacacggttgaatgaagatgggaaattgtccgctatactgtggggcatcgaagttcttggagaaatttggaaggatatcagaaaaaatggaccaatagattctatgagtgactttctagaccgtacaaatggcttcattaagcttgaagaagccattcaacgagcagaagtcgagcataaacttggaaagccaaacgctccctccgctggaatatccatccaactccctcagtacccaagtagttcaagctcgggtggtaaacggtccaacaataacaataggcaaggcaatgggaaaaagggaaagttcgctggcaaaaccaaatagactccccgggaaaatcctcaagtttactgctttctctgtccgtacagaagacatagaaattatctacatggcttcttagtcattagctccgtacaagaagcccgcacccatgaaaaaagacgtaagcaagagggacatgaccaagtttttccattttcatggggattatggccatgacaccaacgaatgcaacaatctgaagtgggaaattgaatttttgataagaaagaataatccgcacgtacaaaaatatgtcaatgctgaccaaaatcaaagggctaacaacaatcaagatttattaccacctccagtagatggacatttgcaagtcctcattggaggtcttcacattgctggagattgaggcaaagcccgggaaaggtatgcccgaacattacagcacgagcaagaagaagtgattttggctatcaaagagaggaagccaaagataccacgggcaggagagcccaccataacatttactgatgaagatgctatcaagattaatttcccgcacaacgaccctttggttgtggaagtcctgatagccaacaagatggtggcgcgaaccatgatagataatggaacaatttttaatattggacgttccatttgcatttcatgtcatgttaggccaaccagctttatatgacttaaaagctattacgtcgatattccactcgtgccttaagttttcaacaaagaatggggtagggtgcgtaagaggaaatcaacaagtttctcgggagtgttacaaccttgctctaaccaaggcttaaaaagaagtatcctctagccagatttcgaacaagggaaaaaacattgccaagtagggaagatgaagatgtggatccccaacttagggagccaaacaccaacgttggtgcagtggaagaactagaagagatccaaatcgaccaaaatattttgaccagaaagctaaagatttgaaaaagtttgttgctcgaggtaaaatcagcactgataaaatttctgagagcaa

SEQ ID NO: 146420 - DNA, 543 bp, Cannabis sativa
cgcattagacaggatgcaccaccacaggaccttgtggcgttccagaactttgctattccacaagcgattccagaggttcggagccacctcgcactggggggctctatctaaagcttgaactagataagtcgatttggacgagaattgcccattactattcagagtctatatccatctatcaacgccctgccctgaaggatggcccccttctaaaatagcagcgacagtttcctggtcaaaactctcctccagtttattgatgtcccagcgtccattggatagcatcaaatcagctacccgagagaggttagaatgatttcccggtcttggttttgggcaaaagcctttacaatgaggaatccagggatcctcccatacatttgtactctcaccattattcataatcttacaagcacctcttctcaggattgaattggccttcacaacacacttccagaaccaagagtcagagcttttacacttgtaatttagcaggtcttttccttttaagtacttggctgctagaactttacaacacaacga

SEQ ID NO: 146421 - DNA, 679 bp, Cannabis sativa
ttcttatgaacccagaattctcaatccccgtctaagtgtgtttgtggggtatttatagtgtttttttctgggaggatccctagaactgaatcacttgtctttacgcgcatgttcaataggggcacatattcttagcagatataaaataggaaatacattacttataccgtaagtatcttaggggttaggtagatgtaatcttttatcccctcttgattgatgtgattcctcataaagtagacgtcactagccttattaatcacagcgtaatagctgcaaaagaggggttacgcctccagtcatatcgcttatggtagttccaatacgttttctctcatgcgacattaaatgcgaggtgattgttcaaatagtgttcagtacctcccgaagctaccttagtatggcctcggcctccgggagtacaaagatccttctcgtatcgtctccgggagtcatcctcccagagacacttctctgttgcccaagacttagttgatttctttaagggcagaccctcccagctccacgtgtcgtcttcatacaggtccacatattttaggcaaaattaagggcaataggtactacccatgaatgggtaaaattagaaatttttgagtttttatgcttaatttttctatctacttaaaaaaagtctctcatttttatatcatatgggttg

SEQ ID NO: 146422 - DNA, 574 bp, Cannabis sativa
cagtatttttgtaaaaaaatggcaaaagttagtataccatgtaaatttctcaataaataaagaggaaattaaactcacttctcgtttatatattcaatctattttagaaaaattgtaaaaattgaagtgaagcgagagaatttactaaaattaattatagactcatatatagataagatactggattagataatatttgtgtaataagttgggattttaaaagttgtttatttaaatatggtatttttaagttcgaccaatttatatgatattttttttttatttttaactatttttatggtatttgatatgatatttatatatatatatgtatattaggtttttaaatctcatatttaatgttttttatttgtttaggcagttttatttttcactaatgccaaaaaatttgtcggagtttgttgtcggcgctggaagccggtactagaaaagtcgccagagttgctgctaatgccgaaaaagtcatcagaattgacattgtcgccagaaaaatcaccaagaaattggtttcttgatcaaaaactaattttttatgaagaaaccagtttcttgg

SEQ ID NO: 146423 - DNA, 647 bp, Cannabis sativa
tcaaaataaaaactttcattttaaatactgtcgtaatatagggatcccctgtttaaaaaaaattcttttacaataggttacatttccaaacatagaaaggaaatcgatcccacttcccagaagccaagaccccacggctgatatgtacattgctgggagacctctgactcatggctaaacacaacttctaacttcttcacctgcaccatgaagcacccgtgagtcacaatgacccagcaagaaaagctactaaataaaatttatggaaagtgctagcaaatttcattacaatgtaatatatataccgataggtcatacactttcaaggtgcacaaataacctaacgtctatgagagtacacttatcacataatcaagtatattcatagttattcagaatcaacagtctcggtgtttcatacaacaccctaaacattcatcattataaatactcatcttcagtgattcataaaacactctaattcgcacattaccataatcccataacctcagtgcttcataaagcactctcatcttacctcttcataaatacaaattcttacatttcgtgagtcactaagattctgcaagaaaagaaactaatttcttaagcaatataaaaatccattcattcacattataacaaag

SEQ ID NO: 146424 - DNA, 829 bp, Cannabis sativa
tttacagatggggcactctgggtaagtgtatcgggtttcagagctaccttgatgattgcctcgaccctggttccctcggaacctcttgtttggaattgagccgctagatgcagtaggaggagtaggagccccgccaataatcatagtccctcgagattctagggtgcactccactacaccctcagctcctagtgcctatccaccatatcattataggtggttgtgtcatcagtagtaatcattaagtcgtgtccaatctttgcattcaacccatctaggtatttctctttctcactaaaatcggttggcacgattcccgaggccaaccttgccaaacgatcaaactaagtcgtgtattcagtaacactcatgttctccttctgagtcagctgggtgaattcttttcttttagcacttctgactgcctcgttgtaatatttggcgttgaacagttcttggaacttttcccaggtcattgtcgtaacatcgtgaattatggacaccatgtcccaccaaaccagagcgtcttcttgaaattgaaaagtggaacaagccaccctatcattaccagtgacgcccataaaattcaagattctagtaatcactgttagccattgctcgactttcatgacattgggacctcccaggaaaattggaggtgcctgcttacagaaccttccatacaaggttccatctggttcattgcaactacatgttcgatttgcacaggaggggcaggagctaatggtatttctggagtagggattgcaggagcaccctgctgtctcaatcgcggaatctcttcatcttgttcattaattctggcttg

SEQ ID NO: 146425 - DNA, 826 bp, Cannabis sativa
tattattctatatcactatgaggactgttaaggaaactctcttttccactatatttacactatcttcttaattgagtgacatgtgtaaccttctaaattatgtttaaaatagttacaattatactcttatttagtttttattaatgataaataaaatgagtcatctcatttactaatttttttattttattttttaaaactaataattaatttatttattttattaataattaaaatgtgtgattctatttacttgcttatttgtttttcagacaataaaaaaacttaattaaattatattattttatttattaaaatttcgttttttttaatagatagtatgtaccataatgaatcattcttttaatttctttataataaatattgactatttactttataagaaatcgaaaaatatttcttttcataaattttcaccattttttttattatttttttgcttcatattattcttttaaaaaacaaaattcgtgtctttttttttttcttttttttttttacgttctcttaaattattttcaaatttctctctaatcaaatacgtatataatatatatgttaaatcaattagttttttgcctattcacgaaaagaatattttttacttaaaaaaaaaaataaaataaaagtaaatagatctaacacatattattaactaggcataatgacatttagtttattttttgtctttcgttgtttctgttgacgcagtttttcgtcaacggatctaagaagatcgtaaaatgagcaagatgaacacaagcaatagttaattaaagtgaccggtttgcaaaaagaaattcac

SEQ ID NO: 146426 - DNA, 701 bp, Cannabis sativa
tggtgggtctctattttctgcatcctgtcttatttagactggaagatctggctaacatctccgctgacgaagttcttcatcctgcctacgaatgatttcttccagtgcggcaaggtgctcttcccatccatgtggtgcttgaggtggttcattgatccctccatcatcttggcctctgtcacggccttggccttggcctcgacctcaacctggacctcgacccaatctgactgaccttctaggaggcttttctaaactcctgaaccacacagaccaaaacacatcaagaagggtcattttgatcatcaattttacatgaaaataatattacactcccgcgtgcagaaattaaaggcaacttaattataagtaataaccacttacagtacagtgagtccaactcgtctcatggcggtgaactttacatgttagggctaaccacattctttaggaccgtgttgctctgataccatattgtaacaccccgatttcccgagatgtcacataagatagtcggtatgaagcaatttattaagataaagacaataaaatacttctttattgaaaaatttctaagcatgagatctcactgtttaaaacaaaataatattagtaccataaacttaaaaaagatctagttaaatcaaaataacggttccacaaaatatataacttttaaaaacattaaaaacaaaatactg

SEQ ID NO: 146427 - DNA, 754 bp, Cannabis sativa
acaaaagtcctctgggtaacgcccatacttcaccagattatcattggagatcaactggatgatattcctgtcgtcctccggcaaccgaacaagttttttagctctatccctaagagcaagagtgaggggaggacggtgatatgttagaatctgctgaaactgagtccggatgatgcttggatccttcaccatgaagtactcatcaataaaacgccctattttgttgatagccttgtcatccgtgccgctcaaccacttgaagcctggctgagagaagtacaagtaccccaacctgccttgcttgggggtagacttcaggtcgaagaaccaggcgaccttgtggggggaaagagcatcccatcattgcgaagcgtagaggacgaaaagagctgacaaatacttaatgtcctttggagtagtttgggtagggcagagaccgaagaagtctgccacatccctgaagtacttgtgcaaaggcatcagcacccgttgttggccgtgagcccccgaccgggcgcacattcccttatcaggatttgtggcacgattgtcgtgggcaagaatgtagcagtccagctcgcccaggtacccgtattggtcgagagtttgaaggagatgcctccgaaatctttgacggaggacttacccgcctggcgctcaaggcaccctacctcctatgatgaacttcctcaacaagctcctcactgacgtagtccacgccctcaaccaagacgtctccgtcagcatcgactgg

SEQ ID NO: 146428 - DNA, 535 bp, Cannabis sativa
tattaatgattaaataaccataatattaccactaaaatacgaacttaaataatgatggcacaatatcatattagaaagtccagaaaactcaacaatgagcacgcatcagtcataaaattaaatgaaaatcatgatatcctaatgttacttaaatttgtatttggtattgtttctatgatttttaccaatttacaaaattcagtatagttttgagaaaattaaaattttaatatgtagaaaatatgaattttcaaaaatttatttttataaaacaagtatattgctaaaatatttttatatattttcgtatatatttaatattgttaaaataagaatgatttatatatattaaatattaaatacatatttttaaaaggaataattatatggcacaattttttgtaaaatatttatatttttacgtttaaagtgttttttcaatatttttacaattttttaaaaaataacacgaaaataacataaaattaacaagaaaactacataaaagtaacatgaaaataacttcaaaataaca

SEQ ID NO: 146429 - DNA, 586 bp, Cannabis sativa
tttttgaaatatagagagaaaagaaagaaataatttttctctcaattgttcttgctcatgtgttgaaaactcaacaaaaataactctatacactttatcctaaccacactattctttatgtgtggtggattaatttgaaaaatactagtatgagtccaatttcattatcctcatctctggattaagggatacaacatatgagatatttcaaggataccatgatagtattcaaaatgtatatattctaaacttattattttatgttttaatttaatgtaaatacatttggaaatctgttgggatatgatacaatgataatcaaaaaatacgaaaccttttcgctgcgtatccgatttagtaccataaaaaccaacacatattgtaatcaccgcttagctttattatgagaatcagtagacaattagagcttaattttagaaatagacttttgattgttatttttacaattatggagatttattttaattctatgtgtattaactataataaatgtagaattttatgattttcatagtttatgccggtaatagtggaatgcgacgtatggcctgtatagtcacttaga

SEQ ID NO: 146430 - DNA, 570 bp, Cannabis sativa
  modified_base (278)..(287): a, c, t, g, unknown or other
  modified_base (517)..(532): a, c, t, g, unknown or other
acactgaagaaaaaactcgaagataccaaaggaaattggccagaagagcttcctaaagttctatggtcatatcggacaactgagaaaactgcaaccggacagacaccaaccgcgatggcttacggatatgaagctatgctgactgtagaactcgagccaccttcccacagaagattgatgtacaatcaagataccaatcacgtagtcctagcagaatcacttgatgaaatcgaagaaagatgagccactacaaacttaaagttgatggcccatcaacnnnnnnnnnntcgatatttcaacaaacaagtgaaggctcggaaattcttcttgggagatatggtcctgagaagggtattcctaaacactaatgatagtacggtaagtgtacttggacccaactgggaaggaccatatcaagtggtcgaagttcttgaattcgcagcatacaaattaggtaaatatgacgaaaaattgtaactcattctagtaccatggtattggaatggggaacatttannnnnnnnnnnnnnnnaaagtaccaggtcggatgaccacattaagtactgaatg

SEQ ID NO: 146431 - DNA, 528 bp, Cannabis sativa
aagcgcgaccttccgagactcgatgtgaggctgactgggcgtcccttcagtttttggctagtaaattctctaacaattaatattttgaaatccgattctctctctacacggctggcggaagcacttgattatttttgatttcacatattagcttttatggagggaaatcgaagcgtctgaggttcctttgaaatgattacctctttttgtgacttgcctataaatatcaaccagcattggcacataaactcattttcaccacccttctttgctaagtaagcttcagagcgaaaagagaggttcttggctttaagtttgcggaagtgccttcatcaaagctgcttgttgaattgacgatgctcgaacccagacatctaactcttgagtaagtttctgatttcttttatgcttattttttcaagtttacatgtcgaatgcacctttgactttgctgtagaaaatatctaggaaaccctaggtcaagaaacttctgcgattcttctttgtcatggcttcatgcaattttac

SEQ ID NO: 146432 - DNA, 528 bp, Cannabis sativa
  modified_base (42)..(46): a, c, t, g, unknown or other
  modified_base (318)..(320): a, c, t, g, unknown or other
ggttctgttatactctcaataggttattctaactctggaaannnnnaaacacccaaccgaggcaccacaaagatgaaaatttagaaaatgaaaggcccgacgaaccctgccaaaactggctagccggtttttgtggcactgcaaaccggttagccagtttgcaccagttttcccaaagctcttcatttgttgctcaattctccaccaaatacaatgaaaccttccagaatacctaataagggcatacactatacattccagccagaaaatcacagaacaaaccattaacattaaacttgccattaaagctcaaagctnnnaactcaaagctcaaagttgcataaaacttaaaccaatcaacaatatcagctgctaggatcctaaaacaactcaaattaaacataaaattcgaacgccaaacaatcgtaaccctaatagctcctaaaactcaaaatcacttcatgaaaccaagcaaaacttgagaaaaaccataactagagagcgactaaggttaccttgattaattcc

SEQ ID NO: 146433 - DNA, 529 bp, Cannabis sativa
taattcccttcctttatttaattgatgcagccaagccaatttcaaagcttatgttgctgcacatgcagataaatcaaaagcagatgtgggtgacttggagtgtgtcatggatcttttatttttaatgttttatttagcgttctttacttaataatcgagagtcttaatattacaggtccttgctagttttaaagtgtaatttaagcttcttagtgaggaagagattgagaagtgggcttcatatgaagttgaggcttccccttcgaaggttggtgttagagggaaagggaagaagttaaaggagacattatctgctgagctaggaattgagaacaatgaacgggtaggggatgttcaagtatctggttgttgctccttcgaacgtttgggtagaatagtcccacttctcaacgacgctcaaaaagaaagggtcagaaatgccggttttactacaatcttaagggaggatggcccgtaaatcgatgctaagatagttagttggcttatcgatcacgtggatccaaccact

SEQ ID NO: 146434 - DNA, 580 bp, Cannabis sativa
aagctaaaagggaagtgtcgaaaggaaaagactaaccctagtcctggtaagctccttcaagactcagctccttcaagactccgcccaccaacacatccagagatgagttgtcaacaccagtcagttgctcaccgacctcaggaaccaaccggttcatgtagtgagccatcacctccttgcccttcttggcctcatgcaacacaggcatgggtggagttggtgcctacacccgctcagggatcctcctcaccagttcggacccagatgttggtggcccagactccttagacttggcagatttgggagtggaaggatttgcagtagtcagctcctcaaaaagttcaataacctctctagaaggtctcttctctgaagacccctctccgcccttagacttcttcgccggaggggaggcgctagagcttccactcatcctcttccttaaagcgtcgatcatctaccgagacatgtctgcacagaacaaaaacagcgtaattagcaaaaaccaacagaaaatacaaagcatgaaagtcaagaagctgaaaaagaagtaaagcgcagagtgactgcctgcccagaa

SEQ ID NO: 146435 - DNA, 681 bp, Cannabis sativa
ttttgccataatatttaaaatataatttaattttgtttgataagtatatttttcaagaatatgaattggaagaaaaaagttaaaaaaatttagtataattaaagttaaaagggggtgtctttagaaatttttggagtgtaaataaaatttctcttcatttatactcaaaaaaattttaagtggagttttcataaaattataaatacaccctattattaaaaagaaaaatataaacttcaataatatttataaattactcttaatttttttttcctcacactatttcatgttaatttcaatacttattttgattttatttttataatttttttctaactcatgtatataaattttatttttttcttaagaaaatttcatataattttttattttaatttttttgtcataatcttcaaaatataatttatttttgtttgataggtatattttttaagaatatgaattataagaaaaaaattaaaaaaacttgatacaattaaagatataaattttatataaaataaaaattattaaaagagggtgtctttataaatttttgaggtgtaaataaaatttcccttttttaaagagacccaattttaataatttttagggtaaatactattttggaccttgtgttttgtaaaagttacaaagtggaccatctgttttgttaaatga

SEQ ID NO: 146436 - DNA, 570 bp, Cannabis sativa
gaaattgcgtttccgacgaccaaattgcgtgttttcaaatctaaaatattctaaatcaaataataaagagatccacatagattttatgcacgaaaccacgaaaaaatataagactttaatatcacaaagttaatcgggttcgaaaaagttttaactgaaaaattttccatccttatgtttttcaagagattttcaatgcttagatcgatctataatactatacgaatatagtaatgtatatagaattcaaaataaacaccgaaaaataaaaatgaaaaacggaaaaaataaactttaaccgataagtttatgttatatatatatacatgtatatatcacataaaatgaaaatgaatattatgaatgtattatgcgataaagcatatatataatatactatatatatatattaacatatatacacgcaaagaaaaatgaaaaatatatatatgcaatacgtgtataagtatataatatatatatataaacagtatgaataaagatatatatatgtatatacgtaatgaaaaatatatatagacttgaaattatataaatatgagtatatat

SEQ ID NO: 146437 - DNA, 955 bp, Cannabis sativa
ttggaaaataaactatgttagatttagtatttttataacatatgtgattatttgtttctgaacttgtgtatgaatttatagaaccaaatgatttatttctgtttattgatatgtgtagtgtcaaaatggacaacccacacctcgaccctctcttagtaaatgcctatgcaaatgttaatgcttcctggaaagagcattaattcacacttgttaatgatgaatctgaagttccagaaagaaaatttgctgggaattgatttatctagagaacaatgggttcaattcattcttagtagtctttctcttgagtataatgaattcgttgtatcttacatgatcaacaattttaactcatccaacatggacaagctagaagcagaattgcgtgcttatgaacggaacttacctgcaagggggccaccctcaagttttgcagacttaaataagaggaaaagaattaagtatgaagcttctaacaatgctgcttcttcaagtacaaatcgtgaaacaattgatggtagtacacttcaatgttcaaattgtaatgagaaggggacatcaggaagaacgatgtcccacacttctaaataattcgaatgaaggtaatgcttttgtttttgaatcgtgtgttttagaggatgacaaatccttctggattgttgattctggatctactaaccatgtttgttcttcatcgcagctacttgaaacttgggattatttaaatccaggggagtggaggctccaagtttgaaatggcaaattagtatcgatccaagctaaaggaaaagctcacctcaagtttcagaaaaaaattttgtttaagacaatgtttagtttattttgaattttagtagaaaacttgattagtgtttcatgtttacaaacacaattttatcaattaaattttttgagttctatttgcacaatttctcgtaatggatttcaattattt

SEQ ID NO: 146438 - DNA, 560 bp, Cannabis sativa
atggtaaatttatccctactcaatctaaattatctatagaggatctttgattatttagattgaaataatagataatttgcagcatatctattcttggtgaatagagtgttctatgtaatcaggagtgcaattctaaatctatagtggagtcggaaggaagtaataagatacagaatctactcagtaaattctagaactatttattaggagcttggttacataggtccatggtccctacactaactgggataatattgttttgttgtcagaatcaactgatttatttaatcaattaggattctaaataatgactgtatcttatttatgaattttactaaaatggcataattgagaagaaaagaaaaatagaggtttatttgttaattaagatattttgtgggtcttattaaaatatatttaaattttattttatttgataattatttataatcattaaaataaaattggcatttaaataattagaagagataagtagtaaaatagggttagacgcgttgtttcatttaaatgaaattaagtggcataaatctaactctaaa

SEQ ID NO: 146439 - DNA, 945 bp, Cannabis sativa
  modified_base (59)..(69): a, c, t, g, unknown or other
aaaggcaaaacttgatacttttttgaaaatatattatttttaaaattttattttatttnnnnnnnnnnntttttaaaaaaaaaaaagagaaaaagaggaaaaaatcaaaggaaaaaaattaaaaatttaattttaaaaaaaatggaataaaaaacgtggaaggttattttttttattagttttttttttaaaagttaaaagacaaaaagaaaaagaaaaaaatcaagggagaaaaaataaaaatttaattttaaaaaatggaataaaaaatgtggaaggttgttttttttatattagttattattttttttttttgaaaagttttttattagttatatatatagatattaattgtgattaaaaatgtggaaaatgagaaaaatattagagtagaataaaattattttagagtgccacatcaccacctcatatttctcctttatatatagatatgtaaatttgatgcactgatacatttttatttattttggtatttgaaataatcttttgataatttttttttaaatcatatactatagtcgctatttaaaatattttagatttttttttttaaaatagcatgttgcacaagtaattattatattttatatgcgtgtgaaataaatgtttaaatactattttttatattataaattattttaaattttgtaagatattaaccataacaaatacgaatatgaaaaaaaattggactaagaaattcttctgaataccgaaataaataaaaaatttattttatatacgtgactatgtgagtgaagactgaagttacaatagggaaatttgactaattacgcatttattggaccatttttttttttctaaatctaaagtattcaatattggtaaaatatgtcatttcttttttctaaaactccattctacccctctcatttgaacaaccatctctctctctctctctct

SEQ ID NO: 146440 - DNA, 990 bp, Cannabis sativa
gcaatctccacaactcttagaggagcttacgagtcagaacctaaatcaggaacatgagacctattcttccaaaatccaaggagatcaaaaaacaaagagagcaaaacaaaataagccttcattgtattctttgttgcacaattcattttggcagtcctcaaagaattataaagaaatataatcccctcattcaaatcaaggtggccaaaaacccaatgactttctttcccaagatttataatgaataggacatgattggcttcatactaaggcttagaacaaggaattcacaagcctctgatataatgcgctattgggtgagcagcatggatgtgagacatctttgtttttattgacttggctttgcagaatttgtggtataaagattgaatagaatcatctaaaaggcaatcagttgtagcaaaattcatagtaacaacacaagaatattttcttttttccctaaggtaatagaatatagtatttatatgctgaaacaacacaataaagaaacacaaataaaaatgtgaacaaatattacaaaaacttaataacagtagctaaactaaaaaaataatgataaaacaactataatacaactataattttttataaaaggaataataaatattactgagtcattgataaatatgtcacatcaagataaatgataaaactgagttttatcttcaacataatctacacctaatctgaaccttggggaaattttcttcgcaccatcctcgtaaacattgtaaggcctatatcaaaaaacaaacgacaaagaaacaatatttaattcatataattggcaaaataaaatgaaatgtaaacaaataaaaaataaaaacagaataaagaaaataatcacctaggatgttttatcaatcctttgctaatttaatcatcaaactttgcctcaatttcaggagagacgggatcagaaaatgaatcgttaagagtgtaaaggttttgggttttatgccctaa

SEQ ID NO: 146441 - DNA, 733 bp, Cannabis sativa
attttagaaaatataggatccattttgtcatttaacaaaacagaaaatccaattggtaacttttataaaacacatggtccaaaatggtatttacccgtaaaattttaaggctttatggaggtaaaaaaatgtgaactacaatcatgagagaaggaacaaagaagattcgtgatttaataattctgcatttggctttataacaaagagttccaagttaattacagctcttcctatgtcttttggtgaagtttaaagactttacagtacgcctccaataataatagaatgattttcttctcattcatgttttttttcttacacttagccacgagattagttaaatttgttcaaacgtcaaaccaattatgtaccatcaaactgaaaactccaatgcaaacattacaagaatattttccaaagtctcatttggttttacaaattcctctcaaagtcttttgatgcatttgcatttgttcatattcatagcataaaccgatgtaaattgatacaagagcaacataattcatctttgttggatactcatccaacaagaagggatacaaatgttattgtcctacttaggggtgtgcagaaagtcatccaatccaattccaatccaatcccagctgatccaagagaatcggatatccaatcatatttggatcggatcggatgcaaattttaaaaatccaattggatcggatcggatgttagatgagacatccgatccaat

SEQ ID NO: 146442 - DNA, 702 bp, Cannabis sativa
gagtctctctcatttctgcaaaatagtaacatctccaagaattggtgaccagctttttcaaaacacataaatagactaaatgatatcaaaatatcacttaagtatcttaaagcatacccttggtcatttttacacttacccagcgtccaagttgacgtcatatgtcaacctgggcactgggatgtcaacctggatgctagatgtcaacctgtgcactaggtcatgaactgccttcagtaaaaaagccacaactcactcaaatttgatccagttgacgcgattcaacgtgtattatgaagttaattcaatgctctatcaggtcatgtctcacactctagacataattctgaagctatcattatccaaatttacccccaaggcagttacaaaaataagctttggttacccgcaatgggatccatcgggctccaaaaaatggccatcagcaccaagagctagttttcacaattatatcatcatcaatagtcaacagaaaacttatttgtattttcccctatttttgtgggcctccttcacctataaaaggagagctccataagctcatttttcacattcacaaaactacatacaaggtcagagcttctctctctatatatatattctctcactaaaatttagagcttctgacacttagcctattattgtacttaccatctcgtaagaaataaaaactagaagtag

SEQ ID NO: 146443 - DNA, 773 bp, Cannabis sativa
  modified_base (730)..(737): a, c, t, g, unknown or other
taagttagcagttcgcacgtttctgtctcgcagaaggctattcagctagatgagttatgaacataccctgcgagttacatttccaacgagttgttccatgctaggcacacttgtcgttgcgtgtttgagttcttcccagctcgacacgtgtccccttctgatgtgctcactgaacttcgggtataacaattgccccttaaaaagttctttttgattaaaaagagctttttaatgattacaaagggtattttcgtcacgctcctctgtttttgaaaagatgcattccctctaattttggcagttgtgcggtttcgaggtacatcagaattaaatgaccatattttccacttccacttcgaatcatgtccattggatcaaatcttttttgaaatcattatcatgagtataaaataagaaaaaggaaccacctttgcaccattttagaaagtttgagaaataccctaacttcttcgttaaggatcaccattaaacccgtctgaagattttcatgccatccttgtctttgacctttttcctgcgagtttcctctgactttatttttcaaggcgatccttgcttcgctcgaaggtttgcagacaaatttcctaggcgttgccccaagccctaacttcaaacagtaagttattttcttcttccttataataattacatagtgttgatcagttgcttgattcgcttgtatcattatcatctcatctggttttggtannnnnnnngggttaaaactgttcatactaggattcaggcaatat

SEQ ID NO: 146444 - DNA, 843 bp, Cannabis sativa
  modified_base (40)..(70): a, c, t, g, unknown or other
  modified_base (760)..(798): a, c, t, g, unknown or other
tataaataattattgaaatagctataaataatttcataannnnnnnnnnnnnnnnnnnnnnnnnnnnnnnaaactaagcggtctttacagatacaaatagattaagcaacaattaaacataatggaacaagcatgtaaaggaggaaagaaacttactgtttgaagttagggcttggggcaatgaatggttgttcagtctgcagatcttcgaatatagtaaggatcacttttagaagatgaagtatgagaaaaatcgttgaaaaaatgtgaaggacagggatggcatgcaaatcctcaagcaattcgacggtgattcttagcgaagaagcttaagaatttcttagactctctaaaatagaagaaataatgcaaaggtgattccttttttcttactttatattcatgatatcggcttcgtcagattaggaaagtgtttgatcctacgaatagaattcaaagtggaagtggaaaagatggtcatttaatgctgatgtacctcgaaaccgcacaactgccaagataagaggacatgcgtcttttaacaagagatcatgacaaaaataccctttgtagtcattaaaaagcactttttatagaaaaaaaaacttttaaggggcaattattatacccaaaattcggctaaacacataggaggaagaaacgtgtcaagctaggaagaataaataactcaaacacataatcataattacacttgaaatggaataactcgtttaaaacataattgttgggttttatgccnnnnnnnnnnnnnnnnnnnnnnnnnnnnnnnnnnnnnnntaataaagatcagaaataacatgtaatgttgcatggttcacatga

SEQ ID NO: 146445 - DNA, 794 bp, Cannabis sativa
  modified_base (415)..(416): a, c, t, g, unknown or other
cataatcaacaatgttgctcaatataatttcccaatcccaaccctctctttctcagatatctcgctccatttctcactctaacaactctctctttctatattgtatctttatcttgtgtttgacttcactccttgttcttacaccttgtgttttttcttgttatgaaatgagaggagtagttctctttatataggccaagggaccaatatgcaagttgtcctatttgatagttaagttagttaaagacaaactgactaaccgaatggttgttgggggtttaaggaataataccacaaattccaccttatttcttcaagccccaacaagctaagcgtatctgtccaatggaggtgctaatgctttcatgtgtagctacctagcaactaaggttaacaggtaacaccttagtgccannatcagcagggttctcttctgacttcactttctttagctcgattacttcttcttctatcttctgccttatccaaaatagctgaatatcaatgtgttttgtcttctcatgataaactggattcttgcacaaatgaatcgaggattggctgtcagaatatacccttgcctttccaactagaagctttaactccttcagaattcctcgtagccaaattgcttctttcaatgcctctgtggtcgccatgaattctacctctgtagttgaaagtgctattacagattggagttgtgattttcaactaatacaatctccattagtttgaaacacataagaggtagtagaccttctagtatccttgcttgatgcataatcagcatc

SEQ ID NO: 146446 - DNA, 507 bp, Cannabis sativa
ggagtggggagttgagatcctattttttctctctatttgactgatatttttttttatcgttcaacacatccgagatagcaattcaagttgtgaatcggactttaataacccatgaaaatatgggataaatataggatatttacctattcttggggggataattaacctatttatagtttattattttattatgtaacaaatacattatatttcttatttttttagggatattaggttatattctcttgtaagctctcctatataaagagcattaacctaaccctaattttgctaagtctcaagcaccctaaagctctcaagctctcagtctgaaagtttaattctctctctccctctccctctccctctccctctcttctacacaccccaggctttgtagaagagaataagtctctttcatctctcttacttgagatttgcctactaattctcatattgtaatcttaagagagccattttagaatccacaacccttatgatctgagt

SEQ ID NO: 146447 - DNA, 585 bp, Cannabis sativa
tttctatatagtcctattagcttgatttattacaaacactctttttattattacactttaagatacaaatttcatattgttaaaactaattctataatctaaaattttaaatatttatataataacaaactatctgaatattttttataaatatttattttttttttttttggttcatttattcagtaagtcaaacatatcaagtaagttacacacacaaaaaaaaataatattacagaataataaatgatacttagatagttttaacatcattctttgtagttaaaaggaaaaaaagtctaaataggtttttaaataataataaaaaaaattgcataatcagtcacaagacgagtttattaaacttaaaaattattagttttatttattttattataaaaatacatgcaatttctttgttaattctacaatttttaatatttgtcataaaattacaattttctacatattttgacaataacaaattattcgtttaaaatttcaagtgttatttcatttataatacacacattaaaatgttatattttattttataaaaaaaaaatattatattttatattatat

SEQ ID NO: 146448 - DNA, 1124 bp, Cannabis sativa
gttgttttgctttgtgttttattggtgttttataaaaacacagtatttttgaaaagatttttgtgtgacagtatttttgtaaaaattaatgcaaatttgagtatttttgtaagtttgccttttgctatcatgttacattatatgttagtcataaatgtatgtatgtatatatattattcgattaaaatatataatttgattaatattttgttcaaaaaaaattatatttttctattaatttttttagatgactattcttaaaattagattactggaatttttttagaagattatttctttagtatttttaaaggaattttttttaaagggccttgtaaatttttgtcgcctaggccctttattttttctagcacgaccttatttgaattctatattttataaaagttattgattagatccttaattttgttaaatgacaaaaatgactatatattttctaaaatagtacaaatatgactatgagttcaattttttataaactttttttaatataaccaacttgaagataatttctagcacgaacgtagaaaacttaactagttttgtcataacacctcgatattgggttattattaagtttagttttgataaaaaaaattagttcgaggtactatttagtacgggtgtttgtctaatccagtccgcataattttgctcatagtgcattcgctccgcactaagtgcggatttcatattttaaatcaaatttaatccgcataataactcaaatccaatctgcaaaagtgtggattagatcgattattttgaatttttaatattaaattatttaatatttactaaagactattttttttttacatgactaacaacaaaattaaaaaaattattgttgttctatgtcttcaaaaataaattaaaataaatgaaaaaaaaataataaatcaaaaggaagaagaaaaaaaactccatgaaatgtttaattttgttttaaattaaatatttattatcaataagaataaaatatagatttgacctattaagttttgagatatatttatatcatatgtattagatttttaaattattattttctatattaaaatattaattatacaaatatattttaaaatatatataaatat

SEQ ID NO: 146449 - DNA, 512 bp, Cannabis sativa
ttcttcttcaatccattgagaatttctcctaatttagcaaactcacccaaaaactcaatcctcaaactagaaataccatccttaatttgttgttaacactctttgatagaattcagttcaacacaaatatggtccaacttttcatgagaaacctgaatatttgacaaaaaaaaaaaacatgaaaagtaagtaatgatatacatataaatacaaaatacacaaacaaaataaattaagaaaccggtttttaataccttgacctcatcattaacttcatcagaacacacaacatcatcaaccctctttggaatgtattggggatcaaacttaaatatagaaaaagactttggaacttttcaccactcaagcaacaaaatcctttataacaatctagaaagataaaactaaacaatttaaaaaaaaaccaaagaaaaataaaacaaacaataaccaaaacaatgaaatttgaattaaaaaattaccttcggattgttaaacacatcctgaatcaa

SEQ ID NO: 146450 - DNA, 913 bp, Cannabis sativa
  modified_base (598)..(612): a, c, t, g, unknown or other
ttggccaaataccttagaaataagataactattaataataaagtttttattaatattatatttttattattaatatatttttataatattatttatatatatacgttaacttaagcttatttatatatatatattaagttataagtgaaacagaacgaacgaacgaatgaaaccctcattctctcctttcgacaaaaccttttcctcctatatccattttcttagattttcaacccgaaacctagtgatctaagctctggtagtagcaggatagaaaatctttgaaaaaggaaagcttaaggtatggttttatttcgttataagtttaaaaacaattgcttcgtatagaagttttgtgaattagaatagtaggaaggttctaaccttataggattattctcgagtagtcatcggactagttctgatgtttacttgttgaatttgatgtaattttgagttagaaattgagttttgacctttttaatgcttagtttgaacattaatggcgttttttatttaagggctcaattttcatttctgttacgtaaggatggtaatatttatggcatctatgcaccctgtgaagtttggagtgatnnnnnnnnnnnnnnntagtgtttcggtgagtgcaaaaattgagattctcctatttcatagtttttagaaattcctaagagatcagaaatcgtatttttatcataactttttactcgggtgtccgttttggacattccatataccgttcgaagctcgcgacgagctctacaatatggtctataatttacaccgaaaatataagttttattttaatgtatttataccgtgggatttggtagaaaacccaagattgtcttatgcgaatattgaaccgtgttttgggataaacacttattggtttatcgttgttgtgaca

SEQ ID NO: 146451 - DNA, 777 bp, Cannabis sativa
tttgtatatttttgattgcttatatgaatagttagaccttctattcatacattaggtttaagtattttttcaatgcattttggtgtctcgtttgatacttttccacaaaatgcgagctatcagtattcagcttcgcatgtagcttatgagttatatctcatttacaacttttgattttcctttctcatgggaaaggttctttaatcaaaaactttaaaaatttaaaaaattctaaagtaatgggtttgcaatatatcatgtatttccagatagattccaattaatcatacacatatgcccctcaagtaattttaaaagatgacactttgtaattacttgaaaaatgattcaactttattaataatttgaagttcaaaatattacatcagaaatatgagttactacatcagtttactgttagtagggtcgcaaatgttctacattccagtagagggtcgatccgtatcatatccccatggttccaggcgaactaatcttggttttccctaaaaaagtttattagctgctatttcaattgttcatccaggttcttcccaatgtatacacactttatgggatttcctaaatctagaacaacctcttccaactcctcagttggtttcaatatatttctttcatcttgaatccgaggatcaagatcttcatccttcttctcgccttcttcaatcaaaactgccataagctggtgaccagcctttctgttttgcagctctatgcggtagcattcgcgagccagcatttggtcacctcgcacta

SEQ ID NO: 146452 - DNA, 941 bp, Cannabis sativa
  modified_base (896)..(915): a, c, t, g, unknown or other
tttggacagcttgccatatctctggaatcttatccccaagttatagggatttctttgatgactcaagatgcgaaagttgaattcactaagtgttggtcactctgcccggattgctgatcactttgctttgggcatgcctatgaggcatcctgttcaaactgtactctccgagcagatactcaaagttgattccatgtgtcaccatcatctgatgccacgtcagagtccaaaaattgggataacatttgcccccaagtctgtacgggacttccgaagttacatgtagacttcatccgagctgcttctgcctttggatggggacacgtgtcaagcgcgtttattcgatactcgatgtgaggctgactcggcgtcccttcagtttttggctaattaatgctctgacagttaatattttgaaatccaattatctctcaccacggttgacggctgcacttgattatttttgatttcccatattcgcttttaggggggaaccgaggcgtctgaggttcttttgaaatgattacccctttttgttgcttgcctataaataccaacaagcatttgtacacaaactcattttcaccatccttccttgctaagtgcgttcagagtgaaaagagaggtttttggcttcaagtttgctgaagtgccttcatcgaaactgctcattggtttgacgatacttgaacccagacatctgattcttgagtaagttctcgatttcctttatgcttatttttgcatgtttactgcttgaatgcaccttcgactttgctgtaaaaaatacataggaaaccctaagtttagaaactctacgattcttctttgttatgggttcatgcaattttacagtccataatgcttgctttctgaactgcataatgcctgtcttnnnnnnnnnnnnnnnnnnnnttcatgaaattttttgccctaacttg

SEQ ID NO: 146453 - DNA, 964 bp, Cannabis sativa
tgacctcgtcatacccatttgcaatatgggcgattgatttgagtggggcactccccacatggcgatgaggagtaaagtacacagtggtagctgtcgacttctttacaaagtggacagaggctgaccctctgatttctgtaacctggaagaaagttctcgactttgtcgtgagaacataatttgtagatttagaatacccattaagatagtatctgataatggaactcaattcgatggtgagttattcactgagttcgacgaaaggaacaagatcattaagagcttttcatcagtctcaaggcctcaagcaaatgggcaagtagaagctgttaataaaaccttgaagaatactatcaaaatgaagttggacactgcaaaagtagatgggtagatgaactaccacaagtactttgggctcacagaacgactgagaaaatgacaacagaaaatactctattctcgctagcatttggctcagaggcaatgctgccagtagaagttaatattgcgacccataggcgagatttttataatgaagaagaaaaccaagaactcttgaagttgtccttggatctacttgaagagaaacgtactgagtcacaaattaccaatgcagcataccaacactgagttgcaagatatttcaataagaaagtgaagaaaaagctctttaacgttggtgactttgtgctaagacgagtatttgcaaacacgagagatgcatctccaggagtatttaatcaaaactaggaaggtccttatgtaatcgaggcaatagttagaatcagggtctataaatttgctcagctcaacggcttgcttataaagaaccattagaatgttgagcatttgtgatcctactgctagtaaactcacaaaaatgttgtaatctccctatttgatgtaatttttaaatttcaattattgtttataaagttgtagtatttttcaagtaattacaaag

SEQ ID NO: 146454 - DNA, 607 bp, Cannabis sativa
  modified_base (553)..(558): a, c, t, g, unknown or other
tcgctcacttgccctttttgagcgaagtattggcattcgactgattttaacccaaacaaggttgttgatttcttcagcggaaaaggagactggtacttcacgcaccaccactacagtgggccattcttgggataagaaattggcgtaaaattcctttacaacttccatgaccgcctgctctctctgctcgacaaaaagtccccaatctcgcttatgaaccgtttcactgacccattcgggcaactcatcaatgtcctcaatatcggctactaatcccctctccatataaaactcccgattgtctaccttctcgtgatactttgtctcggctgcctgaaatgaaaatttcatgcagtgatttcttttttttcttgctggcggttctcttaactttcggcattttcgcttctgttcacttgcacactactctagcaatgatctaatcttgctcaatactatcccaatctgatcaaccacatcaacttactttcacagcaactcattcacacaaataattcacacctcaactagccatggtacaatccccctgtannnnnnattcacacttccatataatcaagatttcaacatttcaaccaaacacaca

SEQ ID NO: 146455 - DNA, 979 bp, Cannabis sativa
gagctagaatcagcgagatgatgcgagtatgaccaaagtctgatcgcataactgtaactcgcattatgtgggaccagagaacggatccaactcgcatgcatcaagatatgtgcggggtatcctttctatactcatgcgaaagtatagagatcgattctctataatgcgagctggtctcaatgacctaacaacctcgataaaccaatatagactcgcatgtctaggttctatcagctcatcatacgatgtccatatatgcgactatataagaatgtagatgtcctaaacttaattaaatgttaggtctatcttaagcccgcgagcttaccctagaatatgtacagtcaactctcatattagaagacgcatacgttgctgtatttagtgaatagaaactgttattcatttattaatgtttacgtttttagtttaattactgtaaatcaatgtgcaaacggattgataatgaatgtaatttttgtaactaataattggacactggacactggctttgttgtatataaaggagtgatccaccatgaaatggaaccgacgacactcttgctacagtggactaagcagactgtgatctgactgaaccactataatcctttgtcttcttgttatttccagtattctgttaagcattcacgttcccagctcgagtactcgccattttagattgaatactcgcaattgttcttcaaacaatttcttcttgttattaatattattacatacttttggtgttgcaaattttgctcgacaacacaaacatagatgaagaaaaaaatagtctaaacaaagtgtgttgtatgcaattaagaaaagtctaattatggtgtctaatctggagcctctcatcataagttcatacaaagatatacaaagagagaggagggaagacctcgaataattgtcttttggtgagaaaacattgagttcagtttttattatagctaagagagagagagagaga

SEQ ID NO: 146456 - DNA, 508 bp, Cannabis sativa
  modified_base (112)..(125): a, c, t, g, unknown or other
tatggcttgattgtgaagagatagaattttagggttaatttattaattaacagactttgtggagtctaataaatatatatattatagatgataattttatttgataattatnnnnnnnnnnnnnnaaatagtttttgcatttatagggttgaaattgcaaaaagtggtatttgtgaaaaatagacaaataggttgtgaaaaattacaaaaatttgactagtgttgcgtccactaatggccggccacttggtggtatttttggtccatttttttatcattcttttattccaaattattcaaccctaagcctaagagaagtagtataaaaaggaaaagaaagtcttatccaactaatgcttcaaaggcaagaaaacctagctttctttctctttaggttttgagtctcttcttcttcctttcttctctattttcgaaatccttagccttcttcacaaaacaaaattcaaccattagtgattgagtacatgcccacacataacaagtgagt

SEQ ID NO: 146457 - DNA, 911 bp, Cannabis sativa
ttataacgattcgacccctctctcgtcaaaaaggtttggtcaggggttataacagttcgacccctctttcgtcaaaaaggtttggtagatgacctttttttaaaaaaaaagttttcaaaaaactttttatttttgaagcgatgggtttgcattgtactatgtatttctagattaattccggttgatcatacatatatgcccctcaagtaattttaaagggtttacgctttacaattacgtgttgaaagaaattattattttattcacaactgtagttcaaaatattacatcagaaatgtgatttacaatcattaatctcataagaacttccccagttcaattgtatattttatcaatcttctaggagcatctggttttgataaaacaggttttgatgttcagggtcaatccctaacatattcccacaattgtttcaatatccagggtcaatccctgacatattccggggttccaggtgaactaatcctggttttagttgtttttctttgattgttagtggttgacgaatagctttccacgtggtagcttgatatggcaaccatagtgggccgatatctactcacgttgcaattttttacaaaattgctttaccagattaactgacccttgtcttcttatgacgtgctccctctcaagataactgaggtgtcccttcctcctgcagaggagggttataatccctggtcgctcgagttaatatgtagatcgagcttatcatgggcattatcctgcccctttacatatcgttgaaagtgtcctcgtgctatgagaccttctttatcatccttcaactgacgacactattccgtggtatgtccaatatcccaatgatattcacaccgttttgttaggtcccttttacgcctcagatgtctcataggttttgcctc

SEQ ID NO: 146458 - DNA, 618 bp, Cannabis sativa
tagtattgggtgggggatccgtaccgaggattacagaatgcaggattggaagatgtggtttgactggtttagaaatgactataatcgtccaacgtatgtcccatttatggactggatggtcacaaccttatgcatttttgaagtgatttggagcgagagaaatagacgggttcataatgaaagtgacaatgatcttactggtatcatgagactggttagattgaaaatcaaagatcatatgctggtccccaatcacagggtacctgaagttgtgtcttgggcgccccctccaccgtcttgggtatcctgtaatactgatgttgcagtctcctcaaatggcagcatgctatcaactgtaatccgcaacgatcgaggaaagatcatctcaatcaccacacgagaagtgctattctctgatccgctcactgctgaagctaatgttgtgtgtttggcagcagaggtggctcgcgattcaggtattcaacgagttctattcttatgtgataatctgtgtgtggccaattcgtttgcagcctcggctcattgcataggggactttcgaatccaagcggctgcgactcggtttaaagatttctgttccaagttcgaggaatggga

SEQ ID NO: 146459 - DNA, 1143 bp, Cannabis sativa
caacatcttcgcaagctctattttcttcatggctgagagttcttacagtgaatctttcactgtaattgctctcaatgaaagcaccaatttttagataatagttctctttgggacaggacaaatctccgaaatgcactcttcgagacagtgccaatctccaattgaaccaaagttctatttactcattccatatcccataatagctatacaattatatatttatagtgattcacaccctttgcaaattactaataaacccctacactatttctagtgtaacactttcccacccgtcaaaatcaccttgtcctcaaggtggtaaaattaaaaatcaaatacaaaactaagcacaaaatgtctttagcccaaatgataatagctttcttaacccatttgtgtgctaggcccaaatcaataataaagcttagggtacttgatatgtcgtcttcaaccttgcagccacttttttttttggaagccatgaacagccagtgacatctccctcagttcttcttacatagtcctcaatctttgactaccattcttcttagcattaactaggttgatatatatatgtatgtacatattttagaaaaccagtaagcatagagacgtcgtcgactcttttccaacttattttttgcgattcggcgtgcccacgcgtcccttcgccaacagtgaccacactcctccgatgaatttctgctatcgggcgcgaccacaattcccatctcttatctgtgctctgatttggaacacgcccaatttcctccaccaatcgaaggtgtcgtggtcggtgtacccctgttgctgcagtattcagtgccatctccgtcttctttggcgttggagttcttcgagctgccttcgttgatgtagatcaagaatccacgacatctgatgaagccacgccgatcttctccgccttcgatgttcttcgagctgccttcttcgtcatagatcgaactgacattgattgcgatctacttagatcggatccagctgaaatgtcactgccggcaagattgagaggcttctccgatggtgcctgagccgagggagccatagatgtctctgttgatgagcaatattgctcaactctaacatctaattcctccatgagatgcactttaaatgccttca

SEQ ID NO: 146460 - DNA, 513 bp, Cannabis sativa
aacttttattagaaaattatcaaattgatcaaaatctaccaaataacaagaactaagcaacgagaaccccactaaaaattactagaactagccaaagggatcaccctttggctaataacaactgaattatagcactctacttcataaccttcttaaagtcattatcccttactaagaccatatcgtctaaaataaattttagtatgtaatttagtaaaaaacaatgaacctaaaccctacaatatatgtgtaataaaattaccacttgatccatttctattatatcaatcataaaagttgattgtcttgtttgataaagaccttccaaaaacaaccttagaaaaatttaaacttttttgattgacattaccaataggataaacactattatttaactctattggagttgattgtattttaaataaattataatatatactagtagtattaagatagatagatgtgagaggaaaatagtaatgtatatcttaatgttttcctaatactatatat

SEQ ID NO: 146461 - DNA, 512 bp, Cannabis sativa
aaaaaaaaaaactatttaaaagtataaaaataaaaaagcctcattatcttataggtggttaattaacaatattctatatttattatcaaattaaaaaaaaaatactggcactaataggtagtgccactctgccagacatcattagtatttttttagcaattattttaatttaaacccttcaaatttgccccacactataaagtaacatattgttattgatttaatttaatattaaaattataaattttactttaataattaatattaagtattgttaactattcttaagatatcaatacatacacaatgcgctttaaaaatattaaaataatatatatatgtgagtaaaaataataaattatactaataataatattcacttgtattgaaaaaaaaaatatgttataactaattgaattcattgtaagggatatttgcggcgaaattccttttacatttgtaattattacacatgaccctaatcaaaaaaagtaacaacaaaaatactttat

SEQ ID NO: 146462 - DNA, 706 bp, Cannabis sativa
atctaagaaagaataatagaaacaaaaataacaccagctttttacgtgattttgcagttaactctgcatagtccacgagtcaaacttattcagatttttctattacagaactagggttcttgacaatcagtgtattcctttttgtctaagattttttgttcaccttttttgtaacctatttatagtaatataggttggtagttaattacatgtaaaattaaatcccataacaatatttcctgaaattgtgagctttaattatgctccacataaataagtacggttattatttgaaaatcacacagttgtgatttaaactgttttgaaggaagtcaatgctgacgtggattaagacacgttgccaaaggtatctcgctgaggtgtctcgcctagtacataaaatacttggtttatccataagtcttccagcaatggcatgagcaccagtgtactgagcaaacttaagaactgctctttgacaataaggccttgcagactagaaaatcttatccttcgagttattacatttagttagtataatgtaaatcatacgctaagtgttctaacagtcaattcacctcgtcaacacctcttgatatatcgtgaggtagatgcctcgctatgcatttcctatgtctttcttgagattatgtcctctgacgtgaaatggtttcttatcaatacacgaatcaatagtttgtacatc

SEQ ID NO: 146463 - DNA, 713 bp, Cannabis sativa
gggcataaaacccaacatgaactgggccgggcagagaccgaagaagtccgccacatccttgaagtacttatgcaagggcatcaatgctccttactgaccgtgggctcccgaccaggtgtacatccccttgtcaggatttgtggcgcgattattgtgggtaggaatgtagcagtccagctcgcctaggtacccgccctggtcaagagttcaaaagcgcgcctccgtattcttgggtggaggacttacccatctggcacctaaggcaccctgccttttataaggaaccgtcgctgcaagctcctcactgacgtagtccatgccctcgactaggacatctccgtcagcatcgactggctccccaacctcattgtaccccccgtagtttgggggttcaacctcttcctctccctccgcctcggagggactgccgggacgcacatcttccaacacctcaacctcctggacctcagcgtccccgtcatgatcctcctccatcgggacggttgaatcctgtttggtgctgggcagagtggcaagctgagccacttgaggatcaatggcgtcagccagacgcgtggttttctttgtacgagccatcatcctatgactaggtataaggtcaggagaatgtccttcactagaagaaggaggactagaacgaagacgagggtgatcctcgtgcagaagttgaagcaaatcctggtcgatccgat

SEQ ID NO: 146464 - DNA, 867 bp, Cannabis sativa
  modified_base (263)..(265): a, c, t, g, unknown or other
tcattctttctgcaacaccattctattgtggtgttaatcttactgttctgtgcctttgaatacctgtttctctgcaaaatatatcaaattcattgttgcaaaattccagaccattgtatgtccttaggtttttaacccttctgttagtaagatttttaacaagtgttttcccgtgtttaaacctttgaaaagcatcatttttatttttaagtagaaaaatccatacttttttagaaaaatcatcaactatagacataaagtannnttacctccatgagttggtgtcttttcacgaccccataaatctgagtgtatataatccaatatacctttagatatatgtgtcctgttttgaacttcagcttgtgatgttttccaagtatgcaatgctcacaaaattccaccttgctgattttatcgttacctaagtaattgttgttcattaacaatttgcaatccttcttctgctaagtgtccaagtctgttgtgcgataaaattgctttagcatcttctggaatttgaaaaatgttgttctgtccaacagtattgttgcttctagctataggttctcctatcatgtagtataggccttccttcttgactcctttgataatagtcatagatcctttgcatattttcatttgtccatctttgattttgctttctattttcaaatcatcaagcacacttagtgaaataagatttcgagacaaatcaggtacatatcttacgccagttagtgatctagtaactccatcatgcattttgaatgccactcttccagcacctttaatttcaaagctttggtcattccctagaatcacttttcctttagtagagtccctgaaatcagttaaaatagatct

SEQ ID NO: 146465 - DNA, 544 bp, Cannabis sativa
cctcttctactctatctaaccttgcatgtatttgttcacactcctctcgcatcatcctcctcatctcccccatcaaagcttgaagttgtaaatttgaaaccgtaggtggtgtactttcattaccaatattttcttctggatcttttgacatgattgaattttgcaaaaataagttagaatagataaagagagacctcaccacactccctcatgtgtttcactaaaaaaaataataatttcactcaattcactcgtgttttcactcaaatttgatggcttataccctcaacaaagctcacaactctgccttttttccactcatatttttctttgacatctttaaacgttaatcaaacagttcaagggaggattcaagcagaaattcaaaccagacaaaccaaacgaacaccgataaaaactgaaaaaaaaagaagatgacttgtggttggcaaacaagcctctagactatggagacgaagaaaataccaaaaaaaaaatgacgagaggtttccagattctttttttttttttttttgctcggttt

SEQ ID NO: 146466 - DNA, 538 bp, Cannabis sativa
  modified_base (492)..(496): a, c, t, g, unknown or other
ttaaacgtaaaaatataatttttgtatgagaaatttttttaattaaataaaaaaaattaaacttaaaagctcaaattttcataatattaatcattgaatacccattaaaaatgctaaatcttatgttaaattttgtacatgtcataaattatgctaaatataacacaatttataacatttttctaaatttaacacaacaaaagcagctttttcaaattacaattttgttattaaagggataattacataatacactatttttttgtaaaaaaaaaattacatttttacgtttaaagaattttttttatatttttaaggctttttatagaaacaatacacgaaaaataacaaaaaaatacataaaaataacatcaaaacaacaacaaaaaattaacaaattaacaagagtataacataaaaagactgtattttttgcaaacaaattaaaaaattgtaaaaatatttaaaattccgtaaaactatatttttatnnnnntttttgttgtttttgtatatttgtgaaataatcccttcattt

SEQ ID NO: 146467 - DNA, 521 bp, Cannabis sativa
  modified_base (399)..(405): a, c, t, g, unknown or other
aagacaacctcgcggctctgataccaaattgtaacaccctaattaattagggatgtcaacgtgatttttttaatgtattgtccatctcgttgctaatcaacgaggttaatgaaaaacgtgattaattaaacttttcctatttaattaaaaacataaagtaatacatttataaaatcccaagatcacatcacaaaatacatttacaaaagtttgctattcatatacgaaagttttatcgcctagcgactattcagcaaaagccttgatgtcccaaatattgtacgctccaggcctaaccgccctaacatgtacaatcttcacttgctcattctcacggctcctcagctttagccttgcccttacctgcacctgagaatagcactgtgagtcgatagactnnnnnnnaaaagcataacataaaacatactatatcccaggttataacctagcgcccatacatctgatcataaccctatcctcgtgtcccacacggtatcgaatctagaacgttcatacgacaa

SEQ ID NO: 146468 - DNA, 624 bp, Cannabis sativa
  modified_base (194)..(196): a, c, t, g, unknown or other
  modified_base (273)..(274): a, c, t, g, unknown or other
  modified_base (592)..(598): a, c, t, g, unknown or other
taagaataactttgactctcgccaatcaggacatcgttggagtcttattttaaatttgaaattatcctttaattttttctcttagcttactcatttccaattaggtcaaataatatatcattggatgaatggtttataaatcattcacttatgatgtcaaataatattataatcccgacattctatcccgaaannntataaatcctcgatcttgaatctcctattgcatatatgtttattataggcaatttaaacttagagttagattagtannggtggtccaagagagaataattactcacctatatttggttaaatttaagtctttgactttaaattttagataccaaatagaaattttatatttctatttcctacaacccattacacattacagtataactttcacaagttttatttaatatccattttctatcaatggattcaaactatatgtttatttgtggatttgagtttagtattctgtgacaaggatccacttggactattctaagaaccttatcttgtaactagatctaagtcatcgaaagaccacaaccacatatttaataaatctatggcatttgtatcnnnnnnntagtggttttgacaagatcattctct

SEQ ID NO: 146469 - DNA, 705 bp, Cannabis sativa
tgggctatcactaccaaaaaagatatgctttgtgtcaagtgggttaataacatttacctgaagtcttcttacttttggtcttataatctaaagtaagattcgagctggtattggcgtaaactttgtcactttagacaaaagtttaatcagaatgagattgtgaaagctggggccttcggtggatttagaactaattggttgtataacaaaagtttgaatcaaagtccagtcaattatcacaaggcagtttggagctctctaactgtgcctaaacatagattctttcttcggcaagtgatgaactctcaccttcttaccacagataaattatctcggtttcatatagtgcttaattcgaacctttgtctgttttgtgaggataaggaggaatcccatgaacatctcttctttagatgtgtgttgtctcaaaaagtcctagatacaactttttcatggatgggattcagggcttggccgacagattacaatggatggtatgattgggtaattttgacaagtcgagctaggctacatcgactcaacattactgttttggcggctataatctataatattttgctcaagaggaatagatgtattttcagcaattattctagttctgttggtagtttagttgatgatgtaaaaaattctgttaagtacagattacaacttgtaaacaggaaaaacttgtctaagcaagag

SEQ ID NO: 146470 - DNA, 733 bp, Cannabis sativa
tacacgtgtcttctgtcttcaccgagttttgtcacttgtcacttcattttttgaatttttttcttcaaaaaagttttgattaacgtgtgggtgtcactatttgtgacaatgttcttctttttggggttttaatttattttaaaattatttttaaatatttcaaaaaagtattgatttgccatggggtgtcaatttgtgacagtatgcttctttttggagtttaaatttattttaaaattatttttaaatgttaaataatcattactaaaatcccactctcccatgtttcctattcatcttcttctaatatccatttatttcaagcgtttatacagtttgtgtcaaaaaatttcaattattccatcttcatattatttccctcttcattttcccccacatttttattcttattcttctataaatattacttccccttattcacaatgattgttacccaatcatcatcctgctgctaaatagccccaaaaacaaccctaaaaaaataaatttcaagcaacaatgggtaagaagaatttgaaagataatcctcctaaccctacttgtctagttgctgctaaaaggaaactaggtgctggaacttcgaagaacactcgagcaaaacgctctcgacctgtggtggagagcttcgactctgattttgagttggagccagagtttgtaaagtctcccaaatctgataaggtattttcgtattgatcttgtgttgttttag

SEQ ID NO: 146471 - DNA, 669 bp, Cannabis sativa
ttaaatttgtgttttttgttttttcttacattcccttaaattgttttcaaatttctctctaatcagatatgtatatatatgttgaatcaattagttttttttttccctattcatgataagatttttttttttacttaaaaaaaaaataaaacaaaactaaatagatctaacatatactattgactaggtataattatattagtttattttttgtcttcattgtttctttatatatatataacaaatatgaaataaaataatttaaagaatgatacagtatgaaaaaaaaaaaactactaaaatttgttgaaaaaaaaattagtattttttatttttaataacataaaatattacatatttattataaaaagaaattaaaagaaagatacatagtatacatattatttagtaagaaaattgagaaattaataaaatagttaatataatacattttaattattaatgaaaagcaaaaagggtatgattgtaactatacttaagcatactttagaaagttacaaatgtcactcaagtaggaagagaatttaaaagagagtgcaaaaaagagtttccctaacactcctctattatttaatatatatatcttaatttttaacaacaataacttcttagcttcaattttttattaaaaaaaataatgaatagcat

SEQ ID NO: 146472 - DNA, 869 bp, Cannabis sativa
aaattttttgctatatataatttgcttttacaaaccaacttcatgaatcactttggtataacttttgaaaaagctaaaagctcattttttaaaaagttatgataaaaaagtattggaaacttctataattttgtagtcaattttttttttcatagtcatgtaaattatagttatttaaggtatcctgcaaaatttttaaaaattcgaaaaagtttaacacgtcaaaaattgtgttcaagcagtacgttgcagcgtgactattttattttatacgcgtataaaataaactatttgaagattgttttctatattgtaaattattttgaatttcttaaaattgtgtaggatatcttaaataactataacgtacatgaatatgaaaaaaaattagactaattttttttttctggatgccaaaataagtagagggtgtatcagtacatcctttttaaatggtgcattctagaatcacccaaaagtattttgtaagtagttagaaaataatttattgaaaaatttatggagaaacaatatctaaaagatggtacaacctaacttttataaaaagaattaattaaaagactataataaattattatgtaccaaaaatatatttaattatttattatatattacaaaaaataaaaaaaatatttttttgaaggaaaaaaatatttaaatttcttattttttattttgttttaaaaaatattttatatttttaattttatttttattattaataaactatatcaacttaaagtttctgtaattttttttacaagtgacaaaaatataatttaaaaatattataaattattttatcaaatatatataaatttatactacggaaaaaaataattaaaaat

SEQ ID NO: 146473 - DNA, 692 bp, Cannabis sativa
atttttatccaatcctgaggtggtggcctctaggtccccctcaaagttggtgtagggcaaggcaagaaaacatcatgaagctctgcataagaagtacaaatttgatcaatacatttcaaaatatccagaggagagttattatgtataaaatcgtttcacgtcctccagatggttttaacaacaatcgaagcatacagaaagacttcttctactcggatacccctattagtgagattccatataaatttgacccaatcccaaactcaaatcctagtattgcagataggatagatgccccatggtgaaattgttcgccataaatgcaatgccacatcacaggacaggaatagatgctccatggattcctcccctaatccacacaaaggacaacacgtgtcctcaatgtggaatcttcttccaatcatggatctaatagggagtgcgttagagaggatgcaccaccagaggatcttatgtctttccaaaattttgctattccataacttattccagagcgccggagcaacctcacgatgagaagctctttccaaagcttgagacaggttcacacccatctatcttctccttgacatgaggatttaccacctttaacgattgcagacgccgtttccttgtcaaaaagggcatttagctttaggacatcccaatctccattagcaagcaagaggtca

SEQ ID NO: 146474 - DNA, 533 bp, Cannabis sativa
ttattgttgagagagagagagagagagagagagaagatttagggttattggtttgaaattatcagccttgggtccaatattcgaaccagcgcctgtcccaaattttcaatcaagaatattaattaggtataaaatgcatcttttcccttattcggaatactaagtattccccacaattataaaccgttgggtatacttagtattcccaacagttgaaaattgttggaataaattattttttcaaaaaaaaaaattatttagtattgccaacggttatttaccgttgaaaataactattccaacagtttttttgcttcggtgctaaacagatgggaaaaacttccacttactttttccaacggtttctatagttgaccctctttaaaatcgttgggaatagcccattttgtagtagtagctaatattggtcagtaccggtatgcaggtgtattgctggaaaggtctacagttttcagctagacaggacttggagggattttctaaggtacgactagtttaacaattgatcaccg

SEQ ID NO: 146475 - DNA, 651 bp, Cannabis sativa
aaaaccgacctctcatgaccgacttctcatgttaaaattgtagtagtgcataccgccacttattttacgaggggatgaatgtcttgcagcttatcttttggattgtggagagaacaaccgcagaactgcactacgtgtggagcttataaaaaagacagaggtgaaaaggatattgaaagttacacaaaagaaattgagcaccccttagtagataactactttgatcgtgaattctactttgaagaaaatgtttgtgatattgcttctacaccaggtgaaagtggtgttaatctcggttgtgaatttttggattatcttaacaaaaacacaacaggatcatctccaactccaaaccattcacaggaagaattgatgactgaaaatcacatcgacccatttgactatccgttggagcactcagaccaacaaaatcaactcataagtgaagatatatttagtttcacagatgggtcgaatttggcgattggtcaagaattcaagaataaagatgaggtgaagtttacgttgaaaaatattgcgatgaaggctttctttcagatgaatgcaaaatctaccaagtcattatatgtgacaaaatgcattgacaagtcatgcaaatgggcggtgcgtgtagcaaaagttagcaactca

SEQ ID NO: 146476 - DNA, 673 bp, Cannabis sativa
  modified_base (211)..(215): a, c, t, g, unknown or other
  modified_base (359)..(359): a, c, t, g, unknown or other
taattaagagactttatggagtcaaattaataaatattataaatgacaattttatttgatagttattttaattattgaataaatagtttttgcatttatagggctgaaactataaaaagttgtatttatgaaaaataggtaaaatattttggaaaaatgacaaaacccaaacttgtgtggggctcattaagtggccggccatcaagtttannnnnaccctatttttatcatttttttattccttatacttcaaccctaaccttactgaagaaagtatagaaggaaggctatggtctcttcatccaaactaatgcttccaaagctaaaaacctagctttttgatgagacctcttccttcntcttcttcctcttgaatttcgaaaatacttagcctttcttctcaaaatatattcagcctttagtgattgagtaagtgcccacacacatcaagtttgtcctcaaacatagtatgtaagactgtgaagaatccaaacacaaggaaggagtttcaggctcggatcttggtgatactctggtacagaaaggatacaagggttagcgatctgagtggaaggagtcatttgttagaattattataccaggatcttagatctactcacaagtatgttgattagcaccctaaatatgaactttataaaacgatgaaataaac

SEQ ID NO: 146477 - DNA, 553 bp, Cannabis sativa
ggttgcccaaccggaattctggttgtgggaatttcagaacatccggaattccagatgcacaaccgcaattccggttcctcgcaggaaacattcaaaaatccacactttgctcaaatctattccaaaccataccaaaacttccagacctgttctataaataccctaaagaacaaatccaaagcactaaaacagcccagaacacagatattaaaaatgccatgtgagctccaagttttgagtttcaaactcaaacttggctaaatctcacctacaagcatcaaaccttgattaaagttacatattcatgcataacaaagctgcagaaaacaatctctaactcatgcaacaactacagccactaatttcgaaaatttctctttgaaacttaagcttttgaatagaaaatccataactttaaacaacaccactaatcatgcactaccagtagctcaattcaacacaaataatcatgctttaaacttcagaaacaacatcaaaaacacagcagcaatatcaactcaactaagcatgcaaaacatcatctttttcatca

SEQ ID NO: 146478 - DNA, 559 bp, Cannabis sativa
  modified_base (517)..(534): a, c, t, g, unknown or other
atattctaaacacgcgagctagaatgctctgtagttggaattgtataatgagcctttgggcctatttgacttaagaaatgtctacaaatatttggacatcctttgttgacaacttagaacatgcgaattcattacgagtcatcacacactaattatttggaccaaatatgtaaagacgatttttacttgtcgtaggaaagacatacatgctcgtcacagataatagatatatgcgaccagtattaacttctcttggtcatgcttatcttttgattatgctggacataatttgcaactaaactctatcttgattacatcatcccgcaaattaaaattactcgagattggttctatgagagttatattattatattaacatattctttttcattaggaactgagttcatgtgttaatttcttagaggctgtaatttgtatttttgggcaaaaatttaggctataacacatttgtaacccaattaggggtgttcacaaagtatccgatccaatccaatcnnnnnnnnnnnnnnnnnnccaatccgcaaaatgcggatatccg

SEQ ID NO: 146479 - DNA, 915 bp, Cannabis sativa
tgtctgaattgggggctatgcgcgtgcggacaccctgctggcagcctccctgtgcggcaaaataggcttagtccccctgatgcatgcaatgcataccatccgtaccaaatgcaatttttttatttttttttatttttttttcatgcctttttatggaattaattttgaattttttgtgtagttttgtattttgattttaatttttcaaattttaaatctaattatcagaataaaattaattaatttttttaattaaaaattaattaattttattaaaaattaattaattttagatattagtagattttgaactgaaaaaggataaaatctaattttttttggcttaattggttacctttattttaaaatttgatttttttatcttatttttaaatttaaggtcagatattttattttttatattatttaattaattttataaaatgaccttatttgaaatttaaaataagattattttaatctagaaattttaaaatataaccagatattttgctaacttttaaaattttgttattttatttaaattaaattataaaattagacaaatgatatttatcattttattttattggctatttaattttattttaagtaacataaaatttgaaaagttgttagcatctttttgaaatagatatttaggtttgttgaaaacctaatttttcaattttataggtttaattttgaaattaattatttaatttaattttataattttgaaaataatattttattatttagaattttcaaaaattatttaattatttaattaatttaaattaaataaatatccaactatccactttgttgcatgtgtgtgttttatattgtttattattaaacttgtttttataaaacctattactgtttgatctaaattgtcatggttaactt

SEQ ID NO: 146480 - DNA, 675 bp, Cannabis sativa
  modified_base (636)..(649): a, c, t, g, unknown or other
acagtatttttgaaaaaatttccgtgtgacaatatttttgtaaaaattaactcaaattctagtattttttgtaagtttctctttttcttttcttcaataaagtctttcacttataaaaaaaaaaaaaagtcaaataaatatatatatttatattatgaagatgatttcattgctaataaattttgtataatcacctcagtaattcttggtctttttgtatagccacaaatatattttcagattgtccttttcaccttcagaattctgattggtattcaagctctgtgaataagttgcttccttgtactgactctggtgaatgtaatatttcttattatatgagaacttgttgctttgtgaagtgaaatttttgtaagatataaataagaatttttttaaaaaagttatatatatatttaattataaagatcatagaccatcaattaaattcactctaaaagagagaaattgaagaaaacacttactcatttcttcaaacgtacgtttttaaatatgcaaactggagatttatgtctaagatctctgaaaatataaaattggagtacctatcaccaagtatttgttagaaagtataattttttttctcaagaaatctaaatatatatatatatatannnnnnnnnnnnnntaatgggtattacccatgtatgggta

SEQ ID NO: 146481 - DNA, 663 bp, Cannabis sativa
caattggtatcagagcgggacactaaactcttagtgtggtcctttgacatttctgtgtgtttttgtgaattatgccattttttgcataaggaagttcgatttctagaccaccattgctcagtgattctaattatcattattggaaagttagaatgagggcctacatcaagtctcaagatgagagagcttggatgatgattttattaggatggtctgctcctcttgtggtagattttgaaggtaattctaaattaaaatctgaacttaaatggctactgaagatgataaattgtctacttataatatcaaagctttacatgctatatttaatggagtaggtgaaggctatattaagcttatatcttcttgtgaatctgctaaagttgcttggcaaatcattcatactcaatttgagggaacttctgatggtaagcgttttaggtttattatgcttcagaacaaatttgacgatcttagaatgtctaaatctgaaaccctggctgagttttatgaaagattatcttatatagctaatgaatattttgcttttggtgaaaatcttaatgaatctgttcttgtcagaaaaattgttagagttcttccaaataagtttgacactaaactcttggctatggaggaagcaaaagattttagcaagatgaa

SEQ ID NO: 146482 - DNA, 693 bp, Cannabis sativa
ggactagaactcagactgggacctggaccgggacccaacactcaaacgtaggacctcaaaaccgaaccgttaaataaaccaagaccaggccaagaacagagataaggaccaattctgaacatggaccgggacctgcactcggactgggaccctaacccagatcgggacgtatgaccctgacctgaattggggacctagacccatgactcaggcccaagacccaaacctagacccaaacttggacataagacccagacaggacccaagacaagagctagaacttgaccaggatctggatttatacccaggactggacccaagacccgaggtttggacccaacccatattcgatgtccaaatctggtaattagaccaaggctcggacctcgacctagaccagaacttgaacccgtaccaaaactcgaaactagactcgacatgtggtttgtgattagatttgggactaagactaagacctaaaccaaaacacggacctagacctaaatcaggactcagacccagacccacacccgaaccttaaatcgtaccctgtgacccgaaattggaaccagatctggaagcgaacaattaaactctaaatcctaaaccttaaaccctaaattctaaactctttacacttacccctaaaccctaagccctaagccctaaatactaaaccctaaaccctaaacc

SEQ ID NO: 146483 - DNA, 674 bp, Cannabis sativa
  modified_base (406)..(406): a, c, t, g, unknown or other
  modified_base (487)..(491): a, c, t, g, unknown or other
  modified_base (584)..(584): a, c, t, g, unknown or other
ctttggtagctataggactagtttcgatgtttacttgttgaatttgaagtgattttgagttaaaaatcaagtttggaactttttaaagcttagcccgaacgtttatggcgtttttcatttaagggctcaattttaatttctgttacgtaataatggtaatatttatggtatatatgtgccctatgaagtttggagtgatttggatgagttttggtagtgtttcggtgagtgccgaatttaggattttcgagtttcacccttttttgaaattcttaagagatcagaaatcatatttttgtaataacttttcactcgggtatccgttttagacattctatgtactgtttcaaagcttgcaacgagctttataatatggtatacattttagagccaaaatataagtttnattttagtgtatttataccgcagagtttggttgaaaactctgaattgtcttatgtgaatattaagcagtgttttaggatannnnnttattggtttatcgttgttgtgacataaggccgagattattagtgttaattctccacttgggttggccaacatgtatgaacctggattaaagntaagaaaagtatattgtactgcataatacgttatatgtaatacaattagttttgttatgaattgattaatacaatctgttatagtgagat

SEQ ID NO: 146484 - DNA, 776 bp, Cannabis sativa
tagtaactattcatgggtaatacccattaaaaaatattgcatatatatatatataatacttaattattattcatcataaaatctatacataacgagaagaaggtgaaaacattaccttctcaagccatattaattgtaaaagaaaggaagaaggatttaattgtaaaagaaacaatgaaggctaaataaaagtttttatatatgtatatttatatatttagtaatattaggaattagatagatttagttagtgatttttttaaaaaaaaaaataataaaataactaactaaaatatcaaaacatagaattcaatatattttatacgggttttaaaaaaagttagtgacattaagaattagataaatttagttggtgattttttctaaaacaaataataaaataattaactaaaatatcaaaacataaaagtgagcataaaatgttttatacggttttgttaaaaataataattttttatataattttttttaataaaaaatattagaaaaaagaaaaaaatatatttatgaagttaataaaaaattagaaaaacgagagaactaagcagagatcaaataatgttaataagagtgtcacatcaccgcctcatatcttttctttatatatatatatagatatatatatgtaacgccatgattgcccgagacgtcacactagctagtccatttaaaaccatttaagataaagacaataaaagacttctttaataaaaaataactaagcatgagatttcattatttttaaaacaaaacat

SEQ ID NO: 146485 - DNA, 502 bp, Cannabis sativa
ctacacccttcaaaaaataatatcatcataagaaatcaactagtttttagaattaatttttgccgagaaatttttgtagaaccaaaccttgaattaatttaaagaactagctttacatccattggtttctatttgacttgattataagattggcaatccattacttcagaatgctagagaagagaggtgactatcaattactacaaaatactagatttaagtatttaattgagcccttgagtgaaaaaataaacttttcccaagatcatgaataagattaaaaaaaaaagtgaacttgatgcatcggttgttgtaatcccagcaagatcatggtatatatactagaaaccaagatataaggttcttcaacattattgcaaatttataaattggaaatattataaagtagtaatttcaacaataaaagtactagtttctaaaaataacttctaatgctctaattttattggttgaaatcattatttctaatttcataaaaata

SEQ ID NO: 146486 - DNA, 882 bp, Cannabis sativa
  modified_base (258)..(262): a, c, t, g, unknown or other
gccaaaaaaggactttacagtctccccctttggcactttagatgaacaaaataatttttaacaaaaagtacctgcaagacaaagttagcaagagccaaaaatactactccccctgagtaacacaaccgaatatcacaaagagactaaagacgagctaactttaaaagatatgttcacaagtactaaccaaccacaactcccctgacaaaagggtccagagttgggcacaaacaaattaaaaataaatatctctccccnnnnntgtttatcggagtgccaaagcaaaaacaaagaaagaaaaatagagataagttcaatcaaaagcaaagaaaaaacaacttagtctcggtagagtttaaccaaagaagtcaattgcttggacatcttatgttgaacttcttccattgttgcaaggcgattatgcacattctgaacttcggacttgacttccaggagttctgctgcagcagaacttgaacttccagcagcagaagcacccgcctttggccgtttttgaaacacaccatcaaagtattcagagggttggaatgtaggaccactgataggaggctcaagtgtttcatgcaattgggccacattcttctgagaagataaaaccttatagattagatttggaaacacaagtttaaaggttggcttttaacctcttcggaaggagacaatctggttcaaaatgtgggaggccaaatcaattgaagttccagaagtgatgcggtataagagtgatgccacatcttgagacactacggtcttgtttgatttaggaacccaattttttaaagcaaaccgcataagagatgcatgagcaaaggtgaggtgagtgattcgaagactctcccctggtttcaattctgaacgagc

SEQ ID NO: 146487 - DNA, 682 bp, Cannabis sativa
cctcttccctgatctttactaattctggatcagttaattgagggactttaattcgttctaacagatcagattgcagcgtcaagttatgaagcttgcccacaacaaactcgatgctacatctgatcatgtcctctactagctgaggtaaaatctgaatcatactagctacccctctgggacccttcctgctcaaggcatcggccactacattggccttcccatggtggtaaaggatctcacagtcataatccttaaccaactccaaccaacccctctgtctcatattcaaatctttctaggtaaagaaatacttgagacttttatggtcggtataaatttcacacctctctccatagagttaatgctgccaaatcttcaaagcaaaaactaccgcggccaattctaagtcatgagtcgggtactgctgctcatattctctcaactgacgagaggcataggcaataacccgatcaccctacattagcacacaccccagaccctgtctggatgcatcacaatacaccacaaatttctctttatcagaaggtagggctaacactggggctgtaattaatctctccttcagctctaggaagctagcctcacacttgtctgaccacacaaaacgttgattcttcttagtaagctcggttaagggtgttgaaattttaaaaaacccttc

SEQ ID NO: 146488 - DNA, 721 bp, Cannabis sativa
tatatggggtaattttttttttaacttttttctttcaaatttacggattgggttgctccggtggtttctatatgggttgctatacagattttggttgcgatttaatttgttcctttagttgctatagggaattctgcgtgaaattccataaaaatacaaaaaaaaaatattttgaagtgtaaaaatgaaaaaagcattttttatagatttttattttgtgtgagaattagatacaattctacctattttctcattattaattaatagattttatttgacatatttcttttataaaaaaaaattgtacagatattcacttatttataaaagtgagtagttaaataattattttatttttttttatatatacaacaaacatattgaggttacgcctagtgttgactggatttctagccaacggacgcagagtcgtaataaatgagatttaaaccaaaatcacaataataaatgcagttaataacaccggaattcgtaataaatgtaaataaaagacaccagaatttaaagaggttcggctccgaatgtcgttagtagcctactccccttgacttttattgatctgagttgcaaaagtcaagaacaggctcttgattgcaaacgataagaagtgtttatttttctaagtgtttgagattgtggatccccttcccaggtcatgggtgaccccttatataggggagggggtcggtgcttctcgctt

SEQ ID NO: 146489 - DNA, 644 bp, Cannabis sativa
ttgtaatcttgaaaatgaaacaatcagtcatgtgcttgtaacatgttctttctccacggcatgctggacagagctcgaaccagcaatttcaactgatgttgaagacacttttcccaactggttgaactcagcttttgaaaaatggagtggacagcgtcgacaacagattgctatgctttgttgggctctttggagaagtagaaatgatctggtatggaaccagaaacacgttgaagtaaaggaagtggtagtgttagttgttacggttcttaatcaatggttatatgctcaagacaaaacttttgatccgtccttaggattgctttttcctggagatggtagtgagcattggactttaccaaatgttgatatgattaagattaacactgatgctgcaattttctcctcttctcactgttacagctactcttgtgtagctagaactcataccggttctttgttggaggccaaagccaaatgtgttagaggagctgtttcccccgatctggctgaggctattggcatccatgaagcgctaagttggatcaaggataaacattggagccgtgtggaagttgaatctgactgctaagttgcaattcaagctatccgaagttctactaccatgtactcctattttggta

SEQ ID NO: 146490 - DNA, 507 bp, Cannabis sativa
ctgctaattcttcttagttaactctgttcagggcatggaaatcttggaaaacccttccatgaagcgacgataatacccagctaaacacaaaaagcttctaacttcggtgactatctttggtcttggccaatccctaacagattcaatctttcccagatcaaccatgatcccatctttactgacaattttccctaagaaggacactcacgataaccgaaattcatactttttaaatttggcataaattttatgttcccgcagtcgctacaaaaccatctgtagatgtttctcatgctccacttctgattgagagtatacaaggatatcaataataaatacaataacacatatatcgagaaaatccttgaataccatattcatcagatctataaaatctatcagagcatttgttagtccaaaagacaactaagaattcgtaatgtttgtatctagtataaaacgcagtctttgggatgtcctcctcttgattctcaattgatgatagcc

SEQ ID NO: 146491 - DNA, 532 bp, Cannabis sativa
gtcccaagtcccatttttgaatttgagttcgtgattgatactggtgtgcggttctaggtcacgaccctagttccgtgtccctagtctggttccatgtttgggtttgagttcagcttcgggttcgagtcctaatttgtagtctgggtcctggtcctgttacggttctggatctaggtccaatttcagttatgagtccaagtcaaagtcctagtgccagtcctggtcaacttccagttttggttccaattttgggtttcagttctaggtgtgggtttcagttcgaatccgagtctgtgtcggggtttctgcccagtcttcgtcttcgtcccagtcgaggttcgtatttggatccctatctaggtccaagtcagtgtttggtatcgggtcccaaatttaggtcaaggtccgagtctcagttcttgtttgtgtacacgactgtgtccgggcccgagttccagtctcagtttcggtctgaggctaggtctgtgttcgattctaggtctgtgtgcaggtcctggtcacggtcctagtc

SEQ ID NO: 146492 - DNA, 880 bp, Cannabis sativa
tggtttcctcttagaccccctaccccattctttgttggaaactttaggcatgaatggaatatcgacgtaatagcctttaagtcatacaaggctggtcggcctagtatggcgttaaaggctgatggaatgtccaataccagaaattgtgccattatagttatgctcgtcaaagcttgcccaacagtgaggggtaggcgaattttccctagaggtgcgactccttggctggagaaaccatatacgggcagaagacaaggggttagatctttgagttggagccccgtcttttcatatgtggtcttgaataagatgttggaagaagctccattatctatcatagttctggccaccatcttgttagctatctagacctccacgaccaacgggtcgttgtgcggaaacctgattttgacagcatcttcgtcgttgaatgttatggtgggctctcctgcccgtgggattttaggcttcctctcttctacggccaggattacttcttcttgcccgtgctgtactgttcgagcatacctctcccgagcattgcctgaacctccagctatgtgcggacctccaataatgacttgtagatgcccctctactggtggaggtagcaagtcttggttgttgtcacccctctgattccgatcggccttgacatacatttgtacgtgtgggttattttttcttatcaaaaattccatttcccgcttcaaattgttgcattcattggtgtcgtggctgtagtctccatgaaattgacataacttggtcatgtctctcttgatgacatcttttttcatgggtgcgggcttcttgtacggggctagtgactaagtggccatgtaaacactttctatgtcctccgtcaggatggtaaatg

SEQ ID NO: 146493 - DNA, 552 bp, Cannabis sativa
ttaattgtataatattgtttgacatgagagagtaggcacgtcgcacgtgcccagctaggaagatgcggtggcagtggcacgtgttgttgcacttgcaatttcctttgcgtgtggaagatactgccatgtttggatgcatgaataaactcattctctcatctaataattgactatctctgtttgagcgtggtggaatggattacatcttttggtctcaagtcaagccatacatcatatactatatttaataataacacttaattatttagtctagtctttttctttcttaatgtacctttcagactaaaacatataaactataaaaaaaatatattagtttacttactcaatgtaattcatgtagtctctgtctaatcataaaataattaaccataaaaatgaaaactttgtgaattgcacaactatgaacgatataattaacttaaagaaattataaaccagttttgtgccagttgcataccgtatcaaaagtctgatcggcatatacatactattcatattgagtaaacttacaaaaaaatattgaaattt

SEQ ID NO: 146494 - DNA, 820 bp, Cannabis sativa
  modified_base (26)..(36): a, c, t, g, unknown or other
attagaccgttcctattagggtaatnnnnnnnnnnncggttactaaacattcatgcatatcattctcattataagcgccactgcgcatactctacatgaatggaacagtcatagcattaaaagagaaatgatgtgcctcgaagtatagaaccgccaaaattctaagcatgcaacttttaaacaagataaatacagttatattcctaaacacatttaaaaattactttttaattaaaaagcactttttatggggtaattattatgcccaaaatttggctattcaccagaagctaacacgtgtactataaaaggaatatgaatcagcttaaagaatataataattaaattacatttaatttaaataactcgtttcaattaattaaagtaaataaaagtactcaaactcgctgattacataagcatatgcaagataagaataataactattaaccgatgtgattgacgagacaatacgcccatctcgagataaattgagtatttaattagagtgcacaagatgagacatcaaggagcttgtagctcattaacccacatacttggggagtaaaagcttgcaactcattgacccacatattagtgcatggaggaaataactgcattcatccatctcgccctttacgcgacagagtaactacctcacaaatatctttacgatatgaggaatactgtgaggagaagtatatctatacttagcatttttccctacgaagaaggataagaaggataactcacatttagtgagagataaccttcttagtcaacataattgtttaaggataaagacaaagagcagttgggt

SEQ ID NO: 146495 - DNA, 829 bp, Cannabis sativa
tcaactgttgctatggtatttttttactttgatgcttggctccgccaggcgttccacaggtaccactcccagtttttcaatctcactgtttgaagctaacttagctaggcactcagcatgagcgcttttctccctggggattctttccactttatagtccgtgaactcgtggagtagctcccggactattgctacatatgcggccatcttttcctcgcacgtttggtattctcccgacacctggtttactaccagttgcgaatcgctgtagacttctactctcttagcccccatagtttttgacaatctcagccctgttattagggcttcgtattcagcttcgttgttagaagctgagaattcaaaccgtagggctgcttggggtcgaagtccgttcagagatatcattgcgacccccgctccagatccgttctcgttggaggtgccatccacgaatactttccacgctgggaccagtggtgtgggtatgtttgcggtagcttcagcttcatggcactccgtgataaagtctgctaacacctacccttttatggaaatgcgcggaatgtagtgtaggtcaaattggcttagcttcattgcccatttgaggagtcttccagacgcctctggcttttgtaggacttgccggagcgggtggttggttaatactttgattgggtgagcttggaagtaaggtctcaactttctagaggccattaggaggcaaaaaaattagtttttcgatcaccggtatcgcgtctccgcccctatcatgcgcttgctgacatagtacacgggatgttgggttttttcctcttcccgtactagg

SEQ ID NO: 146496 - DNA, 513 bp, Cannabis sativa
tatttaattaaatctcttaaaaaatatcaaatatgtaagtgtcttgaacaaaatcaacttaaatattaattttctatttaattaaatacatatagaaaaatacgaaacgtttactcaaaaaaaaaaaaaaaccttctagatatttcgattttctaattaaaatataatatattttagtctatttattttaactaatcattaatgaaaattttacttgatttaagttgatctaaaatttagttataaattaattaatttcaactttaatctaattttcaaattgaaaaaaattcaaaatatctacatttaaaatagatgtatttcgaaattacatgaaaaaatgaccattaaaattaaataaaatatattctaaaaattattctaatttaagtgggagtatactcatttagtgcctagtgtttttatgaaaaacatatttggtaccctatgttttcaataatacttaattggtacctcatatttttaaattgtatatatttggtaccttaaaat

SEQ ID NO: 146497 - DNA, 852 bp, Cannabis sativa
ccatttccaacactatgcgggcggaagtggacttggccaggaaggatgccgatgaagcaagggttcaacttggggctgtctggatggagctgggagaggtcaataagaagcttcttactgctgagaagaaggtggccgaactgaccaaagaactacaagccaccaatcagcttgaaactgccattgcttccttatctaaggtagtgaccagccttcaagaaaaaagggaggttttgcgggctatcctccgcaggttggaagaaaagaagaagaccaaggaggaggaacttaaagctgaggtcgagaagtataaatcagaggtcgggcagcagagatccgaagtggagaggctctgagggaaagtgaatgctctagagacagctggtctcgagattttctatgacttctagaaggccaatccctaggcaaactttgattacttgggcgacaccaaagacatgtttctcgagtactatgttgcttaggcggcctacggggaatttgaggcgaccactttcacctctccaatcgatccaactatacaagtgccccccgctcagacaaacgatcctccagctccagctgacccagttgacctgtacaaagagcctgggactccaaccgtttgaatgcttattttttctatctgttcggccataaggcctttttttaagacaaagtgaccgaccaagcggtctttaaacttggaatttatcttttatttttgacacaactagctgaccgagcagcctttaatcccgagtttgcatgattttgttatctttaatgaatttcattctctttttataatcatcgtgcaactatgtgtgttttatttttaccaaatgcttt

SEQ ID NO: 146498 - DNA, 656 bp, Cannabis sativa
gctaaaaatagcctaacagagaatctacaaaaataattgataaaattgaataaaactcactacataattataaacgaaaagaaatgtgagaatataatacctcaaaatagagatctccaaaaataactgataaaaataaataaaactcatcatataattgtaaatggaaaaaactatgagaatatagtaccaaaatttttaaaattgtaggcaacaaatttagactatatatattgatattttcttaattgatttttatatagatattttaggttttttattattttttaaattcttaaattacacgattaataagctttgatttaagatacaattaaatttagtgttagttttaatagttttgatttaaaattgtatataaatattttttttattaattttaatttagagaattagtccatactatgttgagtgatttttaattgtatatagatatataaatagatagattttttaatttttaatatttttgaaacttagtttagatatttataaagttttttaaagaaaattactatatataattattttattattaattttaattgagagaattagataagactatgttgagtgatttttaattgtatatagatatatagatagatatattttttaattcttaatttttttaa

SEQ ID NO: 146499 - DNA, 607 bp, Cannabis sativa
  modified_base (288)..(290): a, c, t, g, unknown or other
  modified_base (555)..(566): a, c, t, g, unknown or other
gcctcctacgcgcgcgcaagtggagaattgcagggaggacgtgcgggaatcctcggcaggcgcagcatgagacacgggcggatgcaggctgcatcgtgtccaaaggcttgcgtgcgtgcgcttcaaatgcagaatttttcccctgtcacgggcgaggaagccgaattgtacgagtgtctggtgaactggatgcaccaactcaacccgaaacttccaaaattcataacctttttaatttttatcggaatcgagttccgtaaaaagaaaaattgcttaatttttcacaannnatccaaataaaatattttcaaaaagaaaaaaaaaatattttcatggaaaaaattcataaatacatacattcattatataatcacataaaccatcatcaaatcatccaaatcaacacaaaacattgctttaattcatatttcatgaaagtaaatcattaacctggctttgaggccagttgttgaaattattttaccaggatctagatttactaccaattatgttgtttagcatcctaatacgaatttctaaaacaatgtaaataannnnnnnnnnnnttaaagaaaccttacattgattgcaggagaatataatgaat

SEQ ID NO: 146500 - DNA, 533 bp, Cannabis sativa
  modified_base (466)..(476): a, c, t, g, unknown or other
taccttatggcctaaagacttagtgaatattgtgaattgcttgatccacgtgtccctgtctgattggtccacatatattgtgcaaaattaggggcaacagctgctattttatttcttgattgtcgtttcagcttggagtatgttccaactgatttgtcactttgatcagtaacagaagtttctagttagtaacatttcttctgttaaaaaaaaaaaggttaggatgagccctccacatgaacaatgtgagaatcacacatacacgtttatatttttttatcttattaagtgaggattattattatcggtagatactttataatggttagcgattttttataataattattaaattaaaaatatatgatacttgattactagaatataacatcttcttattagagttagtcccacattgctaatgtgtagaattaaattgtggtatataagatgaatgagctactcnnnnnnnnnnnaattggttttgagatagaaccttattcatcttctcctcaaattctaacatggtatca

SEQ ID NO: 146501 - DNA, 676 bp, Cannabis sativa
ttatattgataactaatcagactgtaaagggttttatttagggcacaaaacccaacacagggaatggaaattggaatagaaatgcaaatgcaaatggaaatgggaatgggaatgggctagggaatgggaatgggaatgggctggggaataggattgggggggtttggggttttggggttttggcatttggggttttgtggtttgggaattggaatgggaatgggctagggaatggaaatgggaatggcaatggcaatgggaataggaatgggaatgggccggggaatgggaatgagtgggaatggaattgggaatgggaatgggaatgagtgggaatggaattgggaatgggaatgggaatgagattaatgggaatgggccagggaaaagaaatgggagtgggaatgggaacatgaatgggaatgggcttgggaatgggaatgtgattgcgaatggaaatgggaatgggctggggaatgggaatggatcagggaatgggaatcggaatgcgaatgggaatgggaatgggccagggaatgggaatgggtatgggaaaggggatgggaatgggaatgagagcgggaatgtgaataggaatgtgaatgggaatgggaatgggaatgcgaatggaaatgggaatgggccgaggaatgggaatgagaatgagaataggaat

SEQ ID NO: 146502 - DNA, 1245 bp, Cannabis sativa
accagggcaacgaaacaaggactgggacccaagacccgaccccagacccggacttgaaactaggaccaagctcgtgatccaacacccgaattggaaccagaccaggactcgagatcggtgtcttgatctaggagccagcccagacctcgacccagaccaggtccggaacccagacccgaactcaaacccagtcccagcacaaacctagacccgaacgcgtaccatgcaacccaatattagaactcaaactagaagtagactaggactcgagaatgggaccagaactagaactttgacctggacctgaaaccgtaaccagacctgcatgtagacccggaaccgtaatcggaccaagaccacgactctaacccagacctagactcgaacttggactgggacccagatcccaacctagacctagacccagtgtcgaacctggactcgaactcaggcccaaacatggaaccagattcgtggcacagaattcaggtcgagacctagaaccgcacctcaatctcggtcccgaacccaaactcggacctgggacttgggacttgaaccagaactagaccaggacacgtgacatggatccagatttgggactcaaaccaggacccaaacccagaccctgaccaaaactcaggacccgaaattggaacctgaataagaatcgcaagactaggcctctggaacaagacaaggactgtgaccaggacccggacccaaacctagaaccgaactcaaacctagccctagacccaaaccgagagcggaacttgggcccatacacggtcgtgtacccagaccgagatcgagacccggacccgaactcgaactcggactcggacccgaacctggacccagatctgaacctggacctaggacgcgatcccaaacccagactcagacctagatagggatccagatacgaacctggactcgaaccgagacttggacccaaaccgggatcactcggacctagatccggactgagaccctgcctatacctagacctagacccgcacctgagacccgagctcggacctagacctgaatctagacccaaacaaggatctagacctggatccaaacccgaaccaaaagtgggacaaggactcaaacccaaacccgaacaagacactaaatcgaaatcgatattgggactaggacccaaacccgaacatggacccagcccaagacctacgacccggacctggatgagggacctggacttgggccttggaa

SEQ ID NO: 146503 - DNA, 607 bp, Cannabis sativa
tttaatcaagttctccctttcctaattttaataatgtaagtaaacaaatgtaagagaacgattatcttaccattgattcccattacttattagtaaacatatcacaaaattcgaaaaccccaaaccccaaaccacaaacaccaaacccctattctcattcccattccctggcccattcccatttccattcccattcccattccaattcccattgccatccccattccctttcccattctctggctcattcccaatactatttccattcttattcctattcccacttccattcccaatccccattcctattcccattccccgaaccccaaaatcccccaaacgcaaaacttcgaagaaccccaaaccacgaacaccaaacccctattcccattccctggcccattcccattctcattcattcccattcccatccccattccgattcccattcccattccaattctcattcctattcccattcctattcccattcccatttcctcgcccattccaatttcttagcatggttactatacattttttttacttacattattaaaataaggaaagggataacttgattaaaccctgatccctgaccccaaac

SEQ ID NO: 146504 - DNA, 591 bp, Cannabis sativa
agtctttatcaatttcatctctttccttgcttcctcttttcgtacaaacacttgagctctttcattgaactcgctgatgttttttacagggagaccctgtaagtcaccccacagctcacctccagccgtcgagagatcattcgtaatccctgcttgaagagcaataagctgtatattgtcgttcaagtttctaactctagcagctgctgtactaaatcgactcatgtatgccttgagtgactcacctagcttctactttacgttagtgagggaagacgcttcaagtcgcctatcccttgccgcctgaaattgtttcttgaaatctttagataaatattcccatgaggtaattgagtgatgggtgaatttattgaaccagctgctcgctgccccaatcaacgaggtggggaactaaatacaatgtaagttattcgtgacattgctggcttgcattattgtattaaagttgttaaggtgagcaaccggatctgtaatatcccgaaaaatatattgatattttaatcggacatattttattaaatatgtgattatgggttattagagtaggattataatcctacttaagctaat

SEQ ID NO: 146505 - DNA, 557 bp, Cannabis sativa
cttcaagcatagcatcgagcttctacttcttctcctagaatttggcaagagcctcctcaggcttgggatagaagtcgagcttgatgctttggccatttgactgccaggccatataaacattgtcgtcgaagcgcttgacgcagtgcttgcaggagacgggggtcaggagctcatctcttttagccttcttcaaggcctggtctctaaagtccttcagctccttgaactccacagctaggttggccttggattgcaagtccgtctggtgcaactcctctatggacttcaccttggcagccatttcgtccatggcctccctagcctcccgaagctcacgcctagcctgggcgatagcctcaccctccgccttcagcgcctcccgatgcctcgcctccagctcagcctccctctgcctgacctcctctcggagctttgcctccgcctgggcttccctctgcttagcctcctcctcgagcttcaccttgacgagggcctcctttcgatcagcctcctcctagatcgcccgcctttcagcagacaggtcccgcaggatcctc

SEQ ID NO: 146506 - DNA, 859 bp, Cannabis sativa
  modified_base (783)..(783): a, c, t, g, unknown or other
tggtctgaatacatcttcattcaccccctcaatttcctcttcgtcttctgaaagtgctaagggatcaatactgagatcctcctctggtaccagcgaccccttcgatttcacatttaagagttgtttcgttttccttgctgatgatttttgtctcccccgtcctcttcctcgcgattttgccatggcttcagctctcagagctgttcacgagagagagaaaaaagaaaactataataatatatagtttaaacaaatgtattttaaatggtaccactaaaacaaaatataaaaatatactttatttgagtaataaaaaatttgaaggaaaatattaaaattaatacaacttagttacaataataaagtataagtatttataaataaaaaaaataagaaaaatctagctttaattaaaaaaataatgttaatgtattattcatataaatttataactgtaactattgtggaattaaatattaaaattatataacttaatttagatataaatataaaatttattatcgtaggctatttatttaaaattaaaattatgttcagttaaattattcatatattttaatactgttatatttttaaattctgtaccaatcatagattcaattttttaaattcaaaaactgtttacagacactgaaccaatcacattttcagattcgtatttccaatcacaaaattcaaattttcattttagaataccaaattttgaaaacacagttttctaatcacgaaccagtcagccccttagtgattagagtagtgccnacacacaacaagtgatacctcaataatagtgaggaagatcgtgaagaaagactttcagcaccaaagaatcagagaa

SEQ ID NO: 146507 - DNA, 658 bp, Cannabis sativa
  modified_base (591)..(599): a, c, t, g, unknown or other
cactaagttattatagagttttgcagctctaaatttcccaaacataccaacagcagcaatatcctctctacaaaaggtttggcgaagtctacaaagcttcctccaataccagcttgtatcttgtcttaaagtgtaattccaaaagtcagcgtcctttaagtaaatagagttgacccatttcacccataacaagtcatgcttctccattatggcccaaatgtactttgccagaaccgacttgttccattgagctccatctctaaaaccaatccctccaaacactttggggagataaactttttcccaagagaccaagtgcactttacttctattccctttagtaccccaaagaaaacctctacacagtttctcaacctctttaacaacactttgaggaagcacaaatatactcatccaatagttccttaaccctagaaggactgaatgaataagttgaacccgaccaacaaaagaaaggtgcctcgttgcccaggtatgaaacttgagttttatctttttcaagataacatcacagtcttcaagaataagaataataacaccaatttttgattttttattaattagtaaatnnnnnnnnnttaaaatgagttttatttaaggtaaaaaaaaaaacaacatatatatatatatatatgca

SEQ ID NO: 146508 - DNA, 584 bp, Cannabis sativa
attttatcatcaaatttttaactaaaaggacattttgttaatttttttaaaaaatggacatttattaacttaattgttagatttagggccattttgcatcttggccctttattattttatatttattaagtgatgagccctaattttttattttggatgtaaaaattcaataaaaatcgtattttgttttaagcttgatgctttttttttcatatgtatatatggaatacttcttaatgggtattacccattaatgggtaataaacaaatttaacaataaatattaatttaatttaaaaatattaaaccatcagattttagtccaatagcgaatagagaaatttaaatttttatgcttaatttagctatttaattaaaaaaatatcaaaaaatacatatttctacactatatcaaaaatatatttatataataaaatatttaagtcaaattcaacttttttataacttttttgccaaaaaacgttttctttattattttttttttcagctgatggaccaatctcagcccatatactgtaaaaatgagatatttttctaattaaataaaaaattaattataaaaa

SEQ ID NO: 146509 - DNA, 1026 bp, Cannabis sativa
  modified_base (102)..(118): a, c, t, g, unknown or other
  modified_base (495)..(499): a, c, t, g, unknown or other
ggtaaaagttacttttaccagcgcagtagtaaaagtgatattttttgtagtaactcctcccattgctaattagttttgagatggaacctcattcatcttgtnnnnnnnnnnnnnnnnngtatcagagccacttgtgatccgtagtgagcccaaagtgccaccagtccaaaaagccatttgtgatctattgtgagccaaagtgttgtcggtccaaacagatactttcgctgtctcccgttaacctccatttgggacctttcggccaagccaatttctagtgttgggacatttgacctgtttcaaaaattcataaatttcccgacgtgtacacccataattttcccaaatttttggctttgtgggattcttttaaatgtcacattcggtcctgtggtctcttaaaagtcgttcgttatacccacactttctaggcccaaatgtgaggagagtgtattaagagttagtcccacattactaatgtgtggaaataaattnnnnnatataagatgaatgggctactcatcccattgccaattagttttgagatggaacctcattcatcttatccccaaattctaacattattaagagtcactacaaaaaatgtcacttttaccagcacagttcgctattgcgctggtaaaagtaacttttacttgcgcattttgtaaactgcgctggcaaaaaggtcaaagttttaccaacgtacatttacagtgactaaaatctaacccttaccagtgcatttacgcgctggaaaaagtcatttttgctagcgctttttattttgtgctagtaaaagttctaataccaacgttaatttgccaaccccttttgccaacacatcagaagtaaattccattttaccagcgcaataccaaacttttgctagcacaaaaatgtgctaataaaagtgacatttctggtactgtaataaggttgtgcaaattgttgcgtaggtaagatctcgacaaattgtcgagtctgcagacgaaccaaagtagtactcaactgttgttgttgact

SEQ ID NO: 146510 - DNA, 633 bp, Cannabis sativa
  modified_base (581)..(603): a, c, t, g, unknown or other
ataatttaccaaacactcagctcaccttttttccacagctttgctacagctgcttttccttacagtacagctaactgctttttctcacagcacagccgtgccaaactggccctaaatttaaaaagcaagtaagagtttaatagcttgtttggttgtgttttcagttttaagtttttagaattgtatttttaaaagtgaaaatagaaaataattttttgtcattttaaaaatttaatggcgtttggcacaagttttttaaaactatttttaattttttttcttactaaaaaaattaatattttaacaccataccataatatgaacccatttgggtccgagtttaggatctatgtgagcaaaaatataaaatataatatcttagataaaaaaaattgtttttgaaaattgaaaaaaacattatgatgttttctgttttttaattttttaaaatgtttttaaaaaattgtgctagacaaccactattagtttttaaaaactgttttctatttttaaaaagtgaaaacagtttttaagttaggaagtcaaacaatcctttattttggaaaatttacatggtatannnnnnnnnnnnnnnnnnnnnnnaaaatactgccaggcggtattttttacttt

SEQ ID NO: 146511 - DNA, 521 bp, Cannabis sativa
taccccccgtaatttgggggttcaacctcttcctctccctcagcagcaggagggctgcccgacgcgcctcgtccagcttctcaatctcttggacttcagcgtccctctcacggtcctcctccattgggactgccgagtcgtattcggcgtcgggcagagtggcgagccgagccacctggggatcaaaagcgtcagccagatgcgtagttttcttcgtacgagccatcatcctatggttaggtacggaaacaaaagaatctccttctctagaaggagagttgggacgaagacgagggtggacttcatgcagaagttgaagcagctcctggtcaatttaatcctcggactcccaagactcacttgtgttcatctaaaaaagaaaacacacaagatgagtgttggacggagtatcaaacgaaaaacacgcgaatatgccgactaggagtacccaacagattaaagaacgaccatgttcaaagaaaagtctaaacccaagaagtcaaaaagtttttcttgagtta

SEQ ID NO: 146512 - DNA, 801 bp, Cannabis sativa
aaccagctaacctcgtggggagaaggcatatcccacttctgggaggcatagaggacgaagagggcggacagatacttaatgcccttaagagtaaactaggtcagacagaggcggaagaagtctgccacattcctggagtacggatgcaaagacaacaacaccccttgctaggcatgagcacccgactataggtacacattcccttttcagggtttgtggctcagttatggtgggcgggaatgtaacaatacaattcgcccaggtagccatcttggtcgagatcccgcaggcgcgcctcagtaacctttgatggaggactcacccatctggcaaccaaggtactttgccttctatgaggaaccacaacagtaagttcctctttggcgtagtccacgccctcaaccaggatgttaccatcaggatcgactggctccccagcctcattgtatccctcatagtttgggggtgcaacctcctccttttcctccgcctcggagggactgctaggatggacatcgtcctactcttcaatctcctagacctcagcgtccctttcatgatcttccccctcctgggcggctggatcttgttcggcgctaggcaaagttgcgtgccgagaaacttgagggtcagatgcgtcaaccctacacattgtctttttgatacgagccacattctctggctgtacaaaagatttaacgaagaatgcctttcactcgaagaaggtgggctagaacagagacgaggatgatcctcgtggaagagttgaagcaagtactggtcgatttggtgttcgcttcc

SEQ ID NO: 146513 - DNA, 524 bp, Cannabis sativa
  modified_base (135)..(144): a, c, t, g, unknown or other
aaaatacttatcataagagatcgttacggtgttaaatacttcaacgaataaccatccataaggggaacaaagtctagcgtctcgaggttatattgataatatttaacctagtaggaccaacaatggagatcgaannnnnnnnnnactaaagctcattatttttaaggagttgtattttcattctaatattaatttttatctatttattttaaatatatatttatttaaataaaatttccaatttatcataaaattctaaatataaatttttatttaatatctattaatttatacttaatttgatctgaaactaaattaaattattttccatcttagtaataattttcaataaatatttcaaaaattattcaatttaagttgatccaaaattaattatttttaactcaaatttaattttctataaatacatatagcaaaatctgaaatccaatgtatttaaaaataaatacattttcgagattgcataaaataaaataaaataaatccttgaaaaattattctaa

SEQ ID NO: 146514 - DNA, 648 bp, Cannabis sativa
tgatcgtgttatgaggagtagtgatgttactccagatgtaatcatgtaatcactatggattgcaattaataaagatgatgattttatttcaaaaaaattatgataaatatgactctaaattatattaaatttaacctaagatataatattgtataaaatttaacatacaataagtattatattttaatcttcaataatattcctaattagtatgatttattgacttttaataaactttatactttatcatattactattatttaaataataaaagaataaaaattaataatttttatatattctcaataaaatattaaattatcattaatataattatttttttattatacatcttgtgtattggagcacaatctatatatctatatatatatataaaaggaaagtatgaggggtctaaaaatactttaaagtactcattattttttctttattttttctacttttttattaagcactccttttatttttttttctattttttctacttttttattaacttttttaatattgattattatatagttaacaatctatctatcgatcgatctatctatctatctatttatctatatatctatgtaacacttcttaatgggtaatattgggcactaaaaaaaattaataag

SEQ ID NO: 146515 - DNA, 941 bp, Cannabis sativa
  modified_base (175)..(178): a, c, t, g, unknown or other
tagggcataaaacccaacatagctatgattaaaatagtcacaatatattaaagttgtggaatctttaatcaatggttgctagtacggttcactgatgccctttctatggtgcaagtaatctttgtttagattactgatataatgggacatctaagtgaaggtgttgtatataatnnnnattatatatgacaaggatcgatatgaatgaagctatctttgttaacatgttgtttatcataaagacctaattcatatcataacgatgagaaatagtagatcggcctagatcttcagttatcatggactctggttcatgttattagtttttttgattcactcgttaaagtttctcaaagaagatgattcttacaattttgttttgggaatctaataatatgattgactgggaacatgatgtacaattatagaatcctaactttcctaacggatcgaatgttggttccctttaagtgctaattctggaactgaaatattgtgcgcaaattcagatgggattttgaattatacttccaccagtgaattaatggtactaaaggataaaaaagtaattataaaggtaaaacaatatttttaccaaaactaattatgaaccagcacatggagggctaatcactgtagttgattatataaatagacactacagttaaactcagtaaatataattttataattactaagagttcaattccatatttattgtggagtaatcatggaattaataaatgatgaattatttggttgatgagactcaataaataatctagtttattagagcttagaatttatgtctatcgtccccgaattgccacatttaaacactatcaagggtaggaataaagatgttcgaaaaaatctattttgaattagaaaaataataattatttattttgtaataaaaaataattttttaaattaattaa

SEQ ID NO: 146516 - DNA, 555 bp, Cannabis sativa
ttctagagatcgtgagcatattggtaatttgatgctaaaagtgatgttggtgttttattggatattcattaaacagtagagcttatcgtgtttacaacagcagaactcaaactattttggaataagctaatgtggttgttgatgattttaaacattttttaaatttttccacagaagtcgagatagatagcttcatagttactccatcagaagcagcaaaagtagatattgatgcaacacaacccgtttctgccgacgcaaacgacgaacctgccactgcaactgatacaggagaaccaaaacaacctatctcgactcatccacacatcattagtgattctatccagaaggaaccaagcaccagagttaaactaaatcatcccaaagatctcattcttgtaaatcctgaagaaagcatggtaacccgaagaaggtatgttaatttgattagctttctttgttttgtctccaaatttggacctaaaaatgtgaaggaagccatggcttttgaagaatggctcaatgcaatgcaagaggaactcaaccaatttgttc

SEQ ID NO: 146517 - DNA, 711 bp, Cannabis sativa
  modified_base (64)..(74): a, c, t, g, unknown or other
  modified_base (574)..(581): a, c, t, g, unknown or other
ttcaaaacggagtttgtactgacagaactagagcaaaattacagttttacaaacattgagtacnnnnnnnnnnnaaaataaatattgggtttatgccacttacaaacttaaaattttggatatttatgccgctatttgctcaacaaaaaaataaaaaataaaataaacaatgacacataaggtagagtctttaaagaataactagtattttttgtatataaactttttacactattaaattgtattttttattagaaacaatttgttaataatactactcgaaatataatttaacagtattataattctttcattatattttatttaattttatcatgaaataagtaatgtagtagataataattggtgaatatatacaaattaaatatatatttttttttatctttttaataaatgattaaaaaacaaaaaataaaatatgaattattataaaaaaaaaaagtgtaaaaattgtgaataggttgggtattcatcaaaccgtttaaaccgtacaaagagcccgcatcgcataacattaagggaaattaccccatatattattttttaacttttnnnnnnnnttaaatttatggtttgagtttctaaaatggtttctccagtggtttccatgtgggttgttatacgattttttgttgcgatttaggttgcatcactagttgcaatagaggtttctatgtagaattccgtaaa

SEQ ID NO: 146518 - DNA, 606 bp, Cannabis sativa
taaattactaatgatagaaaaaaggaaatatgaaaatgtaattgttaggtattttttttgtttcatattagtagtaaacatccattttatagcattctattgaagaagctattattaaagtgacaggaatggaacacataatttgggatagtagtttttttcccatctatcaacaagtaaaacttagcataattcctatgatgatgaatagatgtattatattgtttgtttttttctttttaacttttgtaattcattacaatgtaatgcttattacaatattgagtattgtaatgatgattacataccaaaaccaatattaaaaccaatgtaattcccattataattacactccattacaaagaaaaaaaaataatattttaataaaaatacagtaaaaaaagtcaaaaagtgtagattactatttttcttaaatattttataattttataataaaagtaataaagttattttaatcaatacatattttaatttattatattcttatagcaaaccaaacacaataattctgattacaatgttcattacaactacaaaccaaacattataatcaatttatattaccattcttattctattacatta

SEQ ID NO: 146519 - DNA, 827 bp, Cannabis sativa
tctcaaaattttgtaggatatcttaaataactataatgtacacgaatataaaaaaattggactaaaaaattcttctggaggttgaaacaggtagagggtgcatcgcgtgcattgtagaaacaatcattttaattttattttaggtaaataccactttagattttgtgttttgtaaatatattaattggacattctattttgataaatgacaaattagatcttgtattttccagaatagttttaaataatatcctgaactgattttttgtcaaaataaaacttaataataaccagatctagaggtattatgacaaaactggttgcgtttgctatatttttttgtggtaggaattatcttcaagttggtcattttaaataaaatattatcgaaaattaggctcaaggttttattatcattttagaaaatacaagatctatttggttatttaacaaaataaaggatccaatcattaacttttacaaaatacatggtttaaaaatggtattaacccaaaagtgctcccaaaagtgaaagacttgttatggcgagctgctactaattgtttgcctacaaaaacaagactttgctctagacatgtgccgattgatgtcgtatgtcctgtgtgcaaagaaactgatgaaacaatctagcatagtctggttgattgctcttttgccaaggcatgttggcaacggtttgctgctggtgttaatctgacagcagttggttcttttgccaaatggtttgattcggtcctacagcaggtagatgaggaaaaacgaaggctagatgcaatgacgtgttgggcgatatggaggcatcgtaa

SEQ ID NO: 146520 - DNA, 535 bp, Cannabis sativa
  modified_base (35)..(41): a, c, t, g, unknown or other
gtaggatcaacaatgataccatcttgagaaattannnnnnncaagaatttgacttcagtcatccagaagccacacttttctttcttagcataaaattaatgatccctcaaggtctgtaacactattgacaagtgttcatcatgatcatcatgtgtcttagaatacaccaagatatcatcaatgaataccaccataaatttatccaagtaaggtctaaagactctgttcataagatacataaatgcagtaggtgcattctttaagccaaatagcatcaccaaaaactcaaagtgtccataacgtgtcctgaaagcaatcttagggatatcttcttctctaatcctcaattaatgatactctgtcctcaggtcaatctttgaaaagaactttgaaccaccaagttgatctaataattcatcaatccttggcagaggataattgtttttaattgtcatctgattcaactttctatagtcgacacaaagtcgcaaagttccatcatctttcttgacgaacaagactggagctccccatg

SEQ ID NO: 146521 - DNA, 639 bp, Cannabis sativa
gtaaataaaaataatatatggaataattcttcaataaaatataagatctaaataatttattttaacacttataaaataaaaaaaaaaaaaactttatttgaatattttcaaggcattaattttttttgaatttttcacattaattaatactaactgtcatgtcatgttgacctgcatagtagtactcttgccagctgtcacatttactattcgtatatattatatgtgtaaccaatctagccacgtgtccaacttttttcgaccaattaatttcatccttaatttgtacattaatgcttcatctttcctattaaatgtagagaaatataacaataataaactcatcacaacaagcatggaagtggttatgaagatggagataaaggagacgacaatggtgaagccagcaacagagactccacggcacgtgctatggacctctaatttggaccaaatggttccgaaatatattcacatcccaactattcatttttataagcccttatcatcagcgactgatgataagggcttttttgatcctgtcaaactgaaggatgccctaagtaaagtcttagtcccgttttatcctgtggccggtcgcttagtagattcctccaaccctaatggcgatcgtattga

SEQ ID NO: 146522 - DNA, 605 bp, Cannabis sativa
tcgacgtgaggatatctcacgttcttctcatcttcctctgagaatatgattggaggttccttagtttttaccttcttggaaggttctagggcaaataccaaccactcattctttatctctttcacatatctcttttggcattgttgctctcccctacgatatgcggccctcccaaaatgaccaggatgtgctctccttcaacaggaggaggttgtaacccctgattgtttgtgttgttgggcagactgggctggttgtgtctattgccctgtctcttcatatactgcttgaaatggcccgagcgatgagactttctatctcatctttcaactgacatcatttttcgattgtgtgtcgaatatccttatgttatttgcaatacatgctaggatctctttcgtgcctcgcatgcctcatgtgctcaggcttgccgaaggcaaccttcttctcatgtgcgaggtaaatattttcctgagtttcattaagattggtataaatagtatccactggcacgtacttatcatgattcttttgtttctttttgtcctttgacgattccttaaaatcatcctttctttttgagccagaggcgcctgagttatcaa

SEQ ID NO: 146523 - DNA, 503 bp, Cannabis sativa
tcagcctgttgtccgaaaaatgaaaaagaattccaagttaaagactgcttggccggtcatgatgtcttagaaaaggccttgttgccgaataagatatatataaaaataataataaaaagttaaaaggagaaatgtttaaacagctggagtcccaggctcttggttcggttcttctgggccactaggagctggacgatctgttgtttgaacaggatgtacatcagcagtcttgccggaggtagaagcagccgcctcagtttcaccataggccacttgggaagcgcagaactcaagttacatgtccttagcatcacccaagtagtcaaagttggcctaaggattagccttccaaaagtcaaagaagagcccaagaccgactgtctctagagcattaaccttctccttcagccttgccacctcggccgaaagctcctcctccttagacttcttctcctcctccacccgatgaagaactgctcgaagagaattcctctcatcctgaa

SEQ ID NO: 146524 - DNA, 800 bp, Cannabis sativa
  modified_base (775)..(775): a, c, t, g, unknown or other
ttatttttggctattaataagacagccacttggattctgctcttttaattttatatataatgatagaattttggtttttcatgtgctttctagtccttcctatctttctctctgtcttattttatacatattaaaacaaacaaaaatgaaacgggtaaatcatgacatgataatgcttttgaagattttaaaaaggttttaaggagaatatggtggaactttcaaaaattaattaaataaatatatatatttttttttcggttaaaccctctcaattgtcatctaagctcttgtatttatttgctactaaactattagcaaatttaaagtgtcattcggttaactgtcactatgagctgtttatatagatactcttgtacacataatacgtttataatggtgcaactaatattgttatttgaaaattatttttaaaattaaataaaattataaaatataaaaataaaatatttaaaaaaatatatattataaattttgaaataatttttatatttttaaaataacaatattaggtgtaccaatataaatttgacgcatgtacaaaagtgtacacataagtagtctatattgacaattaattgtaaaaaatagatgacgccttaaatttgcaagcagttcagtaatttgtagggttttaccgccaaaatttgagcttagagggttaagtgcaagtggagtgatagttgagaaggtttagctacaaggaactcttaaataaataaagtttgtttttgttggagattattttaccagnatctagatttactatcatgtatgtt

SEQ ID NO: 146525 - DNA, 511 bp, Cannabis sativa
tcatctactttatattattttataacagatatatttgtttttctattatgtagttaggactgaacattttaacctgcctgaacccgaatcgatgaacccgcaaaattttcttttgaaaaagtttcaggcgggtcgggttcaatctggtatccttcagacggattcgcggattgaaattttaagggtatcgaattttgggttgaacacgagaacccgcccgccaacccggcatataaatttattatatatattttgattacaatttttatatatatataaatattttaaattattaattaaacaaataaaaaaccctaaatctgtaacatttcacagtagccctaaattcagactccatagtcgacgactccagacctcacctcacgaaggatcagccacaacccacgcgacggccgacgacgacccaggggagggattgattgccgaagtcctccattgaaaccatttcaaggtttgtgtctcataacttgcagaaaatggactcaatatt

SEQ ID NO: 146526 - DNA, 946 bp, Cannabis sativa
  modified_base (538)..(544): a, c, t, g, unknown or other
  modified_base (867)..(887): a, c, t, g, unknown or other
ggtaaacaaaatgtttaaagactttatcagacaaaatatggaagtgtacatggatgacatgctcgtcaaatccaggaaggctgggggcacatagacaacatagatgaatgcttcaaagtcctcagaaaatacaatatgaaactaaatccctcaaagtgttcctttggagtcagctcgggaaagtttctaggcttcatcgtcaatgccggagggaattgaagccaatccagagaagattcaagccctccttccaaggaagtgcaaagtttgacatgtcggatcgctgcactcagcaggttttttttttcaaaatcaatagataagtttgtcccattcttcaatatcctacagggaaacaagtggacataggaatgtgaaaaagctttccaagagagaaaggcacaacttgcaaaacctctcgtactctcaaaacctctagacggagaagaacttggaatatacctagctgtcacgaaatatgtcgtaacttccgtgctaatcagagaagagaaaagcatacaacacccagtctattacnnnnnnnaaagactcattgaggccgaaggcggatacccttgatagataaactcgcttactgccttattctagcaaccagaaatttaaggccttattttcaagctcatctatttcgggtgtacactgaccaaccattacgccaaatactgcaaaagctagatgcctctggacaggtactcaagtaggcgatggagttgggccattacgaaattactttccaaccccgaacaacaattaaaggccaagccttagcagactttgtggtagaatgcacaggcaagaaagaaagcataccagtaagcaatcccgagccggtacaaacacctcagnnnnnnnnnnnnnnnnnnnnnccgacctgtaaactacatgtagatgggtcggctacagatcagctatctggtgcaggaat

SEQ ID NO: 146527 - DNA, 583 bp, Cannabis sativa
  modified_base (136)..(145): a, c, t, g, unknown or other
  modified_base (454)..(459): a, c, t, g, unknown or other
ccccccctatcagttcgcaagatccttaaatttttacccaattggctttgagccaatgctagaaattcctaaaactttcaaatattttagatttcttatgcataaggtaaatatgaccatatctagagtaatcgtnnnnnnnnnngacaaagtactcataaccacctcgagctttaacattcagtggtccacaaagatctgaatgcactatgcctagtggttccttggcacgctctccctttgcagagaaagaacgttttgtcattttgccttataggtaagattcacggactggtaattcacctaaggtgacatttttcattggaccacctttggttaacctgtgaagtctatcatagcctatatgaccaagacataagtgctatagatatgtttcatctttactatcgatcttttgctttttgtagtttctaggtttagctactttaagcannnnnntattaagcgcaaatggttcatctagtcttagaacataaagcccctgttccatagatgccacacaatttcaatgtcatttcgagaaatgatagaactagaactcgaaaaatctaatttgtattgt

SEQ ID NO: 146528 - DNA, 584 bp, Cannabis sativa
cttttaatatataaagatattagatcaaatttacgtgcaatgcaaattttatacatcatgatataaagaatagtgctaagcactctatatcttactattataaaagtgtcataatagtgtgataattgtaatgacaattttctcctttgtaaaatcaaataaaatgtgataaaaagacaattttgccatttgaaaagtcaaaatatactcatatctctctttctctctctctaattaaacaagtactctctttaatatttatataagcttaggttaatttgtttaaacactccatattattcttctaatatatctttatatattaaaagtgccgggcattttttggtttaacagaatataatttacaaataaaagaatattctgctaaatttaacctatccaccatttttttaaacgttcgttaaccatccccttcttcacgcaattcttttcaaatggccctaaacctggattgattgccttgtttgttctgggtaacctggattggcttccctggtggtattgagttcatttgggcctggcaaaaatttaggcattctgattgactcctccttctttcgatt

SEQ ID NO: 146529 - DNA, 768 bp, Cannabis sativa
  modified_base (144)..(144): a, c, t, g, unknown or other
aactacaatccttgtgagatcgacctcactcttggtgagtttactacttgtcacgatacgtgcacttgcgtgtgtaaaatatcacaacaaattttttgcgctgttgttggggattgatggttaatattattaaaaattaaattntgttctaatttggttttttttttccaattatagtactaattctgtttgttctaaaatcttatcttttttcaagttcaaatagtttatgagaaagcaaggtgcaactgtcagattacctgttgatcctgaaatagagtaaacttgtaaaaagaacaaaagaaggaagaaattggaaagcgctgcaatagagactgaacaagaagtagtcatggttgacaacgctaataatggtaataatggaggagatgtagaagacaaggctaatggtcacaacaacaatgaccgtagcctgagggactatttgcttcctaacttgacaggggctagatcttgtataagaccacctgccatcgatgccaacaattttgaaatcaatcaagccatactgcagatggtccaatcttcagtccagtttgggggtctgccatcagaagacccaaacatgcacctcgccaacttcgaagagctttgccagacattcaaggtgaatggagttagcaatgacgccttcaggttaaggctgttcccattttcactaagggagcgagccaagagttggttggtatctttgccatccaattctatcaacacttgggatgaattagccctgaaattcctttccaa

SEQ ID NO: 146530 - DNA, 783 bp, Cannabis sativa
  modified_base (755)..(757): a, c, t, g, unknown or other
ttactgaaatatcatttataagaagctaagtattttaaggataaaatacattgaagggtggaatagtacattttttcctacttaatgtaaatcatgtatagaggatctttaattatttagattaaaataataaaaaattcatagtgtatctattctcggtgaatagagcgttctatgtaatcaagagtgcaattttgaatctataatagagtcaggagaaattaataagatagagaatttactcggtaaattctacaactacttattgggagcttaattatataggcccatggtccccacactacttgagataatattatcttgtagacttaattaattgatttatttaatcaattaggattctaaataatgactatgtcttacttatgagtttcactaagcaatgacaattttgagaagaaaaagaagttttaaggtttgtttattaattaagagataataaaaagtctaattaataaataagcttaatagaaatatcattttataactaattataattattaaatagataaaattgacatttataaagttagaataaaaaatggtaatttagaaaggaaagataagtttcaataaaatgccaaaattgaaactaatgggcccatataaggatttcagccaacaaggggtttaataaagccattttttatcttttttttttattctattttgaattctaaatctaaccctaaagttacaatataaataaaatatgatgttgggttttatgcccnnnataaaactctttacaatctgattagt

SEQ ID NO: 146531 - DNA, 1150 bp, Cannabis sativa
  modified_base (148)..(149): a, c, t, g, unknown or other
tttccactgctcatattttcctttaataatattcaagtagttggtaatctactatatgcacgagcagttgttatctgctatgcttttgatttgcgagcacttatcaattctgcctcccaataacagttataatctgtttcaagcaaanntgaatatacttttaatgatttatcactttgtatatttttgattgcttatataaatagttaggtcgtctattcatatattaggtttaagtatattttcaaggcaccttggtgtctcatttaatacattcatatacaatgtgagtcgttagttcagcttcacatttagcttatgcgttattctcatttataacttttaacttttctttctcgtcaaatagctgttttaatcaaaaagtcattcataattgtttgatcttcctttctcgtaagaaaggtttgatcaacaaaaactttaaaattttttgaaaatttttaaagtgatgggttttcactatatcatatatttccaaataaatatatgcccctcaagtaatttaaagagtaacactttgtaattacttgaaaaaatgattagctttgttaatagctcatattcaaaatattacatcaaaaatgtgagttacaacatcaattactggtagtagggtcgcaaatgttccacgttccaatagttctttatcagcgagccattcggctgagccaatttgtaagccctggttcctactatcgcttcaatcacataaggaccctcccaatttcagttgaatactcctacagatgcatttctagtatttgccaatactcgccttagcaccaagtctccaacatttaatagcctcttcttcacccttttgttgaagtatctcgttactcgttgttgatacgctgcattagtaatttgcaactcagtacatttttcatcaagtagatccaaggacaactttaagagttcttggttttcttcttgattataaaactctcgtctatgaatcgagatatttacttccacatgtaacattgcctccaagccaaatgatagtgagaatggagtatgtccccgttgctctcttctcagttgttctatgagcccaaagtacttgaggtagttcgtcgacccatctacctttggcagtgtctaatttcttcttgatagtatcctt

SEQ ID NO: 146532 - DNA, 658 bp, Cannabis sativa
  modified_base (466)..(496): a, c, t, g, unknown or other
atcaatttgacatgtgtgagcctatatgtttgcttttgggcgtcgatgtatataggaagcccatttatttctagatacttaaatggactaggttgctaatatataacatcacaaatgatagtttatttaggctcaattagtattgggcttattcaatgaataacaattatttaaggctaattaagatttttaccccccaaactttgacatgtaccaaactatgccccctaaacctttaaggtcattaaaaatgccccctgaactattcagattgtaggattaaaggacttttgtccaatttttgtaaaaaacagtctaacatggataaaagttcacgggacatgatttagtacatgtcaaagttcgagggacgtgatttggtagatatcaaagtctaggtagcataatttagtacataaacaatcactaaaatagtaaaactaaatgaaattagacaaaagtcctnnnnnnnnnnnnnnnnnnnnnnnnnnnnnnnatttttaacggccaaaaaagttcatggggcatgatttggcacatcttaaagtttaaggggaaaaatcctaattagccataatttaatttaagattaaatttctctcctttggctcttgtgtgagagttaggggtcattagtaatgggtacgacatactgaac

SEQ ID NO: 146533 - DNA, 830 bp, Cannabis sativa
agggattgagttggtgactcatgatgcgttaagctgaattcgctaagtgttgatcattctgcacggctcgttgaatattccatactggatgtgtcagcgaggcatcctgctcaacatattgttccgaacaggtgctccaagtagagtccacgtgtcaccattctcgtgatgccacgtcagagtgccgaatttgggataacatggaagaaggcacttgggaattggagtctgacatgaagactcaacatccaaagctgttcaggttaggtttcgaggacgaaatccttttaatgggggataattctaaagaccgcttaagatcaatattttggattattgaataattagggttaattataatgttgagttattaattatgatttacatgtttgtggagatttatttaaattcgaaatgtattaattatgctatatatgtgaatttctcgttttttgtgattgtgctcggtagcggtggaaagtgacgctgagctattagagagtcacgttttgcttgtgttatagaattttattagtagcggggagtcattgataggttatggagttattggaatttaacggtgtttggaaatgaccaaactaccattgagttgtttaaatctttagcttaaattaaaagggcaaataggtctttttccttagtcatctttttggattttagtagactctagaagctgttttcttttattaggattagtattaatcaattaaaaaaaagaaagaaagaatagttagaaaaacctagaaagcaacatatcactctctacatctctctctctctctctctctctatctctcgctctctctctc

SEQ ID NO: 146534 - DNA, 805 bp, Cannabis sativa
taatgtaaggcttaggtgaaggtggttaagagaagtcatttttggctcaaatcaacctaaaagcaccttaattttcctaagaccaaaatgagacttcacacatcctcaaataatatcccccaaaaaatttgagtattaatattgacattatttattgccctaaaaattttcaaaataatgtgcttccaagagttatagcaatgctttagcatagcattttttttgcgtctttgctcaagaatgctgaagtaatactataacaccttggacttccagcttttaaaaaaaaatctcgctctgttttttacaaggggtggcacaccccaaacttaatttaaaacactcatttttttttctaggggtggcacaccccaaatttaattttgacactctttctttgttttttttttttttgataactaacaatataaatataataatggcaatgcacacaaaaatatggtaactctctcccaacttaaaattcaacattgtccccaatggtgagaataataaaatagcacaatgaaaacactcactcaattaccattcaaccaaaattacactcctcacatccccttcatgacacaacaaacaaatatcttataataacaatgtgctcaaagggtatatgttagaaagatttgtatttggctaggcttacatgtggtaaaaccaaataaatggatcaattatgctcaaagagggtgaccagagataaaataatatcatggttggctcaaaaagctcaaacggtccaaaaatagcctaaatcatgcccttggtttagtgtcgtctaggattt

SEQ ID NO: 146535 - DNA, 948 bp, Cannabis sativa
tagtttgaattattgtaatggtcttgaagttcctcgggttgggttgaagggtggtattatgttattgtggcaagatggtgtggatgtaactttgttatcaatgaatacaaatcactttgattgttatgtgttgtttgaagatggccctcgttggcatttttctgctatttatggttttcctgaaagtataaataaaaaacatacctgggctttaattcgaagacttgctgatgtttctccacttgatacttgatccatggctcttaattggtaattggtgatcttaatgaaattttctctgctgaacataaaagttgtggccctcttcgaaatgataaccaaatgcaagcatttcgtacaactttggaccaatgttttttgaatgccttaccagctgttggtgatgactttacttgggctaagaatagaaaaaatcctactgctttgaaggagagacttgactggtgttttgttaatcgtgtgtggaaggacaatttgttaaatccaattttgactcatttggactattttggttcggatcatagagtcctaagtgtggatatttcattctctcaacaacacaatcctgttataaggaaaaaatctcgttttcgctttgagaagatttggttgaaagatgaagagtgtgctgatataatttccaattgctggttttctacagatcttaatgatccaacagctggtttggtagcaagtctgcagcaatgtgcttcacgtttgcaagagtggcactttagaaaatatggtaagatgaagaaggatatttctcatgctcaaaaacgtgtgaacaggctgaactctgctgcaacaacgtcaggaaatcactcacaggaggttcaatcggctgagaaaattttagaggaattgttggccaatgaagaacaatattggcaacaaagatctcgggttgagtggttgcaatcggga

SEQ ID NO: 146536 - DNA, 1382 bp, Cannabis sativa
aaccgatccaacataaacaaatggatcttcaccttctcgttgaaaagtcactattttccatttacagtctatactggccgaatacttggacagaaaatccattccaagtatgatgtcaaactctactaattccagttctataaggtcaacactcaactccctatcctcaatcctaattggcatatacctaatgcgcctattagagataacaaactccttgctaggcattagggttccaaaccctctttcaagaaaaccacaaggcctacccaaaaaatcaattacccgcatagccatatatgaacgtgtagctcccgaatcaaataacacagtatataaggagttgttgacaagaagctgacttgtcaccaccgaaggactgctgcagcatcaccttaggtgatagcaaacacccgagcagttacaggtttttactctgacgttggctcttctttctttgcctgagggcaacctttcttgaaatgccccaccatgccacactgaaagcatgtcttccaattgcactctcccagatgatgttttttacaacgtgggcactcagggtaagagtaaccctgacatccacctctgccttggttttcacggaaccgcttactctgccccgagccaccagatgctggaataactttcctcttctaatcagtggtggaatcaccaccatccctatcataaacaagagtaggaagggtgggggtcccaccaacattcggagtcacttggggatcctgaaggaattttattgcaccctcggctcgcagggttttctcaaccatttctacacatgatgttgctttgtcggtagtgatcaccaaatcatgtctaatcttcacattcaaaccaaccaggtacttttctttcttactgaaatttgttggcacgatacccacggcgagtttggccaaacgatcaaactttgtggtatactcagtgactaacatcccctctgtttgcactaactcagtgaactcgttccgcttagcactgcggacggcttcattataatacttagcgctgaataactcccagaattcttcccaggtcataacagtgacatcccgagtgagggacaccaattcccaccacactcgggtgtcttcctggaactaaaaagtagcgcaggtcacccgatcattaccaaccacacccataaaattcaaaatttgctcaatcacagtgagccggtgctaagccttcatcacatcaggacctcccaaaaacattggaggtgcttgcttacggaacctttcgtataaggactccatacggttgccagcaacaggttgttcgactggcatcagtggagctacaacgacctgagcttgttgtggaggcacggcaagaagaccctgctgccttaatct

SEQ ID NO: 146537 - DNA, 515 bp, Cannabis sativa
aacaatctcaatagttcaggggatatttttaacggcattaaaagtgcaggagatatttttaacgaccttaaaaatttaggaacatgatttgatacatgtcaaaattcagaatgcaaaaattctaattagctttttaaaatatattactaaaattctatttttttctatttatatcatattttttacgttatataatacatcaacttaaattacaaaaattttacttatttaaaatttatttattttaaatatataatattaatatatacacatatcttatacaataataattattagggaaataacgataacctaactaatttaaatttgattgcaaattaggagtgaaaagtacgttgtactatttattatatattcagtaaatcgattgatgctaaagtttttctcattcccacaccaacgtcttctagtgtgaggggttcaagagcagtcgtctaagaatagttcggttcggctcaacaacgttctctatttcaaatttttgttttcattta

SEQ ID NO: 146538 - DNA, 586 bp, Cannabis sativa
atataaggatgaatgggtttactcctcccattcaaattgattttgagatggaacttcattcatcttatctcaaattctaatgtagtcttctttactgatgcatcgtggaaggattgtggagcgggtggattgtttgatcgcgatttagattgcttatcctggtttgtgagaagctagaaggccaattcggcaatggaagttgagttgttagcaatattttgggcgctgcaaatggggaaggaggttggtaactcttctattgccatattctttgatgcccaaatggtggtgcgtgcgctgaaagagaggagctttcccccgtattgggaagttagaccttcggctaagaaggttttgaattttgatgtttgtaatttcctttatattcctcgtgtagacaatcgtggtgcagataatgtagctaagaaggctagatcaaagggccattttgatggtgtctttgataaagagggaccccctgttgtgatacccaattatctagtttgatgaacacttccaattttttttttttttttaaaaaaaaaagaatttatactttttttcagtagctcttacagagcaaaat

SEQ ID NO: 146539 - DNA, 660 bp, Cannabis sativa
tcgattattcaaaactattgttattattatatctcatttgttgtctcattgtatctcacttattttcatcaccgtatctcacccgttgtcattactatatcacatcttttttcattatcgtatttcagttgtagtcgtcactattgtattttccaaatatgtatcttaatcttagagaaaattcattagttagttcttttattattaatgaatatgttttgaaaatgtgattattattttttaaatatcttaactaaaaaaagaaaaaaaaaatataaaaaatgtgatattttagttatgagaaatggtaaaggcaaccctccttgttggtatcatatcacaattagtataattaagtagcaggtcacatataattttcaaaaaataagatttaagaaatatcgctaaccaatcgtggggtaccacttgtgaaatgtgttggacaccaatagtaatgctctttataattatgtgatacttgatattaaagttatcatttcaaaaaaagacgcgtaaaataggcttttgacgtaaaatatgctttttttattttaattcaaagttaaattaataaatttaaaaatatgattaaaaatatctataacatttcaagtattttaattttcaattaaaatttctttatataaaatatctatataa

SEQ ID NO: 146540 - DNA, 613 bp, Cannabis sativa
  modified_base (42)..(51): a, c, t, g, unknown or other
  modified_base (570)..(570): a, c, t, g, unknown or other
gtagtctaagagtattaaaataccacccttatcgactaacannnnnnnnnncttcttgatcttaagatttatttgatagtcttccaatattcctttcctgtattaatatatatgatacctactcattacttccactcaacatcaagtgtctagtctaatgcatagcaaagcatatctgagacctctcattgttgatcctaaggaattctttccttggcctttatgttttttggaatagttgaaactttttcttaggtaaataaaatctatgtctagaagtcaaaaagcttctatagattgctattagaaaaatgcaccagcaacttactaaagtacgttgcttgcactagagtaattaaatcaccagacataccacaagccacaggtttagataaactgaaacctataatactaggagcaggaagttttgttaagtccattgaatagacttattttaaaaaaaattcttcttgtccttgtaatagaaaacttattggttactccatatgaatggttttaactaaagttctcttggcttttttctgagttccttattctgactatccattncttgtttaaactaacaatagatttcatcacaagtgtcttccaa

SEQ ID NO: 146541 - DNA, 601 bp, Cannabis sativa
tctctctctctctctctgtctcttactcaattacagaataaaagcctttatatgcataggctgagagtacaagcaaactaacacaaaataactgaattaactgtctaagtttacaaccgaaataactaactaaactaatacttgcaactgtatatgaaccccacaaattccacctggtttatatacatttgcaagtaagggaactgagcaaaaaaaaaataacataggcaaaaccattccatcaataaagttttccttcatggatgaaggatcaacagtcttcaatgttcagcaacttcaggcatagcctaaatttctcactagtgacagtcttggtgaacatatcagcagggttttcatgtgtacatatcttctttactttgaccaatttgctagcaataatgtctctaatgaagtgaagtttgatgtcaatatgttttgacctctcatggtacataggattcttcatgagatgaattgcactttggttgtcacaatgtatgaacaaattgtcagattcaattcccaattcagatgtcaaacccttcaaccaaatagcttctttcacagcctctgttgcagccatatactcggcttcagt

SEQ ID NO: 146542 - DNA, 808 bp, Cannabis sativa
gttggatcaaattaactacccatcaaacggttacagtacatcacggattgaaatccgtgtccgtacagtaacgggacgaaatccggtccctatatatatatacacgtacatggaggagtcaacaataaaagtaacagtccaagtcagttttgcacatttcttttcacaaattaacactttaataagcaagtcttctcttcagtgggtagagaagtttcaacagtcacccagtcttggtcaaatctccactacctcaccaactctactctaatacatgcctattctccaagtataaatatactcacatcacaatcaatttcttgcatccaaacccacaaccactaatactcattccaatattgctctctctctctcaccaaacaaaagttttagacagaaagaaaactcaactgtatctctagttatatatatagttcaaacaattattaataatctatactacaccatcacaacaaagacccaattattaataatctaattacaggacaatataaattacttagttatagttattaattattaattaacatatgtaatttatagcgtcaataaaattaaaatatatatataacaaagcatattagaatacctgcttgatattgtttttctgtgtttgttttcaaagttatgttctcaacaaattgaaggtgtttggctaatgttttctaaaaataaaatataaaaaacatgtttggatgatgaaaaatatgttgaactactacagattatgaaccaagatcaatactttatgtagagcatcacaaacaatataaaaaacacatacctc

SEQ ID NO: 146543 - DNA, 508 bp, Cannabis sativa
aaatattttaacattttcttaaaattaatgttgatgaggctatggacagtgagggggcgttgtgttggtggactcagtgctaaggctgcggagggcatggcactccgtagcgttatggttcaatgcattaagtttggtctaaaaaagatttgctttgtgtctgattgtttgtgtattatacttaaattcaataatcatattcctttcgatagctctatagggttggtgcttgctttagggaagtttctattatttattattatagatcttacaatggtgtagcatattatttagctaaatacaccatttcggtattagttagtaactatttggtgggcggactacccaacttttttttttttgcgcgtaatcttgtataagcatgagatatgtgattaataaagttttctccctcctttcttcaaaattgtttttctgaaaggctggttcttttggggtttttcttctctaaacaaaatgttaaagattttattacaatgaaagataa

SEQ ID NO: 146544 - DNA, 700 bp, Cannabis sativa
gaatccatccatttagctttctgttttaaaaacatagagtaatcctgctgcttttgattcaaatactcacgggctagactttcctgctgatgcaaactttcctcaagaggctgttgttgtagttgactttgaatactgtcgagagaagacttggcctcaagcacctgctgatgcaaatcacaatatgcttccttgtttaacttcctcagtctctctttaaaaagcttcagcttgcaaacaacttgatacattttactacctgaaagtcccaagcaccaactgtcttttaagaaagcgtcatacttagggtgagatttccacatcctaaaatacttgaacggctttttccccctactatttgaggatgcaaagtaaggatagctggagaatgatcaaaaagtccctcattaagaaatacagcttcagaaaattcatacttcccaatccaggcttgattggccataattctgtctatcttggaataaatcctatcattccctggttgcttattattccaagtgaagaaatttccactagctttaacatgttcaaggttgcaaaacttcacacaagtaagaaaatcagaatcaggataagtccttaccctgtgacccactctttcttccttggctaggatatcattaaaatctcccatcacacaccaattctcattagtggacaaatcacataaatccttcca

SEQ ID NO: 146545 - DNA, 756 bp, Cannabis sativa
aaccggaattccggttctgagctgggaacccaaaaattattccccttaattcaaatcaatcccaaatcctcccaaaacttccaaaatacctgcaaacaatatacagaaccaaacccaaacaacagaacccaacaattcaaccaaaatcccaaaccactattagagctccaacctaagctcttgaacttcaatttccaaccaaacaccaaaatagccaacaaattcagcttaaaacaacaaagtttactattatctaacctcagattaagaacccaagccaaacacatgcacacagctcctaattcaagcctaaatccataaaattcacttcaaagattaagtaaaattcaaatagaaaagctagggagatttaccttgattcaaagaagtaggaaccttgctagaatttacaaattacagcaaagaacacccaccttctagctgggtttggtgattcgaaagaaagagagggagagatgaagaagtgtctcaatttttctaggttttcctttttattttccttttaattatctttaaccaaatgagaaaatacaaccagcccccaaatccactacaagacaaacatcatttaagtttaaaaagacctatttaacctttgcccaagttaaaacaaataaaaactcccaagggtaatttggttaaataacaaaccccgaaaattctaacgcctctaaaatttaactataacaccccactaatattctagaaatacaaaatatgactctctaaaggccc

SEQ ID NO: 146546 - DNA, 576 bp, Cannabis sativa
  modified_base (540)..(541): a, c, t, g, unknown or other
attctacaggaaggtgattatggacaaaaatgctagtagaaaaataaaaacaaaaggttaataataagtgacaaaggtaaccaaatgaatttgagatttttgttttgaggataaaatgttataagaagcaataaaatgtgtaaccaatagtaaagagagaaagacttcaagaatcatccatatgcttgtttggctagtttgtacctttaattcacaaagttgacacaaattatataacattcaagttcattatagttttgagtatacaagttcttacaaataaaagaaatgatttaatcttagaacctagaaatgacattatacattaagcaataatgcaataaaagattaaacatataaaactaaacaatattgttattattatttttactaaatagtaacacacaaaaagagcatgactaatcctatatatttttaataaaaataatgacaaagagatggagatagtagtgatagtgacagtgatagtgaaagaaatgaatattaatattacttttattaatttttagacacataagnnagcatgactaaacctatatatcatttaacaaaaag

SEQ ID NO: 146547 - DNA, 853 bp, Cannabis sativa
agggctattggtctgaaatcagtgataaaggccggagattccttcttaggaattaacacaatggatgtgtcgttgatggttttcgaaagctcagttgtatgaaagaagtgcagaaccatttcaagtaaatccgcttggacagtattccaatgatgggcgtaaaaactagttgggagaccatccggtcctggggctttgtctctgcccatttcgaagagggccgaagtaatttcatctgtcgtgggtatagtttgaagactctccaaatcacaatcatctaacatcgagtggggtatgtgatcaagtgagttcggctcacagattgccgttttctgaaataactgcttgaatttggataggaagcaacaagaaatttctttaggatcctcaatccaatctgacccggactcactcttgatacactgaatgtaatttcttcgtctcctaacaatcgtcgatgccatgaaaaacttcgtgcttttgtcaccctcttgaagccattgaactctagatttttgcttccaatggatctcttctctcagcagggcttccgaaagctttccttttgccatgttgatggttagccaatcatcaggccgattaatttcagcatcatggagtagagatgaagcttcctccacttgtcttttaacatgcctaaattgcctgaaattccacttttggagcattcggcctgtagctttcaccttttggtaaaagttggtcatggggttttgatgtagccatttcgcccaagtttccttcacaatccaaaaacatctcgggtccctagcccacatattttcgtacttgaataggcgacccttacaatttgcacccccggtcgagtcta

SEQ ID NO: 146548 - DNA, 1252 bp, Cannabis sativa
  modified_base (278)..(293): a, c, t, g, unknown or other
  modified_base (436)..(444): a, c, t, g, unknown or other
  modified_base (554)..(557): a, c, t, g, unknown or other
taagatcctggtaaaataatattcaacacaacgaaaggactcaggtgttcgtttggaaggaagaagcccgaaaggaaatgaatctgttgaaaacatgctcaggaagcaaacccaggaatgtttcaacaggtactgtttccacgagaattgataacttgggggcttctagtttgaagagaaaggacggaattaaagaaccgttgaaggataaaaagaaacaaaagaagcatgataagtacgtgccagtgtataatatttatactgagcttaatgaaacnnnnnnnnnnnnnnnnctcgcacatgagcaaaaggttgccttcggcaagcccgagccatgaggaatttgaggagcaaaagagatcctaacaagtattgtaaattccataaggatattgggcatacgaccgacgaatgtcaccaattgaaagatgagatnnnnnnnnncatcgctcgaggccattttaaacaatatgtgaaatgacagggccatggatacaaccagcccagtctacctaataacccaaacaaacaggggttacaacctcttcctgttnnnngagaggacatcctggttatttcgggagggccgcatatcgcagggaaaagcaataacgcccagaaaagatatgtgaaagagatgaagaacgagcagttggcctttgccccaccaccttccaagaagctgaaaaatgaggaacctcttattgtattcacggaggaagacgagaaatacgtgaggcatcctcacgtcgatccattggtaattaccatacaactcgccaataaaaggatcaagagggtattaatagaaaatgggagctcgataaatatcctttataaagagactctacggaaaatggggcttgaaaaagccaaattaagaccttgtatggtaaacctttacgaattcactggggacagcattgccagtcttggcataatcgagctcgcattaaccttaggcgaggcacccttatctactattgttatgcaagacttcttagttgtcgacctgccatcgccttatagcatattgttgggtcatccaacactgatcggactaggggtagtcagttcgatcaaacacctatccttgaaattccaaacaccatatggcgtgggagtggtgcgtggagaccagatgttggctcgatattgctatcgcatagagctgcagcataggaaagccggtcatcagttgatggaaatcttggtagaagaaactgaaaagaaagacgaagatcttaacccc

SEQ ID NO: 146549 - DNA, 729 bp, Cannabis sativa
  modified_base (380)..(381): a, c, t, g, unknown or other
tatgcagatgtttgcttgcgttttgttcacaatataaactattacatgcataaagtttattaggggtttccatcgcttgtattttctttcgacattaagtagtttatttcctactttacgcgcgagcagcttatctgcccatccctcaatctgcgagccatcattgattccacctcgcgatcattagaaatgatcttattttaagcaaattcaaatatattttcaatgaacttgtcattttgtatatattttcattacttacatgagtcgttaaattttctacccacgtgtttggtttaagtattttttcaagacactttaatgtctcgtttaatactttcccttagcgcgagctgttagtattcagctttatgcgctanncataacttttgattttcctttctcctcaaataggttataaatcaaaaattacagttgtttgatccctttctcgtcagaaaggtttgatcaaggcgttataacgattcggcccctcttccgtaaaaaaggtttggtgaaggagttataatagttcgacccctcttccgtcaaaaaggtttggtcgaggccctttctcaaaggttttcaaaaaattttatattttgaaacgatgggtttgcattgtactatgtatttccagattaactccggtaatcatacatgtatgcccctcaagtaattttaaagggttcacgctttgtaattacttgtttgaaagaaataattatt

SEQ ID NO: 146550 - DNA, 640 bp, Cannabis sativa
aagttaaacatgtttctgttggattatttaagattaaatatatatttctattactggtttattttattattgttttaaggttgttttacttttgtttgattttatttatttattacattttctaaatattgttgtactgctctacttttaatagtaatagaaaaataataaaatttatatgtaagttattttcttcagtatcctatgctccaatatatgttcaattctcctccattgttccactgttattttttagttgttctgattctttttatttttgatgttttctcctgcatgctctcttgttgtgccccagctccctacatctgttacatttgttatgttgtttctttttccagccagcttccatcctcttttcgtttttgtcttccacctttcaccatttcaatgggaggtaagactattacatatttcacattttgtgctacatccaactcattttagtgtcctattgggtacactgttccttaactagttgctagtcaatttttcttggtgtcgtaatctgaacagtgcttgtctagtaacctgttgtacgtgtgtgttctctctttgaggtctactctctatgattcttttattctggttatctcaaataaatatttagtggttggtttaa

SEQ ID NO: 146551 - DNA, 841 bp, Cannabis sativa
  modified_base (224)..(226): a, c, t, g, unknown or other
aaaaattaagcataaaaactcaaaattttctaattttacccattcatgggtaatacccattaaaaatgcacccatatatatatatcaaggcacgcgtgcttggttttatattaggtgctatataatttaattataaataatataaaaaattattatatataatttaatttattattatggtctaattgaattttttaatataaagtgattaagacaataaaaannnatataattattttgtgaagttatttttatgtatattcaatacatgtagataattaatttttagatgaagaatattctatcattctttataaaaatgtatcttttaataatgcatataatatattgtttgccaggtaataaaatatttactctaatgtagtaatattttaaatcttctgtctaaaaagaaacacattgtatttcttaattttttcatatacatatacatatatataaatataaatttctatcaaaaagaaatatatatatatatatatacacttttaatgaaacgtactgtaaaagatacttaggttgatgttacgtgcaatacacgtataattaattttttttaattaggttcaattgggtgatgttaagtgcaatacatgtatgtttaatattttttaattaggtaatgtattttttaaaaattttaaatggagtttgagattttgatttttaagaaaaaaaaaatttagctattgctacattgaagtatcattttggatatgattatatatacgtattttttaatttttttaaattgtcttaattaggtaatatatctgataatgcatatattataatttattatattcttaaccaaaactca

SEQ ID NO: 146552 - DNA, 726 bp, Cannabis sativa
gaccctcttcacactagtttattttttactattataaaagtatggtgtttgtgtgataattttaatgacaataatgcccttatattttatatgctatcactcatatatttatacccttatatttttttttacgtacaattgttaatatgattggtcagtaaactattatttattttttatatatatatttagctggatttacttttatatctgaaccttattatttattttatttattttttccacttatttccttttataaaaataaaaaaaaaaataatatattattatgcatagtattagttatagtattggttatatctcatatattataaaagtgtggtgtttgcgtgataattttaatgacaataatgcccttatattttatatgttatcactaacctatttatacccttatatctttttttatgtacaattgtcaatatgattggttagtcaactattatttactttttttttatatatatatatttagctggatttacttttatatctgaaccttatttatcttatttattttttccacttatttctttttataaaaataaaaaaataatatattattatgcatagtattagttatagtgttagttatatcgcttttttattttattttacttttatattttttatcacatgtaattaattattctctaattaccacaattattaattattttcgtcatttacaactcatctcatgat

SEQ ID NO: 146553 - DNA, 620 bp, Cannabis sativa
cgttggtcctagaacaaccttcagtaaaacgaccataactcaatcaatattcatctaattgatgcgattcaacttgtcttccaatgctatttcaatgctctatcaagtcatataccatactaaaatctcaattatgaagttatcaattccaaattttttcctcaagagagttacgaatttaagctacaacttactcgaagtgggtcccgtgaacgcgactcaagttccaaaaattgacgaccaacctccgaaattaattttacggtaagatcatcaccgacggtcaaaaatagcctaaatttattttttagttttgttaaaatattttattattattttaataggaccttttttcctacaaaaagggagttcttctagctcatttaccacattcagaaaaagtacccattcagaaaaagtacccataagttcaaagaatctctctcttcaaagaatctctctctagtttctctctctagaaattagagtttgcagacttagcaatttttcttgtaatcaatctcatgagaataaatactcaaagtagacgtagctctattactgtcatgacagagggagtgaactactataaattcttgtgtgtgtgtgtgtgtgttttt

SEQ ID NO: 146554 - DNA, 612 bp, Cannabis sativa
  modified_base (564)..(565): a, c, t, g, unknown or other
tataccatgagtcgacatgtcctcgcagcaaatgtacatattcgaccagtctttaggacctttaaaaccatggctgctctgataccaacctgtaccgccctaatctctaggaacgccacgtgtgtaattttataaaacaagtttaatactaatagaataattaattattaaaaaccgtgataatattgaaaacttgactaaaataaaatactaaaaatagacattataacggcataaaaagtgtgttccaggaatccctgttataaaaagtcttactaaagcaatatatacgacaaccatttaatcataaaatctaaatacacaacagagacaaccagtccaaaacaactcctggcaactcggcacgcagaccggtgaggtcaatatgtacattgctggagaagactgccacctcatggttgatctagcttttctttgcctttacctgcaccacatagcagccaagaatcacaaggactcagcaagaaaagcaataataacaatcatgtagtttcttatttgaatattgtcattcatacacaataagaatcaaacaatcacacnntgttcataagatgaaatccaaatcactactgacatctgccacgaata

SEQ ID NO: 146555 - DNA, 621 bp, Cannabis sativa
  modified_base (416)..(421): a, c, t, g, unknown or other
gttcagctggtgaacaatcgtcttgctgccatggaggaagttcaacaagagatgtcaaagcagctgtccaccttggtcaagctttacagagactaagtttttttttccttgctgttgttggacatattactatattttcatattttttttctttggcccttagttaaaacaaaaagggggagtaatattttgatttttaactatttgttttgaccaactctggacccaatttccagggggagttgtgtttagtacttgtgaactattttggtttaaaagttatcatgttcatttagttatttttggtttttaattgtgttactcagggggagtagttatttgttatggctaactttattttgcaggtactttgtattaaaaaatattttgtttatctaaagtgccaaagggggagnnnnnnaagtccttttttggcaagttagttgacaaaatattttttttcttttatggtaagattcttttgcatacataccaaatttcttaccttgttttttcagtttttatttcctcttttccttgttaggaaagttgcacttttcagcttgacttttctttgtttggaaacttcttgtaagagaagtaattctcttatggaaagtt

SEQ ID NO: 146556 - DNA, 714 bp, Cannabis sativa
  modified_base (31)..(35): a, c, t, g, unknown or other
  modified_base (303)..(312): a, c, t, g, unknown or other
cccaccacttggtccaaagcaagaggatccnnnnnaattgcgaataaacgagctggaggacaagatcaggagatatcaagtgggggaattagggaaaaaatttggatacaactctgacgaggagcttgagccgtatcatccagatattatgaataccccttttcctttgggattcaaaaactcatatgtctcgtcatatgacggaactattgattcggtctcgcaatcaaataactttaacacaataatgtgagcgagtaatgtgacaaacaatttatgctgtattttgttccccacctcgcnnnnnnnnnnagccagtagctggtttaacaagtttactcatcattcaataacttcctgggagcagctgtccagggatttcaagaaacaattccaggctgctagggatagacgacccgaagcggcctcattaacttatataaagcagcaacctggcaagacacttaaggcatacttaagtcgttttagcacgactgtggctagggttaggaatttggatgaaagcacgcaacttacaactcttcaggctcggatctctacttatccattaaccacagggggcgagttgtgggatgacttacaaggacgtccagtgaaaagcatcactgagttcaacgtgttgggttttgtgccctaaataaaaccttttacaatctaattcgttatcaatataagaaatttgaagtgatttat

SEQ ID NO: 146557 - DNA, 1030 bp, Cannabis sativa
tgtgttaagttttcactggtattttttagttgttctactgttgttttgagttgttccgccttgtgttttattggtgttttataaaaacatagtatttttgaaaagattttcgtgtgacaatatttttgtaaaagttgacccaaatttcagtatttttgtaaattttcctagaataaatcaagacaaatacaacttaattatagagtaatttgtggcataaatacctaagtttaactcccagttgtaaataaatatctaagtttcatttttggcggcaataatacctaagttatatttttggaactctgtaggtacctgattgttaaatattaagtaaattggtccaagtcatgaatttttaatttttttaaaaaaataatttatatgtactaataagaaaatgacacatagataatgatttgacatttaatgtttaggtacctacagagttccagaaatataacttaggtgttattatcgtcaaaaattaaacttgggtatttatttacatctgggagttaaacttaggtatttatgccacaaattgtcatgatagtggaaaataattgtgattatattctttcatttgtgacaatgatggtactccaagaccatatatttgttctatctttttgtatgatcttaattttcatatcaaatgatcatatatctataatttttttatgcatatgaagtacttcaggacttcactactaatgaacaaactttatacatttaaaattttttgatatacaaaagaaataaaagtttgttcttcaatcatttataatacattcaaaaactctccaagagtctatagtataatttacgaatttctattgcatatacaaccatacgtgtttttcaaataataatttacttacatatctttatttcatacaaagatctttgtcatacagtgtgcgcgactttgaattaacatcacttaagatatgtattaaattcttcttagaatttttagataaggcttatttcaaattctcactatattaagagctccaaataaata

SEQ ID NO: 146558 - DNA, 1896 bp, Cannabis sativa
ttttttgatattttttttaattaagtagttatattaagcatagaaattcaaatttgtgatttaattattcgttattagttcaaaattcgatgatgtgatatttttaaaattaatatttatcatttatttagtaaccattcatgagtaatacccattaaaaagtgttccatatatatatacatatacattacgagagattgatttttatccatagatatattctctataggagactaatcaaacccaaacgatacacacataaatgacttcagcagccaaaatcatcgactcatatgaggaacagagcgagagagaagaaaagagagaaaataagagaaaagaaaagtacttttttattgaataatactctgttgatttacacagtacaaaacagggtttatatagcagtaggaaacctagctgcattagtttaggaaataacagcaacatcagtaattagttataacaatttaactaatcaagattaagctctaactaactaacagaaaccctaattctgatagcccccgtcaagatggagtgtatatgttggatacacacatcttggagacaatgttgttgaaagaggatggaagtagagctttggtaaaaatgtcggccaggttttgctgagaagaaacatggagtaactttagtgttccttgctgaattttcttccgaatgaagtggcagtcgatttcaacgtgcttcgtgcgctcatgataaactggatttttgcttatgtgaatggctgtggtgttgtcacagtacagagatgtgggcttattgagagagatgccaaaatctttaaggagagcaataatccatgttacttcggagatagcatttgtcatggcacggtattcggcttctgctgaagatcgagaaacaacttgttgttttttagatttccaagagataagagctttgccaaggaacaggctccccagtcggcatctgcaaagaaagacaattgaacatttgaggcggatagactagtttcagcaaaggctgaaacatggggtgttgtatcagatggaaagaaaagtccttgccttggagtacgttttagatattgtagtacgcaatgagcggcttgtaaatggggtactcttggacatgttaggaattgacttagatgattgacgacataggaaatatcgggcctcgttatggtgaggtaaatgagtttgccgattatactcctataggaagtgggatcgggaagaattttccctttatctttgctgagtttcaggttagtttccattggagtagacgcaggtttagctccaaggtaacctgtatcagctagtaattggagagtaaaaggtctttgggaaacggatatcccttgtttggttcttcctatttctaaaccgagaaagaagcgaagagatccaatgtctttaagtgtgaactttttgtccaaaaaagatttgaagtgagtgatggcttgcttgttattgctagccacaattatgtcatcaacgtatatgaggacagcaagtataaatgtagatgtgtttttgataaacaatgagttgtcagaaagagattgatgaaagccagccgatttgagagtggtacttaacttttcataccattgccgagaagcttgtttaaggccatatatactcttgttgagtgtacaaacagagtttggaggggccttgtatccgggggggattttcatgtaaacttattcatggagatctccatgaaggaatgcattgttgatgtcaattttggtggacatcccaattgtgcattgcagctagtgcaagaaagattttaagaatgttgaatttggccacaggggcataggtttgatcatagtctataccttgttgttgattgaatcctttagcgacaagacgtgctttgaaccgaaca

SEQ ID NO: 146559 - DNA, 944 bp, Cannabis sativa
ggctaggtttagatgagatggacttaaaacaaagacttggactgaagtctaactatcttaggtctgaatatatcatatgggatttagagtttgatttttagcactttagttcaactaataaaactaaattgtcttttctaattttgccacttatctcatctaattatttatataccaattttattttaataattataaataattatcaaataaaatacaatacaatttaatatatttattaattatacccacaaagatcactaattaacaaataaacttatatttttcttttcttctcaaaatcgccaaaacttggtggaaattctcaaataagacagtctatttttgaattttaattgacttgttaaatcaattagttgagtcttctagatgatattatctcagacaatgtggggaccatgtgcctatgttatcaagctcctaataagtatatcttgatatttaccgagtcaattccttaacttattaatttcttctaactctaatatagattcagaattgcactcatgattacaaagaacgctctatgcaccaagtatagatacactatgaattcatccattatttcaatcacaacaatcattgatcctctatagacgatttacattgagtagggataaaattactgatttatttgtcaatgtgtaaacacttataaatgatattttggataactactataattatcgaaatgagtgctctatcatttatcctgttaagccaagctctaaagaacccattcacttctaataaacataaaagctatagatgttcatttctatgactaacactctcatagtaagatagtaatgaacaagtcaaagaactcatgcaatacaaggttaaccatctcaagatgaaatcaaatgatctatgatcaactaagtgatattgacttacaaaagatataacgataagtttat

SEQ ID NO: 146560 - DNA, 919 bp, Cannabis sativa
agattactgcggagaccagccgcctttccaagaccttaattaatcatggcttcgtcatgtccaaatttgggggcatagacgaggccgtgaggatcttgagggacctgtctgctgaaaggcaggcgatctaggaggaggctgaccgaagggaggccctcgcggaggcaaagctcaaggaggaagccaaacagagagaagcccaagcagaggcgaagctccaagaggaggccaaacggagggaggttgagctggaggcgaagcatcgggaggcattgaaggcggagggtgagcttcgggaggctaaggaggccatggacgaaatgactgccaaggtgaagtccctagaggaattgcaccaggcgcttgcagtctaaggccaacctggccgtggagttgaaggtgctaaaggactttagagaccaggccttgaagaaggctaaaagagatgagctcctgacccctatttcctgcaagcactgtgccaaacgctttgacgatggcgtctatatggcgtgccagtcgaacggccagagcatcaaactcgacttctatcccaagcctgaggaggctcttgccaaattccgagagaagaagaagaagcttgatgctatgcttgaagcgcgtcggggtcctcgccttcctcctcgtattgattaggccgcgtaatccagcccatttcatcatgattatatctctttttttttttttttatttacaactatttttcttttctttaagacattctcaattatatagctgctttattttctaagggaagagattattatggcctgtccccgggccctttgttttattatatattattttttttgacctgccctttgggtcatgatattttatacatatgatcactttgatgcatattttctttgactttatttttacttttggcctgttt

SEQ ID NO: 146561 - DNA, 551 bp, Cannabis sativa
aaaacatatatcaaattaaaatataattctttacaacaatgggctttaaatttaaggatatttgatctccattgttggtcttacatggttaatatttcaatgttacctcaagatgctagacatcgtcccccttatgaatggtcatccattgtacatttaacactgtaaagatctcgaaagataagtattttgtaagttttcttttctattagactctcccctatggtgactacttagaaataaatttacaagtatgaaacaatggtagaagctaataaaataagaataaccttaactcttgcctactgggagaacgttggactcttatttcgatcgaataaaaggttgctaaaatggtctccattttacatgagctgacaattctattcaactaatgatgtctttgactctcgcctaccgagacactatatatcatgtatttaaaaaatcttagaaattatttaagatgtattttttttgtattttttacatatctttattacttgctaaatgcttaataattttttaatatgtgtatgaatttatattga

SEQ ID NO: 146562 - DNA, 575 bp, Cannabis sativa
tggtttttgtattgttctgctatgggtctgatctttctgtgttgttgtactaatctgattctgatattctgccttttgttttgttgctactgctagtttatttatgttgtagaagagagcaatgaatcagagagttaattattaagtttgttaaaactttataactaacttaatgacctgtctaggtaaatagaggcctaaggccacataagctttatttactgccttgttaatctctttgtaactgttctgattttttttacagtgaatgtggggatttactttcaacaatttccacctaaatccccatatgcactgtgttgatgttgtttaagtgtaactgagggtcttagctcgaacccattaagggttttaccaacctgtgtcaatccccaataagcttaggcataggcaatactctcatcccacacattgtaactgtacttctgtttcggtttaggaacttttctagctctatctcttgtaagctaatattctgtgaggtcttcctgattcctattttcttcatcttgaacttcatgttccacctaaactggttccacctgatttggtgc

SEQ ID NO: 146563 - DNA, 701 bp, Cannabis sativa
ttgtacgggtcttttgggccggtaggagctggaggatctgttgtctgggcggggggcatgtcaacgttcagactggaagtagaagtggctgcctcagattctccataagccacctgggaagcacagtactcgagatacatgtctttggcatcgcccaagtaatcacatttcgcctgaggattagccttccaaaagtcatagaaaatctcgagaccgactgtcttcaaggcattcaccttccctttgagcctctctacttcagcattaagctccttctccttggacttcttctctgcttccaacccgcaaaaaatagttcgaagtacctccctttcttcctggaggtcggtcacttctttggacaaggaagtcatggtagcctcaagttggtcagaagcctctaaatccttggtcaactcggccaccttcttctcggcagcaagaagctttttgttgacttcactcagttccattcggatagctccgagttgaaccctggcttcatcagcgtctttcctggctaagtctacttctgccctcatggtgttggacatggcagtattcttggaagcagcagacttagttcgagaataagtataagccatctttagaccagtctgcacagagaaaaaatgttagaatctgagccaagtaaatgaggattaaaggaaactgtcaggaaagactcaccctcgtaaact

SEQ ID NO: 146564 - DNA, 2663 bp, Cannabis sativa
  modified_base (678)..(683): a, c, t, g, unknown or other
  modified_base (2380)..(2380): a, c, t, g, unknown or other
actggtagtagggtcgcaaatgttccacgttccagtagttctttatcatcaagccattaagccgagctaatttgtaaacccaagtttctattatcgtctcaatcacataaggaccctcccagtttgggttgaatactcctacagatgcgtctctcatatttgcaaatactcaccttagcaccaagtctccaatgttgaagagcctctttctcaccttcttgttgaagtatcttgtcactcggtgttggtatgctgtattagtaatttgtgactcagtacgtttttcatcaagtagatccaaggaaaattttaagagttcgtagttttcttcttgattataaaactctcgtctatgagtcgtgatatttacttttactggcagcattgcctctgagccaaatgctagcgagaatggagtatgtcccattgctatcttctcagttgttctatgagaccaaaatacttgaggtagttcatcgacccatctacctttggcaacgtctaatttctttttaatagtatccttcaaggtcttattaacagcttctacttgtccattcgcctgaggcctggatactgacgagaagcttttgataatcttattcctctcccagaactcagtaaataattcaccaatgaactgagttctgttatctgatactatcttaatgggtattnnnnnnctacaaattatgtttttgactacaaagtcaagaacttttttgcagattatggaaaccagaggttcaacctttgtcaattttgtaaaaaaattgacagccaccactgcgtactttactcctcctcgccctgtgggaagtgccctaatcaaatcaatcttacaaatgggtaaggcgaggtcatcattctcagttccgttggtggtacgcgaggtatatgcgagaatctctaacatttatgacacttattgacaaattcatgggtgtctttgtttatggttggtcaataatatccttgtcgaataatcttctttgacaagctctgccaacctgcatggtccccacaaaagccgtcatggatttctttgatgattttgttttcttctgcgggaagaacataccataggagaggcattgaatagccccttctatacgatttgctttctactatcgtgtagtgaggcactgaatataggagttttcgtgcctcatttttgttagttggaagttgtccgttgagaagatagttgattatgggtgtcatccatgtgggcgagctatctatcatctcgacatcttccttttcatatatacttggttcgtttgacatctccacctgaaccaaatttcaattcatccaattcattctgcgaggctagttttgctaaggcatcgacattagagttttgttctcttagtatttgcttgattttgaaataatcaaacttttccaagttcttgcgaactttctctaggtactttgccatttttaagcccttagcctggtattccctgagaaatttatttacaatcaattgtgaatcactatggcatatgagatttttaactttcaacacttcaactatcttcaaaccagcgatcaaggcttcattctcagccttgttattatacgtgtcaaattgaaatctcaaggcatagtgaaacttaaagccttcaagtaaattatatcccctacacccgagccatgctcatttgatgcaccatccacatataacttccaagtatccgcgtctcactgaacaagtagattttcttttagagttattccttctatcaggaaatctgccaaagcttggcccttgatggatgtctgtgggtgataagttatgtcaaattgccccagctcaattgatgattttatcaatcttctagaagcatctggttttgataaaacttgtctcaaggcttgatcagttaacaccttaatcggatgtgcctagaagtaaagccgtaaattgcgagatgcgtggattaggcataaggcaagttttttaagagggggatacatcaattctgcccccagtaacctcttactaacgtagtaaacaggttgctggtgctttccctcttctcgcactattgcaatactaattgcatttttcgagacaaccaagtggaggagtaatgtctctccagttattagtttcgccaaaacttgaggtgttcacaaatgtctttttatgctcttaaaggcctcctcgcattcttctattcattcaaactttttgttgcctcacaatacattgaagaatggtaggcacttatcagttgactttgaaatgaatctgttaagtccagtcattcttcctggtaaggcctgaacttcctttgctttggttggtgatggaatatctatcaaagccttgatcttctcaaggtttgcttcaatgcccctcgcnttgactatgaatcccaaaaattttcctgagaaaactccaaattaaggaacactttttcgggttaatttagcttcatattgtactttcttaatatctcaaagcactccacgaggtttgatgtataatctccactctttatcgacttcaccaacatatcattgatgtagacttccatgtttcttccaatttgtcttacaaatagttcattcacaagtcgctgatatgttgccccagcatttttcaaaccaaacgacatgactttatagcaataaagtcccatgtt

SEQ ID NO: 146565 - DNA, 1042 bp, Cannabis sativa
caggcctgatctcggtccgggtctaagtcacgagttcgagtctgagttatggcacgagtctggttgtgggtccgggtttcagtccgtgtttgggtccggttctttgtctgggtctgggtctgagtctggattctagcatgggtctaggttctgttccatgtcccggatcacgggtcttgggctccgggttctaggtcgcaagtcctatcgcaagtttgggtcgaggttcgggtctgggactaggtatcgatcccagtctgggttcgggtccgtgtttggttccgcgtctagatctggttatgggtccaggtccaattcttgttccagggtcttgattccagttcttattccgatttcaggtctcgggttcgagttcgggtttgggtcttagcttggaaattgttccaagttcgagtgttagtatgataagatctagatgtcgactacgggttgggtccaagccccgagtcgagggtcaatatccagatcctaatcttgggtcccactctcgttccaattcggatcttgggtcccggtccgtgtccaggtctaggtgttggaccgagactagggtcgggtcatgggtcccagttccattcttaggtcccgattctggttctaattttgtgtttgagtccccaatttaggtctggctcctgggtctaggtctgagtctccaatcccgatccgggtgttgggtccgggtctaggtccaagtccgtgtttgggttcgggtttgagtctcgagtcccgatccgagttttgatttgggtctgcatcccggtctgggtctgggtctaggtcttagtcagatttaagttctcaaactcaacccaaactcggactcagacccaggtttggggtacgggtttgggtctaggtcagggtctaggtctaagtccgggtctgggttccagtccatgttcggttccacatgtagatccggttttgggtcctagtccaattcctgttctacggtcctaattccggttcttgttctgatttcgggtctcgggttcgattctgggtttgggtcctggtc

SEQ ID NO: 146566 - DNA, 534 bp, Cannabis sativa
atatcaagattatgtcgtaaggacgaattcttccagcactcaagttcaaaaaatatactcttctttatccaatttagctcttgagcagaacgcttctgtttgacacccccatattatttgtgctttctaggcaaatgaaattaaattcgatccaattgagataaaatatcatccctcgtcaatataggaggttgtgctctcttctcaggcttcccatcgcatttttttctttttctccttggatcattcatttcaagaaaacgtctgtggccagcgtatccgatcttactatttaggccaatggaaagagtgtgttcattgtaagtaggacacgccatgtaccctttcgtctccaaccagacattagagcataagcgaaaaaattatttattgtccacaacatagccgcacgcattgaaaatatagttctattataggcatcgtgagcttcaacaaccgtctcccataactatttcagttcatcaactaacggtctcatgaacacatccatgtcttttccaagagatgatggac

SEQ ID NO: 146567 - DNA, 913 bp, Cannabis sativa
  modified_base (860)..(866): a, c, t, g, unknown or other
gtccttagaggagttacaccaggcagacttgcagtctacgaccaacctaaccgtggaggtgaaggagctgagggacttcagagatcaggccttggaaaaggccaaacgagatgagctcttgacccccgtcgtctgcaagcattgcgtcaagcgctttgatgacgacgtctacatggcctggcagtcgaatggccagagtatcaagcttgacttctatcccaagcctgaagaggctcttgctaagttccgggagaagaagaaaaggcttgatgctttactcgaagagcgtcggggccctcgtcttcctcctcgcattgattaggccgcagagtccaaccaatttcaccattataatcatatttttcttttttatttatagtcttgtttcctcccttatagacaattttaatttaattattatcttctaaggggagacaattattacggcccgtccccaggctcttagtatgttatgtatttttctttttggacctgccctttgggtcaggatattttaaatatatatgttcactttgatacatattctgtttgactttatttttacttttggcctgttttacatctgtccgtgtggtatgccttggtacccccctgagtggcatgaaaactttgtttttaaggcacttagttttatttgaaatttagaggttgcatacacttttacagtacaaattatttttaacaaggcctaagttgacatatttggactattggtaatacttccggagatgatcggcgttccaagcccttggcacgatggttccgtccaatttttttagcttataggttccgtagccgatctcatcctcaatttcgtatggcccttcccaatttggccnnnnnnnccccactccgggttcttgagtggttgggaagactcttcttaagacca

SEQ ID NO: 146568 - DNA, 517 bp, Cannabis sativa
catgccactactcaggtgtgttacgcaagaagaagctgcacgacttttgtcagaagtacatgatggattctatggaaaccacgtagctgggcagagtttatccatgaaaatcctaaggcaatggtatttctagctgaccatgattgaagactccaaggtgtatgttaagaaatgtgataagtgccaaagattctgaaagataccacgttcgtcgcccaacgaactaactcagatgcaaagtccttggccttttaccatttggggaattgacctgatcagacagttacgcaaaggcaaaggcggagtccagtatgcagtggttgcagttgatgattttaccaaatggacggaagccgagccactagcaaccatcacgtccaaaaaagtgcaacttcattaaaaacataatatgtcggttcagattaccatataagatagtctcggacaatggaaaataatttgatgccagtccttctctgatttctgtgcgaaccatgggatcataaaaagtttttct

SEQ ID NO: 146569 - DNA, 581 bp, Cannabis sativa
aaattcaaagtaaattatttgtggtttagtatagactataaacagtgttagaatagttagatttagtttttgatcattcttatatttttcatgaatttatttagttgatgcctagattaattatgaaaaattattaagtgctgttaaaatagtaaaacgtatttttataatatcatttactgtctatgatataaaatgaaataggttttataatttattagctattgtaggtatttattataattaattgtgattaattaactatttaattgggttttaattagaataaatagtactttagtaaaattttacgtaaaaagtgtctgtatgaattcatgttttacgttaaaaatgtttatttgagtacatgcaatgtgtttgtgtgaatcaaaatgataaatggttatgtatggtgtgacatgcaagtgaaattagcttatgtattacgtatttttacgtgaatttctgtatgagtttagagtatcatacttgaatgtatagttgtgttgatgaatatttaggatcttgttctcaacaataaaacacattaaggagctcgaggtagcaagtgtggtcttagc

SEQ ID NO: 146570 - DNA, 596 bp, Cannabis sativa
tgattaacaataatcccaaattagcttactaaaaattatagggtttattttgttctacacataatttgcaattgcaatatattcaaagtcttcaatcttttcacaatatatttttggatgagtttttttcactgaggttatagttatatctaaaatattttaaaaaacttaggactataaattgaaaaaatgagatgaaaaaaattgattcagattataaaataggaataacaatcactagattgtcatgaaagtccgagagagaattcttctaagaagtatgagcaaagtgaagggtgtttttttggctttacaacgatggagagattgttttgaacatggccaaactaagtgggttggatgaattttgcaagtttaaaatattgaaattttttacactacatcatatgaagaaatttcaactagatgtatttatatatgagaaaattttacagtacactttttaaaagatgtatattgatatatttttactgacatgatttttttccatgatgtacttttacggaatgtattccgtggtacattagatgagtcttagggtacgttaccattttttaatcctaattacctctaga

SEQ ID NO: 146571 - DNA, 516 bp, Cannabis sativa
attattattattattattaagatcagaggtaggcttcaatcgtataccatttgcgattgccaattgaaaagtttaatttatattttaaagtttaacatattgcgattgaaaagttactttatatgaatttaatttatatataatatatatttttaaaaaaaaacttaacgaaagacgtttagtttaaccgaataaatattatttttgaataaaaaattgaaaaaaaagttcacccaacagttttgtttaaaaatctaaattcaaatttgaatttttaaaatacttattcgtaatttttgttaaataaatacttttttaacctagattagtgaactgttatgatatttaaatttaaattaatatctttatttaattttaaatcttttatttttttttttgatgaaaactaatatacgtgtatatatactatatactagtatattgttacgtgcgatgcacgtatgctatgttttatattaagtattatattatgagttcggaaggaaataaatgaat

SEQ ID NO: 146572 - DNA, 574 bp, Cannabis sativa
cctgttccagtgagtggtggtggtgggttgggtaactaaccaaaccaagggtatattatgccgcaccgggactctatgttcgaggctacaacctctgacttttgtgggaggtattgatattattaagaccgatcagtggatgagtacttttacccgtatcctcgataatatgtgggtgacgggaactgagagagtgaactgtgcgacctttatgtttcaagaccatgcccgcatctggtgggatatagtaagtcagacccgagatgtcagtataatgacatgcgaggaatttaagaaaccttttttgaagaaaagttttataatgttgctaagaggacttcacatcacaaagattttgtgaagtttactcagggaaagatgtctgtggccgagtatactctggagtttgatcggttgtcaaaatttgctggtgatctagtgcctacagatttcaccagaaaacagaagtacgttgaagggctcaatgctacaatcagtctggacttgaaaattaccacatcacatgacactctgtataagagagtggtagacttggccttaatcgctgaggagg

SEQ ID NO: 146573 - DNA, 965 bp, Cannabis sativa
tacaagattggtatgcgagttccttgacgtctttctaaaacatttatcgtgattgccacctacctgggagattgaatttgtaattaagttggttccaggagcgaatccagtatctaaaacaccatatcggatggctccaacaaaattgaaagaattaaagatacaactgcaagagatactgaattagggattcatttgaccgagttactcaccttagggtgctccggtattatttgtgaagaagaaagatgggtctctacggatgtgtattgattaccgagaatttaacaagcttaccatcaagaacaagtattcattacctcgaattgataatctgtttgatcaattgaaggggaagacggtattttccaagatcgatcttcgctcaggctatcatcagctgagaattcgagaggaagatatcccaaaaactgcatttcgtactcggtatggaaatatgaattccttgtgatgtcctttggactcaccaatgccccggtgacattcatggatcttatgaatcgggtgttcaaggattacctagatagatgtgtgattgtgtttattgatgacattttggtgtattttgagtcagaagaagagcatgagttacatctcagagcggtttagcaacttttacgagatcataagctttatcctaaattcaaaaagtgtgaattctggttatctcgtgtctcattttcggggcacatagtggataaagatgggatcatggtggatgcggccaaaattgaagctgtttgggattggccaacaccaaagtcagctactgaggttagaagctttctgggtttagctgggtattatcgtcggttcgttgagggtttttcaaagatttttgtaccccttacagaactgactcgaaagaacctgaagtttgtttggactgatcggtgtgagaaagttaataggagttaaagcagctgtaacaccctaactaacat

SEQ ID NO: 146574 - DNA, 630 bp, Cannabis sativa
catttcttttcatccagaattaggagaagaatggtagaatgagaaagagcttcattccaaatagtggtggtatcatcctcctctatgaataatgttggtaccaacatcaatatgataaccctcattagtacttggtagagtagattcttcaaaattttcatcactagaggtagaggtgacacttgcctcgtcaaaattgttaaaagtggcagttgagattaatgcttcattcactgtttgtggaggaaaaccattaacatgcgaacttaccaggtgactagagaatttgttcaattcttgcttaatttgtttcagctcagcaagtaagtctttcatcatctcacaatttatcaccatagatgcttgtaactcaacaatggtgtcatttaggaatcgattgtatagatgttgagagttatgagggaaccaagggtcctcttcttcacaattcgactcatataatggattatagtcgtactcatgcttctgactataatcatcagaacttttctgatagagagagttgtaggattgttcttccaaattatcataaagatgtgcaaaagatggcgtatgttcacaaggacgtggtcgatgagactcatgccaagccttccactttttggaact

SEQ ID NO: 146575 - DNA, 528 bp, Cannabis sativa
caattgatgtattcgaagcaagctgggtttgttagtctcttagaaataaaggtttagaataagaatatgggaactccttatacaagcctcttccaaggttggtgtttctcaaacaatgatccttggttagacaaaggaagaatagttatagcttggccaccaaatgtctattcaatagatattaaacattgctctagccaaataatgcattgttatgtgcaatcacagcaacaagtaggaaagttctttgtgtcactgattgatgcttttaatgattagaaaaagagagaagagttatgggctgacctagaggaattggcaaagaaaaaaaatgagccatggattctaataggagatttcaatgagataatgaatggagatgaaagaataggaaaaagagcccaatgcattccatctaagagattgcaagattgtatggagaactgtaacatggcagatttgaagtactcagggtccttctacacatggaacaacaagcaaaaacctgaagagagaattttttccaaa

SEQ ID NO: 146576 - DNA, 637 bp, Cannabis sativa
caataagtagatgaacatgtgtgattttgctattttagagtttattaatcatttgtaatggtttttctgttatgcatttgtaggagttgttggcgattaacgctgtaaatatgggttgggctttttgatacacgacacgaaaccagcacaagtctaagaggcacgagcacgatctgacacaaaaaaatatgggcttaagcacgacacgacacgacaagcaagcacgaatataaaagctcaaaaaatatgacacaaataaatataattttttaattttgtacttcataattatatattttgatatttatatacatatttttattttaaaaaataatttttactaaagtttatttatatgtaacactatttatatgtatactttaaaaaaatgttaatattataaatatattgtacatatatgttataaattatattataatacaaatatattaataatatatcaaattaaataaatgtcgaagcccatatctttttcttaacctgctccctctattttgctcttttcactctcttcttaacttgctctatgctcctctctcattttttttatctcaggtgaggcattactgtttcgggctccttcattgtaggtggtgaacatggcccgttaaaaaaa

SEQ ID NO: 146577 - DNA, 946 bp, Cannabis sativa
  modified_base (718)..(719): a, c, t, g, unknown or other
catggatataatataatgaaaatattagcaaataattagaacttattattgatcatgtattttgtttcgtttaataaagttcttggacgtagtatcacattaccttatctgagttgtaaaattttaaaattccaatctcatctttatttggatgacactagtgatagcttactatgttatgatcatgataggaactttaaaattcaactgagcaagtaaatctaactgttcatatggatagaaataacttattagaattatgacgataagatatgaaattttgctaagtctattcgaatgacttgggcaaaatacctaattctcatgaaatgttttatggtatctctaaggattacttaatcttaagcaagtattttacttttatgttaatactagaatgctatgttgacgacttagtctagaaggaacttatagtttcagactaaggtaatatgtcacaacaaactaaatatccccaagaaccaatagtaagaggctaagtgtacacttgtgtacgaacttaagcagactcctactgttgaatgggagtcatctaagatgtaatcaaacaataaacattaggagacaatcaaggaagaatctctgaaggtgacctatatgtcagatgataaaggtgtatattagaatccttatatctacaccaactcataacctattggagatggtggttactctaggggtggaggaattattctannaggatgtaaaaacccatctataataatttaagctccatcagtgaagctaaataacattgttgttttcaaaagcactggaaagttattccaactaaggaaagttcttaactttgttatctctattctatttttgatagaattagcgacatgtcttctgtatattcagatgcacttaataaacagtaaagaatttgttgggttttatggcctaaataaaactcatttca

SEQ ID NO: 146578 - DNA, 852 bp, Cannabis sativa
ttaagcttaggatcctatttttactattttagaaaatacagggtctattttatcatttaacaaaatacatggtctaatctgtaacttttgcaaaataaagggtctaaaatgtatttatatgcctaaaataaaataagaaaactttacactataagtaattaaatataatcgtataataattttaattgataaaactttttatttttatttttataattaaagtattaaatataactgtacataacttattaaaattagaatgatccacaaaattaggtataaattaaaaagtaataaaaaaaggtaaatttaaaataaaataatgaaaaatgagtatacatttaactattttatttttatttttagaggcaaaatatttaattttacaattttctaacacttattactacaacttttattaactcataaatatgaatgcatctctcttaatttaaaacttaattttgcatctctcttattttatttttgaaataagtaatatttaatttttgatattaaatattaaattttaaaataaaaataattaaattgaatgcatctaggccctcacgtgtccatatttatcagctaacgaaagtggtagtaacgaatataagagaattgtaacattaagtatttttataagaaatattataatgtgttagaaacagtacaaataataattttatgaacaataaatgacttgaaataaatttagaaatacttacataagacatcatttttgtaaaaaaattatatttttacatttaaataattttctttacatttttacgatttctcatggaaataacacgaaaacaacaaaaaaattatataaaagtaacatgaaaa

SEQ ID NO: 146579 - DNA, 586 bp, Cannabis sativa
tcaagatcattgttacgctgttcagccatgccatgaaacatattcttcagttcgtcgagctgggcctgtacggctgggctgacttgattggcgttttagtcaggttggattacgtcggcgtctttctgagcggggatttgagtatgggctccgggctgcacgatcgttgtagtattctgctcgtctcttccccttcttctgtttagattgtcccttaggtcatgggttgttcccagcctatcgaacacagaagaacctggctgccttagcgattggttcgctttgttgacaggcagaatggctccattattctgtggggatccctcgggcatggctcctcctaataaattcccggacaaggtctgcccgcctacctcttggcccacgagtggaactcgtgaccggggattggacggctgaccgttggttgtctaggaggcattcatcgtcgagtcatcctccgtttctcccaggggaatgacgctcggcgtttgttagcctagagtgtgataggctcttcgtatcagcacagtagcttgccgactacgatcttcgatttctgcatggtgagcccttaatgcctcca

SEQ ID NO: 146580 - DNA, 551 bp, Cannabis sativa
ttctcaaacattcaaacttacaccagtataagattaatgatgattcacaataacctttaatttgaatggttattgagaatccataattaatcattaatcatcaataagtcattgataaaattctaataagtcatgttatttagtaattacttacaatttctaaataacatacatgttgaataatttgctctttaaagagtattttggttcatccttaagatgacttattagaataataagatcaatattttctagtgattacattctatacaataagagttcagctacaatattaatttgagacacaaattaaattatggaatgcacataatttaaatggtggtacaatatgccatgaatgaataaatgaatatcctaaagagcaatgaagtctatctttagtaaagttgcctaatgaggtggagaacattcattaagcatgagttttttcaccaataaatactcattaggcaacatagagaaatataaagatataaaatcaaattcattgctaagaagttcatttcaaactaagaatcaataacaaagga

SEQ ID NO: 146581 - DNA, 521 bp, Cannabis sativa
  modified_base (457)..(472): a, c, t, g, unknown or other
atatatatatatatactttatgctatcttacctcgattccgtattcaggtgtgccggtcagcctgagtagaattgtagctcgacactttacaaagcccaaaaccacaatactcaaaatttcgatgagagacacattaaaacacttctcgaggactttaaagtcaaactagaaataaccttatcgataaaagacatgacaataccctaaatatcaataattcagggaaaactaaagttcctggaaaaaccccaactcgtaaaccagtttcccaaccaattaaccggttcactggggtttgctgagggacaaaccgctaaactagtttcttaggacccactgaaccgattaaccggatcagtgcggggaaacccaaaaatcaatcccctaaacacaaatcaatcctaaactttccaattatctccagaatacatgtatacactataatgaaccaaattnnnnnnnnnnnnnnnnataaacaacccagaaaataaaatcaccattagagttcaaagcttgagct

SEQ ID NO: 146582 - DNA, 554 bp, Cannabis sativa
tgtatatatgaattataagcaaaattatgtgtatatattgctaaataagcatataagtataaatatatatatagaatatgtaacacacaaatttaagtacttcggcagaatatcatttgcctacatctacattagcatttaagctatgattaagttttattaataagatggagatctagaaattttaagaaattattcttaataatagtctcagctgtgtgtaaatgggtattttagtgaataaaagcggcatgaacacaaactttgctcgtgtagagagaaataagatgaaaaagaaagaaaaagataaaataaacaaagagggtgcatataaagatgcttgtttgaagtttatcttttctgaaggatttcaggtgaaagattcaatggtgtttgtatataagcatgttgttatgctttgacgcttacaagcagcctgtgtagaggaagagaaagcaatgataatttctttcaagatttataagacaagctatatgggactagatgccttcttttcctatttatagaggtagcttatcgtgcctcttcgaggt

SEQ ID NO: 146583 - DNA, 536 bp, Cannabis sativa
tgttaagtgttgaattgtcgggttaagtattgactaatttgcccttgggaattggtagctaatctattagttagaggggtaattaggtctttttctttcaagcccttgttttggattttagtgagtaagggttgtcttttattaatattgatattgattttgtttaaaaaaaaagaaaagaaaagaagaaaggagtgagttagaggaaacttagcattgaagtctccatgttcatctctctctttccctctctttcgatccatcaagccagcaaggagggtggtttttcttgctgaaatcttactaatctagttgagttttgaagttccaatcaaggtatttcttcttgctattctttcttaggttttctttagtttaagttaggttttgtgattgaattttgagtttctgttgctgtatgaattataagagtttgagtggatgttccggagtttatttgttgttgtgtgagatgatttcagctagagttaaaggttgatttgaggttggagcaaagtttgagtttatgaactcaa

SEQ ID NO: 146584 - DNA, 512 bp, Cannabis sativa
ttatatttttatgaacttgtttccatccctaaaaagggagataaacttaaggatgacttttacggtctccgggcccatcctttgaatgagggcgcagtccctcacaaccagcagaagcgcgtgaaggagtatcgtcactgcttcttcttctcctccggtttccaagctgtggatcatccaaagcttctcacggagtgggttaggatcccccttacatgcggaccgaacccactcaaatatttcttcaacgggccaagaccttcgccacgtacgacaagaaggcccttgatgtcggggagttggtcacgacagagcactgtcggaaggccaaaatgatcctggggcatcagtcggtggatgaatacaatctctccaaagtcatctgtccgaacgtgagggttccagccgcagagaaggtgctccgggatgacatcatcgccatggcggaggacaagtaccagaagtacctcttcaagagggaacaggatttggcttacattaaggcccaggcg

SEQ ID NO: 146585 - DNA, 960 bp, Cannabis sativa
aaagctaatatatccacattatttcacacacagattgcgtcatagccctatattctgattgagcacttgatctggacacaacattttgtttcttactcttccaagagactaaattacctccaacaaagacacaataacctgaagtggatcgtttatccaccttagaaccaacccaatctgcatttgagaaacactccatctgggtgtgcccatgatccttgtaaataataccttgtctgagtgttcctttcaagtaacacaaaatttgctgtaaggctgcccaatgatgaattgctggggatgacataaactgactggcaacactaattgagagtgcaatatctagacaggtcacagtaagataattcaactttccaattaatcagtgatatttctctggatctttaaatggtttcccatcacgtgttagatgcacaattggattcattggagcactactaggttttgctcctaattttcctgtctcagttatcaaatcaagtacatacttctattgtgataacaaaataccttgtttgctctgagtgacttcaactcctaagaaatacttgaagacccccaaatccttcgtgtgaaattgggtatgaaggaatgattaagggaagtcatgccttcaatatcatttttagcaataacgatgtcatccacatatacgactaacaaaatgataccagtagttgatcttttatagaacacagaatgatctgacttacttttctacaaaccatatttctcaacaatctgactaaatttaccaaactaagcttgaggattctgtttcaaaccatataaagatttgtgaagacgacaaacttgccctaattctccttgagcaacaaacccagaagattgctccatatatacttcctcaagatctccatgaagaaaagtatttttaatatcaagctgattcaaacgccaatgataagtagttgccat

SEQ ID NO: 146586 - DNA, 555 bp, Cannabis sativa
  modified_base (138)..(141): a, c, t, g, unknown or other
  modified_base (524)..(525): a, c, t, g, unknown or other
actcattgtatatttggtataaatataagtttttgactttaaattttagattctaaatagaaatttttatttcagtttcctagatacattgtacaatacaatatggctttcacaagttttttttaatatccattttcnnnnaatggattcaaactgtatgtttatgtatggaatttgagttttgtattctgtgaccaagatccacttggactattcaaagaactctttcttgtaactagacctaagtcatcaaaagattacaaccacatcttagtatctatgacatttgtatcttgttcataattgttttgacaagatccattctctgcaaagagtcaatatgccaatattcacttgaaagtaagatcgtctatattcgaatattgatgtacattcaggagtggatatgagttttcgttatattcttaagacgatcactctagattttacctgtacaaagaaatttgaaatgttttagaaatttcatgaatttctagcaatgttgaaaaacattaaggtaagtnnttaaagatcttgcgaattgataagggtgga

SEQ ID NO: 146587 - DNA, 711 bp, Cannabis sativa
tttatattttttttaataatagggtgtatttataattttatagagtgcaaataaaactaccctttcttaaatataggtcaacttttctatgtttcccaaaatgatctccttatttttgtttagagagtgatatgaatcacattatgacgaacgttcagtcaacaaattaattatctagtcaaagatatacaaaatcaaaatgtgagtcactacaagcaaaacaacttatataagatcaagttatctcggatatttagacaaaataacttgagaccatctttaagagacatctgatataaccaactgattggagcaaaactacctacaaaataaataaatatagaaaggtggataagcacactatacaatgttaaaattataattttttaaattaaagataaaaaacacaattattattttaacgagagaatatatctttgaagtttttttcactgagcatgacataactatacaaaaatcaatttgttatgtccaactattagagcaaaatcttccaaggtagaaatatactagtcacttaaacatgcaccatacataagatttgagagattaattaaatttaataaatcaaatctcaattaaaattaacgggtgattctacaatgcacccccttaaaagggatgtactggtgcacccttaacttgtttcggcattcagaaaaaaaatttagtcgaattttttttcatatt

SEQ ID NO: 146588 - DNA, 872 bp, Cannabis sativa
gagtcgttgatcgaaagctgctctcgacttttcacagttgggttcttcgccagattgggaacaagtacccgagagagtgtttctccggtagacacgattcagcttaattcttccaactacatactctaaagacatggcttggagacgatgtaagtttttaagaatttttacgtctttgatttttaaagactttatctaaccttttttatttaatctctgacatatttaaatttcatgttttagcatttggatgcggcatttcatttaatgaggaggcgacaatacttttatccagaggtgtacccaaatagatgtgtcatcatgcctcacattttcccatcaagagttattggtcggtggaaagctgcgggtgatgaccacactaactttcagtgggatgacgacatattagatttgatttgaggggataatgcccaatacttagatagttggaagaataaggagagaatatatatgaccctcttcttggataagcattgggtgacattagaggcagaccttgatcgttggatattgagcatatttgactcgagccttggatcgatttctccaaatgaattgaagagtcacttgacattgtgggaagagttattcccaactttgattctacagtctagcctattcgagaatcatgaaatgatcgtcatgcctcaactgaccgtctcagagaaccaggttagaaatttcagttcaaaagtcatcgacgggagcattgtatgacagacggaatcagcgtaacttaattacaattgattttttattatttaacttgaatttaatttgcatacttttatttatttactttttattgtctcaaacagcgatgcttgcgagatgtatgtgatagagca

SEQ ID NO: 146589 - DNA, 523 bp, Cannabis sativa
tctgtatatttcgttaaatttcattgaaatatttgccatttctaaataaaaaaatactttataattatattgaggaattattgtaaataatatatcttgaggattttataagaaggataataagaaaagtgatagagatatcattcacttttatttttcactaatgacatgtttactaataagtagtgggaataatggtaaggtaattatttttttatatttgtttacttatattataaaaattagaaaagacagtacttgattaaataagggataaaaaaaagaaaatactttaatgtcattgaggataataaattttatttatttttattttactttttaatattaaatatataataacaatttatcttataaaataactactatatattataatttaactttaaaggacaatttatttaatttaagtattttgattacgtttcctaataaagtaaatattataaattactattattctatttctaaaaaatttaataaataagagcatgtttggtattgt

SEQ ID NO: 146590 - DNA, 617 bp, Cannabis sativa
tttttcttttttttttttctgtttgtgttttccaggtttcgaaatattttttcgtttcagttttgttttaattctcttctcattttgttttagttttttcaaagttttttaatagtgtaatcactttctgtatgttgttttttgggaatattatttggtctagttgtttcctgtccatttttatgtaaccaatgggtaacaatttgattttagctcattgtagtttatgttcaaagagttgtttctgtatttcagtttgttttcagttttttaatagttttattatagtttggatacttgtatatgttatttgtttatattttccatgtgtgttaaattgcaggtctgggataacaaattcagtccctctgatttctacagatcgaaatgtgtttgtactagtaatttctctgttcttgataatatcaagaatactttatctgtcaatttgttgtctatgttctgtaacactcaatttggtcattttttttggatatacctgattttgttttcaacccctaagttgtccgtagcctacttttgagggaagtataccagcccaatcctaaagaattttaggctaaggttgctggccgttgtatacgattcagtgtcga

SEQ ID NO: 146591 - DNA, 877 bp, Cannabis sativa
acatgtcaaagttcaagagacaaaaatccaaaaaaaaaaaaaaatacaactttagtttttattttggtactctctcttaattttcatttctttacggattaagattttctattaaaaattagtgtcttataatatattaaattgatacattaaatcaatttaaatgtgagaactcaaattactaaatttatattattaaaaacttaattttttttttcagactccattaaccatctatagggttttttttttcttttctaaaaatggtcaaattgtatcagaattagattaatttaatatattatgagacattattttgtaatagaaaatcttaattctttaaggatgtgcttttacatttttttctctttatgttttcgtttttgaaaaacgtgatctgcatcacattaggacattcccgagaagacttcaagaattagtgctggaacctcttcaaaccagtataactcattgtctagcctaagggcatgtttagccataccatgtttagcctaagagaataactcattctcttttatgtttttgtttcatttgttttaagttcttttacttcctagttttataattttttatttatggatttataaaaaatgcttttatttcattgtcttatttatattagctatttttttttcttctttttcttttattttttttttaccataaagagtttttgtcactagattttaatgttgaatgtgcaaaacaattaaacatatgtttatggggtgcttttagcagaatgaaccaggccggaacataaaaatcgctaaaccgtaggaaccgcctaacctattagaatccgcccacatggaaaccgcccattaaaaaaccgcaaaaattgggttgggttgag

SEQ ID NO: 146592 - DNA, 614 bp, Cannabis sativa
  modified_base (550)..(555): a, c, t, g, unknown or other
aaaaaaattagtttagtataaaagtataacgtgccttgcctcgcacgtaattttttgctagtataataaggtatgtattaaaggatcaccaaaattattttggtagactcgttacttgtttcggtattcaaaataattttttattttactttgttttcacgattattatagtttattacaaaaaaaaaacttatttttagtcacaaaataatttgtgattaattataaaatatgttatgactaaaagattcgtgagtaaagatattagtcacaaaaattaaaatttattgtagctgaatgtgtttttaattattgtaattaaaataaaattaattttatctaaataccatatttaagtcacaattaatatttgttataacaaaaaatcacatttagttaaatattttattgcactattgactattttttttttgaatgaaaataatttttattagatagaaacatccgctaactagaaattcgcaaattcgcaaattcgacgattatgtttaaaaatggaggatctgacgcaaattcgctgtgagaaatnnnnnnaaatcgtcccccaatttcaggttctgatccaattggatcttctttttattcgtaaatca

SEQ ID NO: 146593 - DNA, 671 bp, Cannabis sativa
aaaaaaaaaaaaaacacatttttcagacacaataatatacatatattactaaaagtatcccgtttgtttcggacctacgaaaccgactgggatttgcagtcccttcatgggaagggtgagtttggccatcttgatcgtgaatttcctgggtattgttgcgtttttctgcgtgttttcaatggatctcgaactggttaatcgcctggcagaggtgttggtgctggatgaaggtgacggcccggttctctctttgaataaagccggcattgaggaagggaagaggagaatggatctctgtcttgtgggtaaggttattggccctagaccagccaataaggaaggtattgagaaagctatgaaggtggtatggaaattacaccaccggtttcaggtggaagagttgagctcgaagaatgtattccgatttttctttgggagtcgtgaggatcggcagcgagtgtatggtggcggcccttggacgtttgataagcagcttatttgttttgtaaagccaatggggctgggcgaaatttcgaagatgaatttcgattttacatccttttggatatcaattaaaatgtgccattagcatgtatgacggaattatttgcaagagaatggggggagcaaattgggaagcttgaagacattaagattgtgaatggagctat

SEQ ID NO: 146594 - DNA, 935 bp, Cannabis sativa
tatgcaaaggtcgagtccttattcgtgtagacggtctttctcgtgctatgtgtagacggtctttctcgagctacgtgtagacggtctttctcgagttcaccatccccccatgaataaccttgtatcctttgttttagaaaatggcttaatggtttgcccctagtggcattttggtaaagacaagtttgtaaaccaacttgggttttcccttatcttaaatgccttgtactttttcattcgaacttaatatatttgtgtttgcttgcattttcattcacaatgtaaacaactatattttgatcaaatgcaaagtacttttgggtctttccattgctcgtaattttcctatttaagtagttagtaagctactagacttttgattaacgagcagttatcaattcagcctcgctatgacagttattgtcttaagcaaacttgaatatacttttaatgattttatcactttgtacattttttattgcttatatcaatagttatattatctatccattcactaggtttaagtacttttatcaagacatcttgatgtctcgtttaatactttcctatcttgcgcgaaacattaatattcagctttgtatgcaagttatgagttatatctcatttataacttttgattttcttttctcgtcaaactggtttaaatcaaaagttatgatggtttgatccccttctcgttagaaaggtttgatcaaaaatttaaaaaaaaaaattaaagttgtgggtttgcattatatcatgtatttacagatgaattccggttaattatacccaaatgccccttgagtaattttaaagagtaaaggtttgtaattacttaaataaaagaaatgattctctttattcataactgaagttaaaatattacatcagcaatgtgagttacatcatatttactggtaatagggtcgcaa

SEQ ID NO: 146595 - DNA, 504 bp, Cannabis sativa
ggagaaaagaagatccagattcagatcttgataatgttctgttacagaaaggaatcaagggctagatatttgaatggaaggagtcatattattccgctgcaccactttaaggtactctaaactttatatgtgtttaatttcattgttttagatttcatattaggatgttaatcaaacataattgttagtaaatctagatcttggtaaaaatatttccaacaaggttttcttaccaaaccttgagataaaaattcgctaaaatgaaacttattatttgtctctaatatatacaccatatcatagagctcgtcgcaagcttcagtacgatatatagaacgtccaaaacagacacttgagtgaaaagtgatggccaaaatacgaaatttgacttttcagaaaactaaccaaacggaatttgtgacagccagtagtcccgtgatctgtaaggggaaacaccgggtaagttgtaaaatcccacaccgcctggggaaggtcaagtgggat

SEQ ID NO: 146596 - DNA, 608 bp, Cannabis sativa
taggatagttaggatttttgagctccgaattttggcatgtaccaaattgtatcattaaaatttgttaagtcgttaattttttttttcaactattaaaaatttaaagtttacgagtataatttagtaaatattaaaatttaagaatatatagataatcgttgtgtttagggatgcacacaaggcagagaattggtggggagtaatccctcgtctccattgccgttaagaattttaattctcatcccgcttatttcctatcggggatagggcagaaaatcccttaatagggacgggatgcacacagggcggagaattggtggggagtagtccccatctccattgccgttaagaattttaattcttatcccgcttatttctcatcggggatagggcaggaaatcctttaatggggacgggatcagggtagggagaatcccttaataaaaaaataaaatttacaataaaaatttaaatatataaaaattaaaatattagacattgattgttattcaataaattaattattattcaaaacacaacttaaaatttacaaaaaagaatattaatatagtaaaaaaatataaacatacattataaattataaaata

SEQ ID NO: 146597 - DNA, 577 bp, Cannabis sativa
  modified_base (26)..(26): a, c, t, g, unknown or other
  modified_base (73)..(74): a, c, t, g, unknown or other
tttaatttatcgttttagaaaattcntatttagggtgttaataaacatacgtgtgagtagatctaagatcctnntaaaataatttccaacaaaaaggttggtccacttttaattaacaatggcccagtctaagcgctccaaagaggtgccatgtttccaagtgaagcggctgcccgaaaagggaagaggggagagagagtatttgccaagaaaactctgaaaatgatgcatgtcatgagaggggggtaaacagtgactattacgatcattaaacccaaggtaatcattgaaatcaccaataataagccacggtgccaaaggggcaacatcaaaaagacggttcagcaaagtccaagaattgttattatcagaaacataaggggagccgtagtagcaagacaagtgaaaattattattatttatagtaacagtacagtcaatatgatgaagggagtaggacaaaatattcacatagacatcatctttccaaaacagaagcaaacctccccctaagcctagtctaggaacctcaagaacattagcaaaatacaacttagccctagaaacaaaagtagaa

SEQ ID NO: 146598 - DNA, 527 bp, Cannabis sativa
tgatttaagtgcatgaacacattttttttatcatacttgaggtatgaaaaaatgtttgaaatcataactatgccattattgaccaatatctcttactttcaaggtctttgacatatttttttttttggtagatgttgaaacttgttttgactatatgaactttcatctttttatgcattctaaattttttctttgcctattgtgcttcattgatacaagtcatatcttgtatgattaaggggaagaaatatatttagcttgaccttgcttcctatgccaccgttttttatgaaatcaaaagggggagaaatattggaattgattattttggcattaatcatattatgctctcatattaacaagtttattgagtatatgattaagggggagctttgtcatgttaagaaaaagtaacaataaataggcaaaggtaaaacggtataaatcaatatatgcatatattaagggggagctaaactcaacatgtttcaatttactttttctttcctttaaaataatcaaatatt

SEQ ID NO: 146599 - DNA, 660 bp, Cannabis sativa
catcatgaaggagcgttgataaaatttcggcagtctagatgaaaaggtaaggggtcagagaatccccttgccaaagaacacatgagggtttaatcgtgcccaccggcccccattgagacagatgttgagggttgttgtcgtaatacactgggagacccaattgtgaaacgtcatacgtataccataacaagacagtacttggtcaatggaatttcattaattatctcttaaattaatgataaaataacatacttgactcttacgcttaactccgtgaaagatatttgcctatatatattttattttcttttatatagtttaagtaaaaaaaatgaatataatttaaaatagtagaatgaacgaataaacttaaatataactaagaatattaaattaggcaaagtactccaaagtttatataaatttaaaatgaatcttcataaaaaaatcaagttatgataatttaatttaatttttatatgttattgcttaaactacatgtataaattactacaagaaaaatgtacaaattagtctatcaaattattaatttttacaaataaaaagaatcgaaattactcaataatataaaaataaaatttaaaataaatcttcatataagattaagattaaaataaaattatgataatttaatttaat

SEQ ID NO: 146600 - DNA, 806 bp, Cannabis sativa
ataactattttaatctaataaaaaaattataaacaactgtgtttttcaataaacattaaataacaaataattcaactgtatttgctctttaaaaaaaaaaactaatgtttttttagattgtgtttatagttctaaacaactatttttatctatcaaaacaacagttaaacaagttttttctaacaatcaactgtaaatgagatttaattcaacagtagttgttcatttacaaacaaacaaccattttaatcctcaaaagtaacatatatacaactgtttctagataaaaaaaatagttgattatatttgtatgtattagtattatttcagttataatctaatttcatttgtttattaagattaactaattttttatatgttaaattatttatctcatttccaaaaacaaaaaatcatttataaccatgaagaaaactttttaaaaaacttaattaggaagagaatcattataaattttagtactttgtatttgttctttaattcatgtctgggtaagcttcaaagtttattcaatcttcttgtattcaaattctctaaccaatacgattcaaattttttattttaggttatttttgtgttttttctaattaataaaggtagaaatctctattttttttttctttttttttattggaattattacataaaaaattgaaattgacaatttatttacaaaaatacctccataatgtgtgaagaatatttatacattttatgtgcttttaaaagtacctcttacaattatcagttacacacataatcactatcacttactgtgtatacaa

SEQ ID NO: 146601 - DNA, 582 bp, Cannabis sativa
ttttttttttttttatgatagtgtaagttgtaattatttaggattaactgtaaattttcaaaattttttgaataatttataatgtctaaattaaagttttaacaatttcttaccatacatataagatgaaatagtcaagtgtgtaacaaaatatattgaatactattttcgttattgtaaattattttaattttttttttttaaaaaataatggcaatcttatataaatacaacatacataataataataaaaaaaaactagaaagctaatatagatgtcaaaatacttacgaggtgtactgaaacaccccttcgaggggtgtattctaaacttttggggaatgaacacaaatattcttgagaaaataaaaaaattactaaatttttaattacaatatatttttttttgtgattaaatatgtgacttttatgaatttttagtcacaataaaaaagtatctgagactaaaatatagtacttatttgagaattgttaaaagatactacttgtgcctagtactattcttgttgtcataccgttattgatgtaattaagtaacgggttccatataacttaagaaaa

SEQ ID NO: 146602 - DNA, 869 bp, Cannabis sativa
tttttttaatgtttctttatatttatttattagtataaaaggttttttaacgcaaattttcgttaacggttattagcctatttttgtaatagatttgcctcaaaaattatagaattctaagaaaaatagtagaagaaaaaaaacaccaagtttttacgtggttttgcagttaattctgcatagtccactagtgaatcttattcagatttttctaatacagaactagggttctttacaataagtgtattcctttttctctctaagaattttcgtccccttttttgtataatctgcccctatttatattgatataggttggcagttaattacatttaagttcaattcccataataatatttcccgaaattgtgggctttaattatgctccacgtaaataaatacagttattatttaaaaatcatacagctgtgatttaaactgttttaaaagaagtcaacgctggcgtggattaggacacactgccaaaggtatctcgctgaggtgtctcgcctagtacatgaacaacttagtttattcataagctttctagcaatggcatgagcactagtgtactgagcaaacttaagaactactctttgactataaggcctggaccatcatgtccttcaagttacttcacttagttgttatcatgtatatcatacgctaaatgttctaatagtcaattcgcctcgtcagtgcctccttacatattgcgaggtcgatacctcgctatgtgttgtttatgtcttccttgaaattatgccttctgacgcaaaatagtttctcgtcaatatgtgaatccatagtttgtacatccttgtctcgctaaagactgtacagtttgggagttataaatatactctatt

SEQ ID NO: 146603 - DNA, 506 bp, Cannabis sativa
gtttaaagaccgcttggtgggtcatgatgtcttaaaaaaggccttgaggccgcatataatatatatatatatatatataaaaaggagataaaaagataagtgttcaaacagttggagtcccaggctcttggttcagttcttctaagccaactggagcaggaggatatgttgttcgaacaggagaagcatcaccagcctggccagaggctcggccggagattgaagtagccgcctcgttcccaccataagcaacttgggccgcccagtactcaaggtacatgtccttagcctcgcccaagtagtcaaaattggcctggggattagccttccagaaatcgaagaagagctcgaggccggttgtctccaaggcattgaccttctccttcaacctgtttgcctcggcccctttggtgtccttctcctccttcatccgaagaagaacttgccgcagagaagtcctctcatcctaaagactgttaacttcaccagataagatctcgatggtc

SEQ ID NO: 146604 - DNA, 695 bp, Cannabis sativa
gaccgagatcctgacccagacccaaacttgggcccgcactcgggacctgaacttggactttgacccgaacatagactataacgccctgaacctcaggaacgccacgtgtgtgcttttataatcttattatcaataatctattagtttgggaaaagtgtggtttcattcaaaaaaatatattatctttaattaaatttaaaatagaaactttagttcaaaatactgtggtaatatgggcatcccctgctaataaaattcttttacaaccaatcatagaaccgttaatacaagagtaggttatacatccaatcatagaaaaaggggtgatcctgcttccaggaagccaagacaacacggttgatatgtacattgctgggagacctctgactcgtggccaaacagaaccgctaatcttcatacctgcatcgtgaagcacccgtgagtcatagtgactcagcaagaaaagccattagacaaaagaaaattatggaaagtgatagtagatttcatttcaacagattattcatacaagtagattgcactctttcaacgtatatttacaattcaacgtctacacgagcaaactcattacaaaatcaagggtatttatagctatgcataatcaacaatctcagcatttcataaaacacctcaatcatgcattatcataaacattcattttcaatgcttcataa

SEQ ID NO: 146605 - DNA, 808 bp, Cannabis sativa
atatttttgcatgttcagtgcccgacaacatggaacgcggcgtatggctcagtagaatcacatcttaatattttagtatagcgggacggtattgttagactttgggaatgtcgaggtatgtcaggaatttagagttttcccaaaataccctaagtgatttgtgtgactctttagtatgggcaaggacattttggtctttttaccttttgagttttgtcttttagtggggatttgatgttatgtttaaatctattttttaagcttcatattggtgaaataaggtgtttaattaagggaaaaatcatccatttattcattttattccaaagttagacaaaaatcattttctctctcaaaactctctgtttctctctttcggccatcctagaaccagctagggttcatgattttgcttcatcaattccttgtttccagtagctcttagtgtaatccaagccaaggtataatttttagcaacttcctttttgttttcttgagttgtaagaaaaatgatatttttgcatgaatgtagtttttgatattgtggttgctgtgattagttgttgttgttttcagaagcttaaatatgtttaattgagtggattcaagcaggttttgttgttagttagttagatttaaccaagtttgatgctttaaactcaaaactttgggttttaatggtgaaatgatgattttgctgctgtggttgttgtgtgtgtttgggtttgttttctgatgttatattatggttatataaggtgaattgagcaggttttgatagctagtttgtgggatgagcaagctttga

SEQ ID NO: 146606 - DNA, 876 bp, Cannabis sativa
  modified_base (70)..(77): a, c, t, g, unknown or other
atttataaggtaagaatccgaatatgaatgctcaacaatcttaccataaatggaaaaattattttgtcannnnnnnngccaaaaaaggactttacaaatagaatgaaaaatctttcctcttcgctgcccaagtactacaccaatggtaaaatcactagcatcactcatcaactcaaaaggcaaagaccaatctagagctacaataattggggtcatcaccaatgcctttttcaaagtcacaaaagcattatgacattccttggtgaactcaaatggtcgattttgttccaacaactaacaaagaggctttgaaatcttcaaaaaatccttgatggatcttctatagaaccccgcatgtcagaaagcttctaatacccttgaccatagtaggatacggtagcttttcaatgacttccaacttagccttgtccacctcaatacccttgtgagaaaccttgtgacccaacactataccttcttttaccataaagttgcatttctcccaattcaacaccaagtttgtttcttcacacctcttcaacacattctccaagtttcaaaagattcaccaaatactgaaaaaatcatccataaagatctcaagaatgcttttcgccatatctaataaaatttccattatgcacctttggaaagtggcgagagcattgcatagtccaaatagaatatcctcctaaaagcgcaaaaggccatatggacaagtgaaggttgttttttcttggtccttcggtgctatagaattttgattgtagcccgaataaccatcaagaaagcattagaactctttacccgccaagcgatccaacatttggtcaataaatggcaacgggaaaggatccttcctagtggcattattca

SEQ ID NO: 146607 - DNA, 1590 bp, Cannabis sativa
  modified_base (1067)..(1067): a, c, t, g, unknown or other
  modified_base (1203)..(1211): a, c, t, g, unknown or other
aagcatgcatatacacttaacacatacatgcactcagatattcatattacatattatacacagttcttaccttctttccagattcaagtgtgctggccgacctgaacgaaaagccttgtgctaaatggataccctaatcacataatgaaatcgggtaaatcacaaaatcaaaaccctaatccaggaaacccgaaccgacaactcttggttttgctatactctctagggattatacgaactcgagaagcagggaaacacccaactatggcactgaaatggacgacaattgagaaaacgaaacactcggggaaccctgccaaaactggctaactggtttataccagttcacctaaaaatcccatattttgctcaaaactccaccaaatgcaaccaaaccctccagagtacctaattactgtatacacaatatattccaaccagtaagtcacaaaaaacacactaaatcaaattataccattaaagatcaaagcttaggtttctaaattcaaacttgcataaatccaatcccatacaccaaaaccagctccaagaagctatatttaactcatattaagcttataattcgaattacaacataacctaaccctaacaacccctatatctcaaaatcacaacttgaaatcaaagtaaatgcttcaaaatacaaaaccataggttctaaggttaccttagctccaagaacacctaaattcctatctgaattccaaaaaatgaagatgaaaaacttggtttccttatgcttttgtcttagctgaaagagaagaagagagagagttctctattttgtgattttttttggcttttcctttatttttctctaaatgaaaaaggatttcctaattaatcctttgataaaattaaatggccatgtgtcactcacctaggcaaccaccagaccaccattttaaattactaaaataccctttaggttataaccttggcatttctgaaaactaggggtaaaatggtcaaattccataatcctgcttaaccccggtattttattttctccaataaattgcccactaagaaataaggttctaaanttacccatgtgatcaaactagcgatccatcgcatttttcgttgtcaccgtgcaaaaattacaaaaataacataattcacatataagtcaaataatacccctagagtttaataaaatatcaagaattgagaaattannnnnnnnntgcccatttctaacaatggggcccacaaataatgaatttcgtaaataattataaaaatatcagaaattagtgctaattgcttttactgatccaaattactaaagcattcattacaattatccccccgttaaaaggattttgccctcaaaatctaacctgaatagctctggatgttgagttctcatgtcagactccaactcccaggtggcttcctccaccttgttgtttctccagagcactttgaccaaggcaatggtattttcagaagaactttctcctatctatcaaggatctgaacaggctgctcttcataggataagtctgactgcagttcaagggcttcataacttaagatatgagtcgggtctgaaacatattt

SEQ ID NO: 146608 - DNA, 657 bp, Cannabis sativa
  modified_base (599)..(605): a, c, t, g, unknown or other
ttatcctgagtgttcaagatgcaaaaaggcaccatttgggctaatgtagagccatatcttgttattttggggtagtgggtcatctgaaaagaatctttgcacagttaagaaagactgatgttaaagaagaaaaatgtatgggtcctgcccaagtgctggttatgactcaaggggactcaggtatcggtacttcggccgactcaagttggaatttttaggcaatattataattactatttcaatttacattggtattaaacattgtactctgaatgggggggggggacattaaaagatctaaatgaactgtgttgtatgttatttagtggcaacccatttgaccgggtggacaaattagagaaatgacaaaatgagttaaattgttgatattcccaagtggaatataggacttgcatagttaatggagacatcgatctaattgattcaaacaacaaaatattttgtttagaagtggtctagcatattagcaaaggtgggacaatttataagtattgtctagaatcctaggtgaattgggggcgattgtgtagtaattttaagattatgtaggcgtgggactacctatgttagcaagaagnnnnnnnttttggtagctcaccatgaaggaactctatggttaagtgtccttgacttagg

SEQ ID NO: 146609 - DNA, 614 bp, Cannabis sativa
ataataactaagtaataaaattgtatcgaattttaactttattaattttttatataaatttctttaaaaaaaatatgagaagttagatgtaaaataggccaactcgacctaacgatttagaatataggtcttatttgtatcatgtttaagacaataacggaatcattgctaacaaactaatataaaattacagttttacaaacattaattatttaagccgctaaaaataataattttacaaatattgtacttatgctgccaaatattagagttatgaattcaaacacattgatcgaaaatgttaactatttctctttctagtctctccattaaagttgtaactaaaaataaaattttatagtcatttgaaagtagtctgtactcatttttggtcaccacaattttaaaattttgtagataatacaaataacattcactcaatagcttcttaaacttaattagaaactatttttttttattgttgcatgcattagacacattgagtatttaataattgataaattgataaaaaaaaagtagtagtaaaggaaaaatataaataaaaataagaatcactttctcatcaataaaaatcatatcaagacttatcaatt

SEQ ID NO: 146610 - DNA, 584 bp, Cannabis sativa
attaaataataagaggaagtagacgtacatatcatatgtctataaaagtggaaagaaatagactcatgacaagatgttagacaggcatacctttatattacgtagctaatatctgattgcttggatatataggtaacttgtctgaatggaggaaatggttttatgtagttgtcacctctttttgtgtttgacgttgagataacttgtactatacatagttacttttcatcattttatctgttgtatacttacaattaacacaatgaaatattgggtaatgatatttgtgtaaatcaagtaggagtgtagttgcacaagtagcctgacacatagttcacgcaggagagtagctgcacaccactctcataattgtcatacaccatcatcaatctcaactaatagttaaataaataaataaataaatatatgtcttatatatatttggcctaaataaagacaacatgcatgtatgtatgtcttttgatgtttgtctgccttgaccacattagatctactgtggctatctgtctatcccagccaacatatatggctagttgttcgtatgatgagagacttcaataccc

SEQ ID NO: 146611 - DNA, 543 bp, Cannabis sativa
aactcaatggcacatattcggtcaacatagttccattccaaataaaatttaagtttacagttacaaagacatacacaatagaacacaatttgtacataacatagctgtatctcaaaataaatttaattaggatgttttattttacattgaaaatatagattatattgagattactataatatcggtactgttatcacatgatgctttatctgactcaagactttagttttccaccccgcgtgtcgattttgctccagtgtttggcgcaccgacggctgtatcaaatatgataacactcatccctcgatggccttgtggactgcgggaggttgggcgaggttcgattggatggcatatttggcggcgtctcaagtagttccgtccagcctaatccacccatccgaacccttcgtcaacattacctgaatctgcatgtagtacgtacataaaatttctaagaatcaatttgtaataatatactattgaaataaatagacaaaaatagttgagttattacccagatttattatgagatgattgatt

SEQ ID NO: 146612 - DNA, 584 bp, Cannabis sativa
  modified_base (27)..(28): a, c, t, g, unknown or other
actaatcagattgtaaagagttttatnnagggcataaaacccaacagagcttaccgaggcagttcccccacaggaggcaaagtgccttaggggccagatggctgagccctccgtaaaaaataagtgaggcacatatgagagccttggataaggctgggtacttgggcggactgaagtgttacgtcccttcttcgaatcaccgagcaacgaacttgcagaaagggatgtgtgcttggtcgggtgctcacactaagcaaggggcaatggtgcctttgcacccgtacttcaagagggctgcgaattatttttgcctttgtccgacctaatttactcccaagggcattaagtatttgtctgccctgttcgtcctccacgccattcaaggatggggtgtgtcatccccacacgaggtcaattggttttttgacttgaagtctacccttaagcagaggaggttggggtaattctacttctctcagccagacttcaagtggctgacaggaaccatggacaaggatgtgagcaagatttggggttttgttgacgagtattacttcgtggaaggcatggataccacctatact

SEQ ID NO: 146613 - DNA, 527 bp, Cannabis sativa
aaaaattaccgaaaaaattaccaacaaaccggtttcttggtgatttttccggcgacaataccaattccgatgactttttcggagtttgctgtcggtgttagaaaagtcgacagagtagctgtcggtgtcgaaaaaatcgctggagttgctgacgacatcaaaaaagtcatttgaattggcattgtcgctggaaaaattaccggaaaaatcatcaagaaactgagttggcatctgaattggtaatttttttggtaatttttctaagaaaccagtttcttggtaattttttcggtgacaatgccaattctgatgacttttctggcgccagcagcaactccagtgacttttctgacacctacagctactccgacgatttttccagcaccggtaacaaacttcggtaatttttcggtactaataacaaatgaaaatgcctaaataaataaaaatattaaatatgggctttgaaaacctaatttatacaggggtaagttaaaaaatactacttttattaattaattgatcaa

SEQ ID NO: 146614 - DNA, 510 bp, Cannabis sativa
tgaaactctaacatataagtcatagttagatagatgatcttgtgttgatgaaaatgatgacgcatccacttataaattgctttcactcaaagtaggacatttagatttgtactcattgaatagatcatcacaaagtctatgcagctttctaatttcaagctcccatttatcatctccatagagttggggatttaaaattggagcaacaaaaacttgtatctaggatccaaaaccactgtaatagtcataattccatgaatctcttcctaatacttttgaaacttaaacatcatttgagttaccctatccttaatacataactcatttgatgtcattcattcttcaatttttctcttaattttacacatctctgggaaaaatagattggctgtagggtacttggttccagaaaataattttgtcacctcatgaaaaacttctagcctttcacataacttttgagctctaatccaatcatcttctgatggcaaacatttatactttggatca

SEQ ID NO: 146615 - DNA, 1926 bp, Cannabis sativa
  modified_base (1806)..(1818): a, c, t, g, unknown or other
  modified_base (1868)..(1885): a, c, t, g, unknown or other
aattagactcactatcgttggctaaaagcgaggtcaacagtaggaatgtccatctagaatccacaatatcctggtagtttgaatttaaatgggaagaggtctaccaacggcaacaagcagggcaatggaaagaaaggtaaattcactggcaatgccgaccgcaccctagtgagaatacctctaaatttactgctttgtcagtcctaacagatgacatagagataatctatgcaacaattgagtccatatatattgtcgtacaagaaactgtctcccatgaaaaaggatgtaagtaagagagataaatccaagtttgatcactttcatgtggactacggccacgacacaaacgaatgtaataatttaaagcaagaaattgagtttttgctcagaaagaataagccgcatttatagaagtacgttaaggctgatcaaaatcataggaccgcctaaacaaacaaaaatcagaaccaactgatgaccccacaagtggatggccatttacaggtcattattgggggtccacatcttgttggagactcaagtaaagctcgagaaaagtatgcccaagccttacagtatgaacaaaataaggcaatcttggtcgtggaagagcggaaacctaaaataccacgtgtaggggagccaaccataagatttattgaagcagatgcccgccatgtcatcttcccacacaacgacactctagtcgtagaagtacaaattgtaaacaagatggtggtgcggactatgatagacttagagcttcctcaaacattctgtttcaagataacttatgagaagatgggactccaactaaaagacttgatcccctgcaccagctcgtatatggtttcttcggccaaagcgttgcacctctgtgacaaatatgcctaccccgcactgttggaaaagctctgaggagcattactgtaatggctcaattcttgataatttatgtcccatcagcttttgatttcatgttaggccgactgaccctatatgactaaaaagcagttacatcagttattttatgtgtgcttcaagttctcaataaaaagtggagtgggatgtctcaaggaaaatcaaagaattgcacatgaatgctacaaccttgctctaactaaggtcaagaaggaaagtacctcaaacaagagttcagataagaggaaaagtgttgcgcaataggaagtcgcccaaggcggggacaaagacttggatcccaaacttggagaaacaaatacaaatgttgggccaatagaagaactggaagaagtggaaatcgatccaaatatcccggccagaaaacttaaaatctgtaacggtttgctggtcgaaattaaatttgctttaaaaaaaatttgagagtaaacctgggcgtgtctgcctggtcacatgaggatatgctcggtattgaccacactgtgatggctcacgccctaaacgttgacccaaatttttcttcccgtctagaagaaatgaagactactagacaaagagcgagcacaagaactaaaagaagaggtagagagatagcgcgcaaagaagttcatcatcgaagctttctacacggcttgggtggctaaccccatacaagtgcccaagcctaaaataatggccagtacgtattgattttaccgacctcaacaaggcatctcctaaggattgctttccacttccaagaattgatcacctcgtggatgcaatagccgaacatgaaatcccaagctttatggacgcctattcagggtacaaccatgttagaatgcattcacccgatcaagaacatgttgggttttgtgcccnnnnnnnnnnnnntttcaatataatcaaatttacttaataataaagattagaaataacatttnnnnnnnnnnnnnnnnnntgatttatttcatgatcatatatatataatgtgtgaattct

SEQ ID NO: 146616 - DNA, 540 bp, Cannabis sativa
gtcgacggagaaaaatcattgtctctgccttttcttgggatgttgcattatttatctccttaatggtatcaataaggcccattgattctagatgcatttcaacatcaataatccaagacatgtaatttttttccatgatatcaagtgcagcaaattcattcttcacaagattttacttggtagcaactataacagactaccgaaaaaaaaaacaacttagattttattatcaaacgtttacagacataatatttgagaaaaaaaattacaaagtggatacaaggtatgcaagaagtaagagaggataaaaaccaaatataaggaaaaaaaatgaaaaaccaaaaaacatcatcttctacaaagtatatcataaaataaactaaaataaagatacaaaataaaaaattagatcaagattaatcattatgagatttttttttttttttttgtatactaagaagacgaatgaagagttgattttataaaattttgagtgagtatttatagaaaaaaatatagccgttgatgaatagtaaaata

SEQ ID NO: 146617 - DNA, 669 bp, Cannabis sativa
gctcggcacgccactttgctcagctccgaacaggatccagccgtccaggaggagggggatcatgaaggggacgctgaggtccaggagattgaggggctggacgacatccgtcccggcagttcctccgaggcggaggaagaggaggaggttgaaccctcaaactacggggaatataatgaggctggggagccagtcgatgctaacggtgatgtcctgatcgagggcgtagactatatcattgaggagcttaatgctgcggttcctcataggaggcaaagtgccttgggcgccaggtgggtgagtcctccgtccagggttactgagatggcctgcggtctgttaaccaggatgactacctgggcgagttggactgctacattccgcctacaacaatcgagccacaaaccctgaaagggggatgtaagcttggttgggtgctcatgcccagcaaggggcggtgatgccgttgcatcaatattttaaggatgtggcggacttcttcggcctctgcccggcccagttcactcctgagggaattaaatatctatctgccctctttgtcctctacgcttgccttaagtggggtatgccttctccccacgaggtcagctggttctttgatttgaagtccaccccaaacaagggaggtcgggatacttctatttctct

SEQ ID NO: 146618 - DNA, 529 bp, Cannabis sativa
tttttttttttcctttttaaatttacttttatccctgccttacaaaaaaaaaaaaattatgccccctcgttttaaattctggattcgtcactgcatattgctattagtgtaattaagtatcgggtgtcatataattgaattaataaattctatagaatatcattaattaatcgcaaggtgccatgctcaacttttttttttttttttgaaagaaaatcatcataacagtaatcaatttgttgagtacaataaagataagagttcagtcgaagcattaaactaaaaaatactacgatcagatgtgaattgagagcttctagccacacaataaactactcgatttgtaaatcgtttaataaaaaataattgaacattttccaaagaagtaagcaactctttacaatcctttataattaatccaaaaataaaggatatagaaagagaacttcagagagcttgaactgaaaccatgttgttcatctctatggttacttgttgtcactgattattttttatccaactaagagct

SEQ ID NO: 146619 - DNA, 1100 bp, Cannabis sativa
gggaccccgccgctaatgctctttgtcagtttcgtgtttcgagacaaacaaagagcattggggcggggtcccgccgctaattgcaattaaaaataaaaaaatatatattttacaaataattttaaatatataaataattatttatatataaatatataataaataaaattacaattaatataatttaaatccaataaaatttattaataagttaaaaatgtctcaaagtaaattactttaacattaatcctattacaatattgtcgcaaaattaaactaaattattaaaaaacataaacaaattattctatgacatcttcattaaggtctccaattataaagtcttgatccggattattatcgttacgagttcccaaagcccatggcggagaaggcacatatgcttgatctgataataaacccagtgttaaatacccgagctcagcttggttaaaaatgggagttgaataaaattgttgctcctgcgatgaactcccaaataatccaaaatcagcaaaatttgagtcgagcggaggagactctgatgggttctatataagaactaatttcccaatggcggaccagactgttgttgctgttgaggaaaagattggggttgctgctgcaaaaaattttcaaattgctgttgtgacaaattttggaattgctgctgcgaagaaggctgttgttgttaaggaggttgttgttgctgttgtggaggagcggcataactctgagaagacgaaccaccaggcgactgcgactgactatacatttgaataaagttctcaaatcgtgggttatataaatgagctcgttgttgaggcgtcaaattacctccaatgtggcacgcatagttcagaatatttctgccacagtgctcatcatttcagtagttggtggaggaggcactgtcgactgactttgagtgaatgacttctttcctttgcccttaagccttttacccacgcctctttgatagtcaaatctttcgcctagaactatttccagaacgtcgaactaataaccagtgtcagattcagtaccagatgtatcgctctgggattgtcgttcaagtcttttcctatcaagctccttca

SEQ ID NO: 146620 - DNA, 944 bp, Cannabis sativa
  modified_base (664)..(667): a, c, t, g, unknown or other
aaaaaaaaatggttaagtacttatagattcacaaaatataacttaagtgtattattatcgcaaaaaattaaatttaaatatttatgctacaagttacttatatatatacgcatatatagttacgtgtacaatgatcgtatcattatatacagggtcggccagagggtgaagtaatcggggcctcgaccccaggccccacaattttagaggtctcgaaaaaattaaaattaatatatatacatataaaaacgtataatatataaatatttaactcaataaattacatgaaaaacgtgtggcataaatggtaagtggagcttttattggccttgagattcaaggtttcatctttttctcaatcaccttttatatttttagttatttgtgaaaagttttacttagcatttcaaaaataaataaagggtaaatactattttgagtcttgtgttttgcaaaagttaccaattggactctctattttgttaaatgataaaatagaccctatattttttaaaatggtaaaaataggaccctgagctcaattttcaacaattttattttttaataatataaccaactttaagacaatttttaatacgaacagatacaaaaaatttaactaattttgtcataacatctctagatcatattattattaagtttnnnnttgacaaaaaattagttcaagatcttatttgtacaattttgaaaaatatagggttcattttgtcatttaacaaaacagaatgtctaattagtaacttttgcaaaacatacgatccaaaatgatatgtatccataaataaataataatattataacttaaatatttttattagactatataaaaatatattaaagtacttttaatttaaaatattaacgtacatttttaacgatactattaataattaataaaattatatttattatctattttttta

SEQ ID NO: 146621 - DNA, 625 bp, Cannabis sativa
cgatgtaatcaaaccccacaatttcaagagataattgttgtaaagattacagtcaactctgtaattaactgcccgactatgtgattataaatagagacaagttagactaaaaaaggaagaaaaattcataagagaaaaagccttagaattgtatcaaaaatctcataagattgactcatggactacgcaaaattttaaccgcaaaaccacgtaaaaaaccttcgtgtttattcttttctttttatttctctactgtttttatttttctgtgcaagtttatcactgtttaggctcaaatttggttaacgaaaatctgcgttgacaatttcgtgctttcattgagagccttcatgtaaaagcttagaaaaaccctccttgcatataaaaaacaatttccttcatggctaacaacacagagaacgttaacacgccacatgaagaaactcatcatcgttatggaaaggagcccatgggctccagaaggcctcccaactcacagtttaaacggaccacttgctccaggaggacccaacctgaggttggccccagtacacgaacgacacgttctaggaggactcaacatgggaatggccaaaattctggagtgagagatgaagggccccat

SEQ ID NO: 146622 - DNA, 501 bp, Cannabis sativa
ctcgtatttgttattcttctatttatattgtttattattttcctatgctctaaaaatatttagttaccaaaaactcgataaacattataaaagatgaatattttgatatatgcatgaatgttaaataattaatatttaatattaaataatttatataaatattaaaaattacttattcatatgatgttgtgacttgtagttgtacaaagaattaagattacttagtcatgaataaacagttaacaacatattagagtttaggattctttaatcaatggttgctactgcggttcactaatgccccttattcagtgtaagtaatcttaattcgagttactgatgtagcatgacatattagtgaaggttctgtatataatagagattatatataacaatgatcgatttgaataaagatgtatttgtcaaacttactgtaaactataaacacctaattcatatcataatgatgatcaattgtagatcgacataaatcctaagtaa

SEQ ID NO: 146623 - DNA, 708 bp, Cannabis sativa
gattgtctatatataatattttatttttaatagagtctacataataaattctcggggtataaataaaatactatttcatagttatatttgtttttttgtcaatttaacaataaaatgtcccaaatttaaatacctttttccccaaaaaaaaaaattaaaataattagcaatttcgctttttgaatttttgacaatactgattcagtcgtctaaaatatacgcgctagttgttaagaatctacctgaacttttacatttatagaatttagtccttctattaggttttgtctcattattccgtttaaatactgatgtatctttgtaaattagcaactttacactctaaattttgataactatcaaatcgtaccccttaaaataaaaataataaagatccaacattatttttattaaatcttaaaaaattaattttaatcttaaaaaaaatcattttgaatgattaaaaaaatcaaaaaagaataaaattttaaaattaattaagggatttaaaaaattatttattttttattaaaaaaatcatttagatattaaaaaaatgcattaaaaattcaatttttgtaaaaactaaattttacgggaacaaactagcttgagtcgatcttatttttctcaaaaaatatagatttgtttaaataaacataacatttttagtttaatttctaacttttttcaaaataattttatatt

SEQ ID NO: 146624 - DNA, 1137 bp, Cannabis sativa
atattgatatcgctcaatttattacactatagttgtgttagtaaacgagttataccatattcacaaggaagtaaattattactaaagagtggtataaatagaatatgttagaaattagaatgaattataaataataaaatgataagatgtgaaatacgagagaggatgatcagataaagaatttagtaaggttgaaatataattatgcaaattttattttaatattaatattaatttaaacacaattatagttctacaccattaattacaatgtgaagatgtatataataaaagtgtaaatttaaaagttacttttctttgttttcaaaatttttaaaattttaattctcaattaaaaatttaaaaaataaaaacaattttatagaatatatttttagaaaatattttcacttttctaattaaaaaaaatagaaaactgattaaaatagtattaccaaaggcaccctaaatgtgtagaaatctctaagagaaaaagacccaaatcattgaaaatttaaggaaaaactgttatactgaattaaaaataataaaattggaatgaatcactgaatgaagattctgtcatccagttttgtgcgcataagtgaggactcacacactagaccacatatatgcgcgcgccgaccgtgctgagttggcggtcaggtgaggtgtcaatttattcttttataaaaaaattatttaattaaatagatattattaattaattaattaaataattattttttaacgttcattagaagtaataaaagcgaccagtcattgatccatttttttgccatgatccaactcctcgtacgatcacattaccgttttcttacctttaattttggatcgactttcctatataagtcgtatcagaacaacgaaagaatgcatctttcaacaacacaaaaagaatttctcttattcctaatgatttttcttagagcaataattaggggtgtagttgagtgatattgttcggtgcagaacgtatcgtatacagagactgttttattagttaacaaaataaagagtaccccttggagatactcttaaataagagacaattcaccgtaatataaatgcacaaaccagggcggcccaagtattttgggggccttgtgcaaaatt

SEQ ID NO: 146625 - DNA, 772 bp, Cannabis sativa
tgtagaaatattagacaacgaagaagaagaaatggcagatgtaatggcggatattttaagaaaagatcctagttttgacgatccaagttcaaccattaattcctttaatgagcctcctgtgaatggtggtggtaagtacaacgatttgttcaaaaaaatggaaactaaattgtacccgggttgcaagaaatcagcgctcaatgctttggtgaagttgatgcactgcaaagttctcaataagtggagtaaccattcttttcatatgttactcaccatattgattgagttatttctaaagggtacaaaattacccaagtcccattacgagtcgaagatgaaactgcgtaacctttgtttgggttatgaaaccattgatgtatgcaagtataattatgccttattttggaaagagagtgaaaaaaagaagtatgtcatatttgtggcgagagtcgttgaaaaaagagaaagggagacgaaaaaaaattgctagaaaagttttgcagtactttcctttaattccgagactgaagaggttataaagtttaagacacttggcagaagacatgtggtgacactactttgagagacctaaagaagatggcgttcttagacaccctacagatgcaaaagagtggaagcagtttgacagacgtcatccatcctttgcacttgagcctagaaatgtgagattgggattggcaaccgtctggttcaatccctttggtaacatgagtaacgcttacagtgtgtggcctgttattttagtcccgta

SEQ ID NO: 146626 - DNA, 1176 bp, Cannabis sativa
  modified_base (698)..(702): a, c, t, g, unknown or other
  modified_base (1110)..(1111): a, c, t, g, unknown or other
gtcagagtcgtatccagatgattttcctaattcccccacttaatatctcctaaacttgtcctccagctcgtttatccgcaattagattggatcctctagttttggaccaagctgttggcaaaggtcaggtttcttccgattcaagtgctctcgcagatccggttgggagtaattgctggcagatccaatggcgagctggaaccattcttctttgcgaggtcgacaagatatgtcttgcgtcgatcgcgggtatacaaaaaacttctgacttgccagggttatgagcctcgttcctgttagttggaagaaagtataggaagtttcctcgtagtgagatggtcatctcacattcttgttcttcgagccgattcgacttttacacttagtttgtttattgcaagctaaggtatgtgttacttttctccagtgcctcgctattctcctttagggacatatggtttctagttaatacactaagtaccaggtcgtacattgattcctcgccaaagaccttacagtcagcgggtggaaaatatactttgatacttacgcaattaatgacttattccataaaaagatatagcgccgattcacattccttttaccttgactcgtgtcctccagccaaattttgggtataacaatggtcataagagaagaaaactttttataatattacgagcatgctattgcaaaannnnngtatttaaagcatgtatatgtaagttattatgatagagtacgttttggtatttaagtaatgtatagagaaataataatacttaattaagttgtttgtattatatgtgttgtgtattgacctataagacataggttaaatacatgtttgttgggaccatatagtagataaggaggtaatgcggtaggtggtaaaagatatgaagactcaacaccccgagtgttggtaagttatatttcgaggacgaattttttttttcaggagggtagaatgtaataaccagagtaaaatagtatttaacttttcttgggatattaattgtgcgaggataagtatctcatttatttgtgtttgttagtgagttgagaatattgcttagagtaattgtacctgttgaccgaggttttcgnnaaccaataaaatattataagattcgagagctgtaagaaaaatagagaaggatttttacgtggttg

SEQ ID NO: 146627 - DNA, 599 bp, Cannabis sativa
gctcctaaatcataataatcacaacactgataaagtgatacgctaaatcactttccggggacttaaacttgaaactaaaagttgggaataacctaaataacacaaaaatgggaagaactagggttcccaaatttgccccaaccggtagacaggttcctcaaccggaattctggttttgggaaaaattcctggaagccaactggtcgaccggttcctacaggcctccctgaaccggaattccgattcagtgcaggaatttttcaaaattctataactcgaccaattcaaccacaaaccacctaaaattctccagacattctccaaataccccaaataacaattcaaaagcaacaaaacaacccagcatgcacagaattaaaatccaccattaaagctccaaggtttgagttcaaaactccaacttgcttaaatccaactaacatgcatcaaaacctgatctaatccactcaaataaacatgaataagcctctgaaaatagcaacaaccaactaaaactagcacagcaagctaaacaacattttaccataaaaaccaaagttttgagtctaaagctttacacatggttaaatcccaccaac

SEQ ID NO: 146628 - DNA, 886 bp, Cannabis sativa
gggcataaaacccaacagttgggccaattgcttcttcagctcttgaaatgcgttttcacatttctttgtccactcaaatgcctctaagaatgttgaagaaggttacgcatttgtctgtagacttacaaatctgcttagtgcagcaatgcgtccagttaggctttgtacttctttgacagttgtgggcgacttcatgtccgaaaagactcggttcttgtctggatttgcttttattcccctggcgttgactatgaagccaaggaattttccaagcctacaccaaaagagcatttgagggggttgagcttcatgttgtagctgcgaaagattttgaagcactcgcctaggtctccacatgcccccaagcctttttggacttgacaagcatgtcatttacgtacacctccacgtacactatttatagggacttaatgcatgaggatggtttcccatttggttacagtgcacaaaataagaaattacaatgattctataattacgatatacaaaataggaaataaaacaggttgccatttccctttgactcaatcccaagattattgggattgtcttcgcgtctggacaatcgagattaatctttgaatcctcgtatgttgctcgacaccaacacacttctacctagtcgggtatcttctctacaaccctgctcggataacaaactattacaaatgttgattagtcatgtgcaggctactagggatattttcctcaacctaggtatcagaaatatgggacaagtgtcatttgatcctattgccacgtcaaggtgcaaaaaactggataatacaaattcaaaggaaaaaaaatttatgtataaagaaatatttaattttgttttaaattgtatgtagaaaaaaaattatat

SEQ ID NO: 146629 - DNA, 500 bp, Cannabis sativa
  modified_base (308)..(315): a, c, t, g, unknown or other
gaattaggtctttatagtaaacggtaagtttgataaagatagctttattcatatcggtcattgtcatatataatctctattatatacaacaccttcacttacattagtaatccgaattaagattacttgcactgaataaagggcatcagtaaaccgtactagcaactaatgattaaagattcccaaactttaatatgttgctgagtattttattcatggataagtgatcttcattcttcatacaactacaagtcacaacctcatatatgaataaggaattttgtgatatttatatataaattattcannnnnnnntattaataatttaatattcatgcatgtatcaaaatgttaaacacttattaataataatcaaaaaatgtctttataggcttttcaaggcataaaccctaacagtatgaccaacgttactcgacacatgatttagaagttgttactgttgtgtttaacctgaagatttggcggcattacttgtatgg

SEQ ID NO: 146630 - DNA, 724 bp, Cannabis sativa
aataaacatatatgaactgaaatatacttccgcaacatgaattttataaataatacttaaatcccataaataaacccttattatttaataacccaaaacattaatcttaggcggtctttacaatcactcttgaagtgatttccctcaatgagacatttctttgtaaatattcattatgttgagttttattcttagacatattcaattgtgtactactgagtattcctaatcaacaaaaaatccatcattcgttcattctcgggctaagtttttcttgtctaatttcaattaagttgtagttttgaatttgtgattggttttagttttgctagcttatgcattcttgaaacattgttactgctataacaatcagttttggggtaatcaagattcatcttcaacatttcaagaatcaaactcgaacattcacgaactagattctagcaatcaagaatctagtttgaatggctacaacaaggtttgaggtggacaagtttactagttccaatgatttcagccattggagaatcaaaatgaaagcttttctagttcaccaagggatctatggagcacttgatgctaaagccattgaattgattaaagacaggaagaggaaacttgaaattgaagccaaggcacatagtgccatccttcttagtcttggtaatgaggttttgaggaaagtttcagatgaagacaaggccttgggtctctggaacaagtt

SEQ ID NO: 146631 - DNA, 781 bp, Cannabis sativa
ctcagggtaaagagtcatcatcacctttttcaggttctaggtgaccatcgatatcataataatactacatttgaagaattaaattattagttagttgtttgattatttatgaatgaaatttattatatccattaattgattaccttcattctctgcacaacttgttctttaaaatgttgaggtacatcactaaaatttaagtagttcccctgcaataatgtgctcacttcgacacccaacagtcggatgaaagcttggttctccaagccaacaacttttcctgttgcaggatcaagcgtaagcggcaatggcctttgattcgctcgcctgcgagtctctaatggtatattactagcaacaccacgaccttttctttgggcggtggtgctgcctcgcaagttgagggtaccctactaggatctagtggatcaaaaccatcaccatctcccccgtgagaagaagctacatcggctgacattatgactctttaaaagcaaagttatatgactaaattagtatgaatgtaaattagcaaaaaatatttatagtttgaattacaattaaaatcctcaaattcatcacttataatattattacaaaaaattaaaaatataagtaaactaatagtcactatcacactcatcattttcagaaacaatatcgtcttcacatcgattaattagcaacacgtcaccttcatcagctattacatcatcaacgtcaccatctatagcattttcatcagcctgattaacattcaaattttgtgtagtatcaatta

SEQ ID NO: 146632 - DNA, 804 bp, Cannabis sativa
aaggatgaaaggcaaatttgaggtgttatgggaaggtccttatgttgttactaaggtcttcctaagaggggcatatgaactatcaaatttagaaggccaacgcatttattcgtgtgttaatgggaagttcatcaaaaagttctacacttaaacaaaaaggtatttacccatggtgtagacagcgcacttagaaaaaagacgagtgtgcaatgaacacgtaaggcttgatcccacttcgggtacgtaggcaatctagttataactaggcccaaccacacaaaataaaaaattttatctcctaaaaaaattgtaaagagctacgaacggcttgatccctaaaagggtacgtaggcaatctaaacaaaattggatgcatccacaaaataatatatatatatatatatattatttattcttcctaaaaaaggagtcaaaattctaaaaggtctaaatgataaaatactattagtcctcaaggctaataaacaaaaaaaaaaacactaaaactaacaaaaattaaaactaaaactaaaaagttttagaagcaaaatcataagatctttagtccatctggagaaacaaagttaaagcgccgagtcttctctggatttcttcttcttgaatcttgagtgttgttttctctctctcagcttcatggaatttttctacactagcttggtcctttaaccgacttatctcgttagcgagatgttgttgctccttcaaggaatcattgtcttgttaaaaagatctacctcaaatgatgcttttttggctttgaacttagctcgtcgttgttgtatg

SEQ ID NO: 146633 - DNA, 503 bp, Cannabis sativa
atatatatgacgaaataaattgtaaatatttaagatattttataaaattttaaaaaatgttaaaatattacaaaaataaaaatttaaataatatgttgtttattttattggattattagaactttattttatagtgtaagttactttaaatttttaaaaaatttataatatatcttaaataactacattatatgatgtaaaaaaaattataaagagagtgcatgacacacaaatttttttaagaatttagaataatttgcggcataaatacttaagtttaactcatagttgcaaataaatacctaagtttaatttttggcagtaataatgcctaagttatacttctagaactcctaggtacttggccgttaaatgtcaagtgattatccacgtatcattttcttattgatatttaaactatatttaaaaaaaaaattaattacctatattaattaaggattatcacgtggtaatttatttaacacttaacaactaggtactta

SEQ ID NO: 146634 - DNA, 618 bp, Cannabis sativa
  modified_base (41)..(73): a, c, t, g, unknown or other
actatgcaacataaaatgcagtttctgatctttattaattnnnnnnnnnnnnnnnnnnnnnnnnnnnnnnnnntagggcacaaaatccaacatttatgtcctaaaagcaagtacttaatgaataatatattatagaacatatgaaatacaattataagataaatggtatattaattataaaagtataattattaaatatctgaaaatttcctattcgtatggagaatgtataatcttgtaaggatgtacaagagaattaagattgtacgatattaataaaataagttggtagtgttttaaagtattgagaatctttaatatggaattgctaagtacagtttactatacactatacttctagtgtgtgtgattttaattcggatcacatatgtagatggacatgtagtaaaggtgttgtgtataattagattatgcatgactagatcgatatgtaataaacatctttcattaacatgtcgtttaccatgaaaagagtttattatatgacaatgatgatcattagttgtaatgaccgctttagtaatttggattagtaaaggcaattagcactaatttctgttattttatgaaattaattatttgtggaccccaacattt

SEQ ID NO: 146635 - DNA, 507 bp, Cannabis sativa
tcaaagaatcctgacgtgaccctagtcggccaagaggccgaacaagttcatccatctgtgcaagcatagttggatgaactgaaaaacatgttccaaggtctggccatgacaccaagttttaccgttttcatggagattatggccatgacaccaatgaatgcaacaatttaaagcaagaaattgagtttctaataagaaagaataacccgcacgtgtaaaaatatgtcaagatcgatcaaaatcagagggtcgcccaagcagacaatcaccaagatttactgccaccacctgtggatgagcatttgcaagttataattgggggcccacacatagttagagattcaggcaaagcccaggaaaggtatgcctgaacgttacagcacgagcaaaaagaagtcgtcctgatcgttgaagaaaggaagccaaaagtaccgcgggcaggggaacccaccataacgttcaatgaagaggatgctgtcaaagttaatttcccgcacaacgatccgt

SEQ ID NO: 146636 - DNA, 750 bp, Cannabis sativa
gtctagggtttttggccatggtattggataccactcggtctaactctgttcggttagaacacatcaaggtggttcaggaatttctagatgttttctcgatgaattctgggtttacaacctcagagagaaattgattttgttattgacttggaacttggagcagaaccggtttctaaggccccttataaaatggcttcagtagaacttaaggaattgaaaattcaacttcaggggaagaccgtctttgtaaagattgatctccgtgattgctatcatcagttgagaatctgagaggaggacattcgaaagacggctttccgcactaggtatggacattatgaatttgtggttatgtcttttggaatgaccaatgctctcgtagctttcatggatctgatgattagggtatttaaggatttccttgatatttgtgttattgtatttatcgacgacatccttttgtactctcaatcagaagaggagcttgagtaacatcttcggatggttttgcaacgaattcaagaacataagttatatgccaagttcaagaagtgcaaatttcggctatctcaggtgtcctttcttgggcacattgttaacaaatatgggatcaaggtggatccaggaaaaatagaatccgtcaacgattcgccgagaccaaaaatagtgacagaagttagaagcttcttgggtctggctgattattgtcgtcagttcgttgaagggttttctaaaatttcaacaccctta

SEQ ID NO: 146637 - DNA, 787 bp, Cannabis sativa
ttttttttttttttatgtttttgggttatgatcatttattttgcatcttgtcattccatttggtttagccattttgggtaatttttagggtttaggcatgatataaattttggtttctcatattctttaagcctctggtctaataaatttcatccaggaattgggattgttcttttttttagagatatcccaatctggttcagaagtttattctgtagagttcatagaaatagaatatcctaagcagttagccctcccattcaaacccagaaatctccaacctcagtccaaattggagataagtgatgccaaaattagggaccatttgattaagtcaaaccaggaagaagttgtcagtcgttataggcgatttctataagagatttatgagggcaaatgtctttttttgtgagacacagcctggctgaacccacaatcttattgtaacgccctaatactaaggcacactatagtactttttcaattacattgctatctttgctaatcaaagaattttcccgaaaaacgtgtcaaattaaacttttataataaatattaaactttataatttacatagtctttgacaaacaccgggatcctgtttctaaacttttatacaaaatgtaccaaatacataaccatgtcgcacagcgactacaaaatactaaaccccagatgtcccgagaccgaacactctaggtcgcgctgccacgacatgtacaacctcatcttagccaggctaactcctattctgattacgcctttcctttacctacacatggaagca

SEQ ID NO: 146638 - DNA, 515 bp, Cannabis sativa
  modified_base (455)..(456): a, c, t, g, unknown or other
tttatcttttctggaatagttgaaattgttccttagagaaactctatgtctaggtaccaaaaggcttcctttagaattagccattagaaaaatgctttaatattttactaaagtaagttgcttgcactagagtaaataaattaccagacataccgcaagccatacgtttagataatctcaaacctatgatactaggatcagaaatttttatcaagtccattgaatagacttattatccaaaaatttctttcttgtccttgtaatagaaaactttttagttactccatatgaatggttttaaccatacttttctcgcctttacttcttagttccttattctaattatctattacttgtttaaactaataatgaacataacgcttatccaaggtgtaagtatactttatccaaggtgtaaggatactttatcgccgattatcacatcagtgtaaatnnagtgcactgatgaatcatggacattgtcttttgaagtatataatcacaatcacattcca

SEQ ID NO: 146639 - DNA, 502 bp, Cannabis sativa
  modified_base (418)..(423): a, c, t, g, unknown or other
aacagttcatagggagccatccccatcgtactctgataactgttgttgtacgagaaatctattgatggtagatacttactctaatagccttcaaaatccataacacaggctcgcaacatatcttccagtatctgaatcgtcctttctgattgtccatctgtctgtggatggaatattgtacaaaatttcagttttgtacccatagcacgttgcaaactctatcagaacttggaggtaaacttcggatctctatccgaaactatggattttaataccccatgaagcctttttatttctttaacatacaactctgctaactgatccactgaataggttattttaactggtagaaagtgagcagattttgggaattgatctaccacaacccaaatagaatcaaacaaacccgtggttctannnnnnccaaccacaaagtccatcgtgatgtcctcccacttccatcgtgatgactcattcccttcaagatctctagcccttgatt

SEQ ID NO: 146640 - DNA, 637 bp, Cannabis sativa
  modified_base (566)..(580): a, c, t, g, unknown or other
agaggtggagttactcatattttgtaacttccacatgatcaccaattaagtgtgtaaagagtggttacacaatttaattttttaaaatttaaaactataattcaaatttagttgttggggattgaattctgtcatttataatttgtataagtgatataaaataaagtgggaatagtttagaatggtttggaaagttgtttgtaaaagttgaaaaaatttggtaactagtaactatagttactatttttttcagctttaattgttgaacgtttttttacaatggggatgctttttaacaactctcatagcctctgaatcacccatttaatatcatttatacccaattaagagatggtaacaaccattgcgtgtaggatgtttgaatttcaaagtgtgtgatcctaaacattataattaatagagacattggttcaccttttgagacacactcttctcttttatctttcaaacacaaagctagagagttctaaggcttgataattcttagaaatatttccacaaagccgtttcatagagggggaaataatcttcttggacaaaggtgnnnnnnnnnnnnnnnagcttttggtgatccccatctccactttgggtgtttgttcttctttcttattttgtt

SEQ ID NO: 146641 - DNA, 1877 bp, Cannabis sativa
ctctctctctctctctccaatcacactgaaatcgaaggccataccgctcagtcgctgcctctctcctttcttctctctttgtctgaccaccgatcagtggtagctccggcaactaaatcccttctcgaccacagccttttgccttctctacaagtttttcactataaaactcactgtcaagcagatgcacaacctcttgaagcacactaatttgacctacataagagaggtatgtgttcgtgtgtatgtcaattgtcatctgtatttaagactcattctcctaatatacaaagcaaagaatgaatgaagtggtgcaactctattttcttgttgatcaatgctaaaaaagagtatttattaaataaaaataattccatataatagaatgttgttcgctgtatgtatgattcgttgcctcttttgacttttaatatcatttgctttggtctcttcaagagagtatttggcagagagtatatggtctctttttctttcttattacatgatgggcaaataagaatcttctgctaagtagtttctctataatagtaatattgttaggccaataaagtgacatgagtatatataatttggtggctagacaaggcagtataacttttgcctaaaatacactcaaatgtgaggaagggaggttagaagtaatcacaaaaaagttgacctgaaaatcatgttgttttaaaacttaaaatagggtttagtataaaataatcaacctgctcttactacataaattaaattaggcataagtcaatatatagtttgttttcaagttagttttgattgttccctatttaaacttttctttgatatatgctcgcaactctattttttaagtatgtgtttcataatgaataaaatagtagattaaaaggcacacaagaagactaataagttgactttttgcttctttctattgattcttgatttttttacatggtttatatgttttcagaattttgtaatggagttttaatttacttgctttacacatggtttttattgttatatttttaattggttgtttgatatataactagtttttttgttttagtagtttaattttataagttatttcttaagaatttttatatggtatcttagtatttttttttatataatatatattttttctaagtttatgatattttatttattttttatatgaggaaaactggttttataatttttgttaggattttgtatgagtcacaagttttttttaatggttttagaggttttgttatgacttctcatagattcaaaattagtttcacaaggttaacaagttcgaaacttggtttcacatgttttgagagttttgtaatgaattgctccattttatgatgttattgtatatttttttaaaatttctttttattattttgtttctaggtttgaaacttattttcacacctatattttatttttagattattgttgtgtattgtgtattgctttgattatatttatgatccgtattttttatttttgtatttgtgtgtgtattttttttctcatttagtttctgatgaaattggtttcaattaactttcattgttcatcatttatgttttgttatgattttttataggatcgaaactagtttcacatgttttacaaattcaaaactagtttcacatggtttacaaattcaaaattagtttcacaaattttaagggttatgtaatggagttgttccatttttttgatgttattgtattttttttattttaagtttctttttataattttatttctaggttcaaaactagttttcacacttatattttgtttttagaatattgttgtgcattgtatgatgttttaattatatttgtagagtttttttttttttt

SEQ ID NO: 146642 - DNA, 533 bp, Cannabis sativa
acaaaattatatactaccattatacatagcaaaataaaaataaatatcatctaagaataataatataatatacaacaaaaaagaaatatactgtacaaaaaaaaaatctatataccaactcataaaaaattaaaaaaaatcgacataactttcaaataaaaaagattttgacaaaactaatatggatataccataatctttaagcaaattgtttctgattctaaaaaaatatgaaaaagaaattacttatttttttatgtggcaaaagacaatataaataataaataatttaaaagggtcattttgctacaagttttgaaatgagaacatttaataacatagtcctatgatttgagaccatttactataatttcccttacttaattaataagaatatatttcccattttataaacgatactctaatatataatattttattaattaactctacaatcttaaattctaataatgtgttataaattaattcaccccttgaatggtattttaataaggatcattttttaatgggta

SEQ ID NO: 146643 - DNA, 547 bp, Cannabis sativa
  modified_base (45)..(50): a, c, t, g, unknown or other
ttgtcatttaacaaaacacagggtccaatctgtaacttttgcaannnnnngggtctaaaatggtatttacccgagaatatatctaatgtgaaatagtaataattaatgacattatatgtatgtaataatatatatatatatatatatatatataagtctatttttcatgttagatcaataaacacttctatgtactgtgtctgtaaagtcgatcatgaataagatatttataatttctagctttatatgactcctttcagttaaatttagataatacactaaaattttggaaaaaattacaaaaatactttaacgcgaaaaaaattttatttttactttttgaattttttttatttacataaaatacctcttctgtaaaaataataaattgttttcttaattgttttgtaatttatttatagttgtattaggttgtttttctggttatcttttgttgttttatagtttatttataattgatttatagttgccgtgaggttgatttctcattattttttacttcttgctgagcaaagtgtatttttgt

SEQ ID NO: 146644 - DNA, 1343 bp, Cannabis sativa
ctctctctctctctgtaaacacacacatggaggagcacacagtcaacccacaacccaccacccataaccttggtcccttttctccacgaccaccatgatcacagacccaaggacccaatgaccatcgctgacccaaagacttctccatcaaccacgacttcaccattggcaatgttgtcaaagaaataaattgtatgattaatatttgttatctgtgagtagatgttagatttagggtcgaaaataaccagatctgagtttcgggaaaaaagttggtttttttgttagacccgatggtggtctgatgctttcctgttgttgaaatgagtaaaggttgaagacgaaggtctgacgatagtccgatagtatcctaatgatatggtccaatgggggtttgatgatggtcccatggtggcccgatgccttcttgacgagcttaatgaatgagcataacatctataaacgtagatatggttcgatggtagtccgatggtcacctgatgctactttttttatgtacaaaaatatataaaaaaaaaaatgggtagcatcgggccatcaaagcacccccatcggaccagcatcagtatagataggaatagagagtatggaatatggtgaaattagaagtgaagagaagagagaagggtataatgggtatgaatataaagtgtgcctattttttttaaaattttagtaagcttgtgctcaaaaatttaatataaactaaatgtatgcatataaattcaaatttccctaacagaaaatgtgatttttttttttaaatattataatttaaatttaaattcactatacatatctcgtttattttttagaattattacataaaaaaaataaattgacactttatttacagaaatacctctacagacaacatctataccttttatatgattttaattaccaaaataccacttacattatcacttacacaatcagacaatggttacagggtggttgctgcgtggttgcgcagtggttgcatcagacgaaggtttcaatcagacgatggttgcaggatggttgctgggtggttggccgaagattgcatcagacgaaggtttcaatcagatgaaagtttttgggtggttattgggtggttggccgaaggttgcatcaaatggggttttcaatcagaagaaataactgttaccaaaatatttatgcaactgtaatgcaactattgtaaaacattgaaaattagaaaagtattttcacatatgtaactctattttacatgtctctttatgatttaatatgaacaaatttaccattagaaatttggaaaacagcgaaaatacaccagaataaatattttacta

SEQ ID NO: 146645 - DNA, 1079 bp, Cannabis sativa
  modified_base (1021)..(1022): a, c, t, g, unknown or other
cttcaaaaatcaaaattgaaaaagaaaagagtttgagagagagagagaagggggggggtcggttgaggggaagggataaactagaattttcatttcattttctcaaaatttcatctttaatcaattaacaaaataaaggtcaaaagaccattttgccccaagggccatataacatgaatttacactcacaagggcataattgacattccatgcataattaaatccaattaaatttttagatttctcaacaataaataaaatgccaaatatttcaatcccaatttgcatttcgggcccgaacccggttcggctcgaaatacccagttgtgactataccgcgccaacctgtcaaaatacacctgaaaaagacatcacaggcatactatataataatatagttctataagcacgtaaataaattaatttcactattttacccttctcgggccaaaattactaaaatgcccctggctcaccaacggggtctttacatattaaaattcatataatttcacatatattgaactatataataatataattcctcaattactcataatcatctaattagggttttgctaatccatttcttaattacagggtattacatagagagtcttgatctctgcacaggcctcattcccctcatcatcagaagatcccatttcctgaagtcgagatctatttcccaacctcaggaaatttctcaacactgaagagagtctgacgcaaagatctcctagcacaagttgggatctttggttggctggattctgtgatagaaaccacaccaacttcctttccaaatccacctgaaaccatgccaatcatcctttggaattcttcatcagcctgaggaggatctttgagatttctcacaagatctataccctctgggatcacttgtgaggatcagccatggcaggctacagatttcccctggtttgggttggtcggaagctcctcaaccctagaatccatcgtttctggctttgattgaggcttgaagtctgtaggaacnnatggaaaatggttggtgcatctgggtattatgagtctggaaggataaacttctgaac

SEQ ID NO: 146646 - DNA, 683 bp, Cannabis sativa
gagttcggaatcaaaagttatgcattttcaaagtttcaacacaaactgccctaaaacacgagggcgggccgcgacatgcccaaaccatgctgcggcacctggaacaaaacccagaaaccagcatgcaaaccttcgaatttcagcaaaataacacaccctattcatcccaattcacatccaaactcacaaaacaattccacacgttaacaagctcaaagatagggtattaaaattcatacaacatgcatcaatacccacaatttaccctgaaattcagattgtttactcatctcataatcatgcttcaattcacaactcatcaagctcataaacatgaacctcaacctattccaacccataacttccagctgcaaactcaaccaataaacacataatttctgacctagaaaatacttaataaactcaaccaataatcaacaataacctcacaacaatatcttgaaattcacaataaaaaaaaacaaggtcaagcacaaattcctcttatcatgcaaatccaagaacaataccacttttcatgtttttcaacaattaaaaaccagcaagaatcccaattaaattcaatgaaggagagttacctcaagccttaagcaagaattaagcaaaagcacaccaaaatccaagttcaacttcaagcaattcctccaaatcaagaaattgaa

SEQ ID NO: 146647 - DNA, 939 bp, Cannabis sativa
attaaataacttgaatattttgtacatttctagctacaattattgtgttaagtagaaaataaaattaattaaaaataaatatataaattctcaattaaaaaagtaattattaaaaattataaatagtcacaaggtaaataagtaaaaaaaattataagtttggagttatgtgtagagttttattagttagagctaattaataatatttaaaattaattataaataaaaaaattattaattatatttaagttttcaagaattaatttgagccatttgattaaatcaataactatacctatccataggtaaaaactacgatacctattgtattagctcccatatatatatataagtatgttatataaaatttttattttatatatatttttaattattttttttctacagtataaatttatatgcatttgataaaaataatttttaatacttttaaattatatttttattacttgtaaaataaaaaattgtagtttataagaaacttaggttgatattttttgttaataataaaaatataaatataaatataaaatattttttaaaacaaaataaaaagttagaaatttaaatattatttattttaaatatttttattttttgtaatatatcataaataattaaataaatttatagtaaaaaataatttattatagagtcttttaatcaaaataattttttctaaaagttgggttgtaccagctttagcttttagctatagtttttccataaattcttcaataagctattttttaactgcttatcaaatacctttttaccacagcttttttgaaaagcagcttttagcttttccaaaaaaaatgtgccacacgggcccttattttaatctaggaaaagaacattagaagataattaagtaaatcttaagatcaaaagaaggaactatatgttagtcgataa

SEQ ID NO: 146648 - DNA, 513 bp, Cannabis sativa
tatacaacagtagtcatttacttaataaagtgctttaatttaaatagtcacactcacacatgcatatataggtctatcacttttatgttttgtttttttatagtgatactatactatcaaccttttattacaacatcttcgaaaatacattctgaaatattttttttcagaaaatatttatgacaatactcgttatagttacaacattatctctgtaaatttttgaaaatttttgaatagtttacagcaacaaaaataagtttgaagttattttaacacgcatggtaaactagaatatcaggaaccctgtttttcgtactgtaaactattcagaatttttaaaatttacaaggatgatgttgtaactataacgaataccactataaaaaaaatatattcaaaaaaatatttcaacatataattcgggtatagaggttaactaagagattgtaattaatattttttttattaatctttttagatttgcttctcaaagtttaaaaaaaaaaaaaa

SEQ ID NO: 146649 - DNA, 615 bp, Cannabis sativa
  modified_base (171)..(173): a, c, t, g, unknown or other
  modified_base (587)..(589): a, c, t, g, unknown or other
ggtatggtgtcaagcgttgttggataatatactccacgcacaggagacacaactaacaatgaaaaaacatgcacatagtatgtgaattccaaaaagtcttttctaaatgatctaccggggataccctcaaatagtgatgtagagttcatcatcgaattagccccagggacnnntccaatttcaaaggctccatacaggatggcgcctaacgaattataagagcttaaaatacaactacaagagctcctagacaaagggatcattagaccaagttgctaatcttggggtgctctagtactctttgtcaagaagaaagatggaagtatgaggatgtgcatatactaccgtgagttcaacaaggtgaccatcaagaataagtacccttttccaaggattgacaatatttttgatcaattgcaaggctcgactgttttcatgaaaatagatctaagatctgggtatcaccagctgagggtccagacggaagacatacccaagacatcattcagaataggatatggacattatgagtttttggtaatctcttttggactaactaatgcctcaactgttgggttttatgcccnnnataaaactctttacaatctgattagt

SEQ ID NO: 146650 - DNA, 739 bp, Cannabis sativa
tgtaatttcaggtgtacaagacgaggcactaacctcattacacggacgaaatataacgactaatgagacacttaacgtataatacacagtaagatagtcgtataaacatatacaactaatagcgaggtatccatcttgccataggaaggcatgctcacggtaccttcactagtcaactccaggtatctttcaatgagattcacagctccgtcgagccaattctctcagatagaagctaacattcaaatgatattggctgttgaagttcaccttgtcatcaagaactgcgattgttagatggagcgtagaagcgacaagatttacattatcaacctcgaaaagatatgggaaaagctccagctcgctatctaggtcattgacactgagttcctatcgagacaccccagaatattatgatttataacgtgtttaatacacgtaaaagtggactaatcacagatgtgtgatattcaaatattaaccgcatttatattacgtgatatgtaatcaaactccactatttcaggggataattttcgtaaagattacagtcaactctgtaattaactggcttgactatgtaattataagtagaggcaagttagactgaaaaggggacaaaaaatgaataagagaaaaggccctaaaaacactatcagaaatctaataagattgactcatggactatgcagaattttaactgcaaaaccacgttaaaaatatttgtgttcatactttt

SEQ ID NO: 146651 - DNA, 659 bp, Cannabis sativa
ttttcaaaatgtataaatttttaaaataatttctttttgcacattttttgtaattattttatttttgttgtacattcatgaaaaaagcccttaaataaatattagtttgtcgacattcattttctctattttttttttttagttttaacacatgttgcccttaaaaggtaataaaacttatctacaattattagtggcgactcacgatagtcgttcttaataacctaactattagaggcaactttgtaccactcctaaaatagctttacggaaaagtagtgtttgtctatattttgggttcatttggtaggttgtctaagtgtggtattgtactatataacaaagaactatatttataaacattttgtattatataaattattacgatcataaattttaatacaatgtgaattgtattatgtaatacataaaaaatgatataagcttatttataatatttagaaagggttagggattgggacccggaccttgactctagacccagtccttggaccctggatgtcatgcccccgcatcaagtcttcattgggtatcctcctacgaactcatgactcttatacataggtacatccaggggcggacccacattgtagcgagggggggcagtcgccccccctgaaaaaaaaaatcgagaaaaa

SEQ ID NO: 146652 - DNA, 722 bp, Cannabis sativa
gtacaattaattatatgaaatgaattaaatgcaaaattaaagaatacacttaatgacagatttttcaaattttattaatttaaacaataaattacataaattttgtaataaataattaaatacacattattacatacctaaataaatcatgtaataaattaccaaattaaaataaatttccgttttcaatttatagtaaataacatattaattctaaatatatgtattaaattaaaaatagaaattaaattaatgtaatttattgactaaattaacacaaaataggaaaataattaatattccaaatacataaaaattaataaaaaaaattcgattttttttttgaaaattaacactgcctaaacgacatgtcgtttttgcaaaaaccaaaacgacacgtcgttttttccaattatgaagggctggtaatgcatgtaaaaaacgacacgtcgttttccccaagaggaaaaatgacacgtcgtttaacatcctgaagggctgcccacaacgacgaaaaacgacatgccgttttccgcatggaaaaaacgacacgtcgtttgggcaaacaatagcagccaaatttacttgaaaaacgacattattatatagtatatgaaatataatatatatacgatatgaaatgcggaaaataaactataaccatatcgataatatatatacaatgaaggatcgaaatacctccagccattgatctttgaact

SEQ ID NO: 146653 - DNA, 624 bp, Cannabis sativa
ggcccggatggtatgacaccgggtttctatcaaaaattctggtctatagtcggtcaagatgttgttaatcaagtccaaactttttttgcatcttgtaagctacctgctggtttgaaccacacgaacatagtgttgattccaaagaaaaaacagccgtgtaccatgagtgatcttcgtccaatctcactctgcaacgtcctttataaagtgatatctaaagtaattgctaatcgtttaaaggttgttcttaatcatattatttttgagaatcagtcggcctttatccccggtcgcctcatttcagataacattatgatcgcctttgaggttatgcattactggaagcgcaaacgcaaaggtaaagagggctttatggcattgaagcttgatctaagtaaagcttatgaccgagttgagtggggctttattcgtgctatgatgcttcgtatggggtttgctagctactttgttgatttaatcttggaaactattagtacggtggagtataatgtggctcatggtggtaggcttcttggcccaatttgtccaaaccgtggcatacgccaaggcgacccgctttcttcatatctatttttaatctgcgccgaaggtttctcatcactg

SEQ ID NO: 146654 - DNA, 999 bp, Cannabis sativa
  modified_base (964)..(971): a, c, t, g, unknown or other
ttactttgtagcaatatagacccatatctgtttggaaacttgtatgttctaggtgtggtggatgcatttttatctgattgtacctcgaataggcatccatgaagcttaatatttcatgccctgttgttgcatccacgagctgatcgattcttggaagtggaaaacattctttggggcatgctttgttaaggtctgtgaaatcaataaacactcgccattctttgttcggcttgggtaccagtacgggatttgcaacccaagctgggtagaaagcttcaactatgaaattgttgttgcgtagctttttgacttcttcttttagggctagtgctcgctctttgtccaatatcctttgcttttgttgaactggtagaatgtttagatcaatattcaggacgtgtgaaatgatagaatgataaattccgaccacatcctcatgtgaccaggcaaaaacgtctaggtttgctctcaaaaattttatcaatcctgattttacctcgagcaacaaaccttttctgatctttagctttatggccaggatatctggatcaatctcgatctcttctaattcttccacaggtccaacattactgcttgggtccccaagtccaggatccacatcttcatcccgccttgggagactccctacttggaaatgtttttttcccttgtctgtgctctggctggaggatacctccttcttagctttggctactgcaaggttataacattcccgagcggtttgttggtctcctctcagacaccctaccccattctttgttggaaacttcaggcacaagtggaatattgatgtgacagcctttaagtcatacaaagcttgttggcctagtatgacgttaaatgctgaagggacatttaataccaggaattgtgccatgatagtcacgctcgttggaacttgtccaatagtgaggggtagacgaatttgtcctagaggtgcgannnnnnnnccggagaaaccatagacaggcaggagac

SEQ ID NO: 146655 - DNA, 526 bp, Cannabis sativa
gctcttgtttgttctaactggttccagaggtttcgtatggctcagctacataacttggaagtctctgcttcgaatcattgttcgctgcttcttgagccgaagatacgttctgtgacggtgccatttcgtcaattccgttttgaaaatgcctggcttcgttaaccgttgtgctgccaagttgttaaagatagttgggacctttgtgaaggtcagcatgttatgaagaaaatttcatattgtggggaatctcttcaagtgtgggggtgagattttacaggtaattttaagcaaagaattagccattgcaagcgggaaattcagtatttgaaaaaggggcgtgatgctatatccattcagacgtttcaggaggctgaactgaatcttagtgaagttatgaaccaacgagaagtgttctggcatcaacgctcaaaacagttgtgtcttcaagaaggtgatagtaacaataagtactttcatgctaaagctacttctagaaagaaacataatactataactcggcttatga

SEQ ID NO: 146656 - DNA, 516 bp, Cannabis sativa
  modified_base (27)..(29): a, c, t, g, unknown or other
agagctcttatttcagtaattatattnnnttactgaaataaggataaaatatattgaagggtaagataattaatttgtccatagtcgatgtaaatcatttatagacgatctttgattatttagattgaaataatgaataatttataatgtatctattcttggtgaatggagcattctatgtaattaagagtgcaattatgagtttatagtggagtcaggaggaattaataagataatacatttagtcagtaaatttaagaactacttattgggagctttattatataggcttatggttcccatactacttgagataatattgtcttgtagactcaattaattgattttattaatcgattataattctaaaatgactatgtcttatttatgagtttcacaaagcaaggataattttaagaagaagaagaggttttatggtttgtttattaattaagagacaataaaaaatataattaataaataagttaaatgaacattttatttgataattaatta

SEQ ID NO: 146657 - DNA, 606 bp, Cannabis sativa
attgagcaaagtgaattaatatatgtatatacctacatataaaaaatttgaggtatatatttgagtgagggctttagcctacatataggctaaagtctcttcgtccctggatagagtcatgttggaaacagatagcttggtgtgtgttcaaacgatttagagcgatattttatgctttcataatttgtgttttgtaaaacgatctgcaaataagttgactcattgcttggcaagaaactcttgtttctctacaggttgtgtgcttcagttggaggactgttcctctgaagtgcgttctattattttgaacgaattttaatagatcttatgatttttattcgaaaataaataaattaatggtatatattattttccttttaaatatataaatatatgtgtagattggatgaaattagttacttttacatatcaatatccaatctgcacaagtgtagatttaattagattgaatcgtgcagattcaattatatatattttatgaacacgcctatgtgcaacactgtaatgaccgcttaagtaattttgattagtaaaggtaattagcattaatttctgatatttttataattatttatgaaattaatt

SEQ ID NO: 146658 - DNA, 1435 bp, Cannabis sativa
  modified_base (1184)..(1191): a, c, t, g, unknown or other
ggtaattactctgtgggtggagcagtaatttttagagaagtgtaaaaatctatctgaagtctctaactctaccagtgagactaaatgttaaagtggcccataaggctactatataattattcaaccaatggaaatttctatacaatttttggtgttattccagtcatgaattaactactagtgttatttcttaataacacagatatagttgttaaacagtgaataatccaataccctaaaaggaataaacatatagaaagaaatttcacaatatctaggattttgtgactaatgagatgtaatggtggagaaagtttatactgaatacaacctgtggtggagaaagtttgtattgaatacaacctgttagatcctattacaaagataatactacatactacacttgatttggacaccaagatattaagattgattgaaatatacttttaattttatattagtgcaggtaggagtttgttgggattttatgccctaaaataaaacccatttcaatataaattagatttattaattaataaaatatcaaaaatcattttatgttgcatggttcacatgattgcttttatgattatatgtttaatgtataaattctatcaaatacagatcatatagttattcatgattatagtgttgtctacacagtgaaaaataatcatgattatatgtttcaaagttctaagtctcatgatttgtcagtacattggatttacattgacatgataatcagcgataaagtttacgtacaccttggataagtgatatgtcctttccaggacattggcaaagtatgatagtatcggatgtatggagtatacatcaaactggatcgatattgatattggataagatatcataaacttatcgttatatctttctaagttaatattacttagttgatcttaggtcaatagatcttaatcctaagatggttaggttctggcttagatttattattcatgttctttgacttgttcgttaaagttgacaaagtgaatcttcccaatacttacatcttgggaacatggtagtataagtgagtgggagtgctaatcacatatatagaatttatagcttctataacttttagaagtgaaacgatgatttcctttgagcttggcttaacgtgataaatgattgagcgctcatttcagtaattatattannnnnnnnaaatatcatttacaagtagctaaagtattttaatgataaaaatacattaaagggtagagcactcgatgtagatcatctatagaagatatttgattatttggattgaaacaatgggtaattcaaagcgtgtttatttttgttatataaaacgttctatgtaattaggagtgcaattctaaatctatagtggaatcaggaggaatcaataagttaagaaatttacttggtaaattttggatctact

SEQ ID NO: 146659 - DNA, 639 bp, Cannabis sativa
ccaagaataccatgtgtttgtgctgctgctgcacaaaaccatgatcacataaatcatgatcaagttttgcaatttctcaaaggtctgcaagaatacctcgtactttcatgggccacaatcatcctggagattcaggcctattctcaattagtagctatgaaaactttgatcagttttcttcttaggtatacaaatttcatgtaaaggctaaggaaatattcttggtgggtattgacaatggtgtgatttgcttacgagaacatttaatgataataataattgtttttacctttggaacctagcaatccaaaagtataagaaactccctccatatacatgttatttatctatagatagaatgtatggatttgggtacgaaccattaaccaatgattttaaaatggtgggcgtaacaagtagtgaagaattattagtttatagtatgaaaagaaattcatggggcagcacgcgacgccacactaggcgtgtacatatgtcgatttggtcggattatattgtatttttatcaacctaatataaatgtcgagttataaataggacatttgacaattttgtatatattattttaattaattacaaaatatgtgcaaaaaaaaaacttattatcattttctcata

SEQ ID NO: 146660 - DNA, 761 bp, Cannabis sativa
cattcggttcagaggcatttctgaaccacgatgggtcagcttcaaatacgaaagtctccccaatttctgctacttctgcggtctgcttgaccatacttataataaatgttctaaatacctcctccgctgtgataatttcccgcaccccccactcttggaatacaaagatacactccgtgctaccccttcatccccacacaagaaaaatccttttcagctgtctaactcaaccccttttgaggagttctttcctcgtatccaccctccttcggatactcaagatctgcaacaagccgttgaccaatttctccatgttgattctcctcaatccagcccaattcctcgtctcttggcccaatctccacagttagtttcatccccctccactatgccagccacttacattactcctacccatgctatgccatccttctctgtcagaccctccgctcctattatcactgactctatctccgtttccacccatattgataaaggcaaagggaaagcccctatgatttctcccataaccaatccctctcgttcccggggggactctggacttgttatcaatgcttcttgcccccatcccactgatgccatttcccctgttgttaggccaacattcatgcgccaaaatgctcaagttggagactctatgcgcagcatgcttaaacgcgctagagccattgcctcggatgatgctgtcgttccctccacgtctgatgatgaaccaacggcgggtgctgctacgcggcccc

SEQ ID NO: 146661 - DNA, 1177 bp, Cannabis sativa
ccgtaacacataatccaaaaaaaaaagtactactcccccttttggtctatcaagtcaaaatagtttaagcattcacaaataaaaagcaagagatagagaattgaaccacttattcatcatcattggatcggaagcatttcatgaagttgttcatcttcctgagaagcaaggcttgacttgtctccattcttcccaaacacaagttgaattcagccatttatgttgaagcagaagcggaagcagaagcagcagcaggttcaacagtaacaccaagggaagcaaggttgtaagtcgactttcgagctttggtcttcgactttctggtagttttcgtgggagcagatgacgaaccaggtacttcggtcactagtgcaggcggtgcaggtggggttataggagatgcagaagcagagccacaagagagcttcttggacggttgagcattcttagttttggccatttctctttaaaaccctggaacacaaacacactctcacacttgaaaaagattagacttttgagaaaaaataaaaagagaagagatagtggtgattgtgggtgagtgggtagttgagaatatatacactttgattttacttacccaaaataaaaaaaaaaatggaaaaggaaagtaactttcttaccttagacaccacgtgtggagaggaaaaagggaaaccgaaaagatttttcaaaaattggccaaggtttcctgaaatggaaaaaaagaaacaacatatccccacaaaatctaaggattaaacaccctatcaaaactaaaaatgccaccaaaaaggaaaccaaaaataattaattatttaagaacaagtttcctaaaaacacaaaaataagaccaaatctcataaaggaaacacactataaagaatacaattaaaacatgtttccataaatgaaaaaattaaagaaaaaatattaataaagaatcgaaaaatatcgaaaaattatgccccccgtttttctttaattttttcaaaaaatgccccgcaaaataatttgcaaataatgaacaagagagtacataaggcatcaatcaacactaaggaggaaaaaatagtgcctaagaaaatcatgaaacataaaaagaaaaataacaagaatttttaagaaagctcaattgacagaatcggttacaatttttttttatttaaaagacaga

SEQ ID NO: 146662 - DNA, 562 bp, Cannabis sativa
ttttttctaatttcaaggtcattacaagatacccacttgtcccttcttctagtagcagcacaattcaaagtactatcacacatgaattagctcccacaaatgcgcctttaagggtatggaagtcttttcggtatatatatttcatgtatatgtatatgtatatatcttgtgctggcaatcgggtttgcaagtttctctagagctctcaatccattttctttatctcatacgcatgccacatacactgattgaagcactcatgaactgtgcttgccagctcccccaagcggtcttttagctgccagctctatgcatgtaagtttagagcgtagtgaagacttaacaacattagtaggaagagattcaattcatttgtcatcatatgagcctcatgcatcacaagcgcatgccacagacactgatcgaagtactcatgaactgtgcttgccaacttctcccagcgatcttttagctgctagctctacacatgtaagattagagcgtagtgaagacttaacaacattagtaggaagagacgcaattcatttgtcatcatatgagc

SEQ ID NO: 146663 - DNA, 970 bp, Cannabis sativa
gaaagaggccccctccggacacttaccaaaaaagaaaacctcaaaaggttttccttgacaagagtcgggtgcaagaatctcacagatagtggcattaccaaaaaagtaaggagagaaaaggaaaaagggtaaaaatcgagaagacaaagtctgctctaaaccctaaagtgtcattacgtgggacgaaaatggttccccaacaaaaacttggtgaaaagaagtaacctaaacgcaaaagaagaggaatctaacgctttgtgcagaaactcaaacaaaaattcccaggaagctcaacatctaacccagaaaaaataaatgaacagtaaagcatgctatatgaacaaacagtgaactagtgtataaggtacgaggaacttacataaagtgtggaagctggacgttggtgttgatcgccggtaaaaggttaactggcaacggcgaaggaatacgagcaggaaatctatggtgtttgaggtttcttttccctctgggaaactctgagaaaattttggcaaaatgctgaaagtaaccaaatgaagtaagaaggttggcttttataggccagaacatgcgtgagacagctgtgatcagccatcatcgaacggctgggatggcaatcgattcgaattctatagatccaacggttggattgaatcgtcatcaaggcggtggaaaatgtttgagtacccgtttgacacccatttaatgcgccgtatcaataaatggacaagaaacaaatcgacgcctgcaaaaagcgaataactgcagtaatgatggtcattaatacaccatcacgcgcccaaagcacgtgccaggaagctgataaggcaaccggagccatctaagcaagcgttgttcacttcacaactaaacaaggcttagggggtaaatgttacccctgattttgcccaaaatacgtggaccaatcggatgatgacacatggatggaaaaggtttagcatttgaataa

SEQ ID NO: 146664 - DNA, 681 bp, Cannabis sativa
acaatatattaccgacttgtatttaggcacccatacacctatccacaaggcttaagagattattaagaacgttcttaacaaaagtatgacctctgtaccccatgcattaagtactcacctcgtaccagttttggtagggttgaaatgtaccccaagtactactgagtgttgtaccacatgcactacatactcaaccgtactagtgttggtaacaccggattgtacccttctaaacatcatatattgtaccaatacacttagtactgctaccgtactagttttggtagtatacaaatcacaattagtatccatacattacacatacacattcatatataaataagttctatgctagtcttaccttgttttggaattcaagtgtgtcagtcgacctgaatgggaagtcgcgtgctaaacggaggccttatgtcacaatcacattaaacagtaaacaacattctaaacctttttggggatctaaactcaaaactaaaagtttccctatcaataaatcgcatgccaaagccataaatatcgaggaaacacgagaaaaacaacgaaaggggaaactgccagaaaaaagataggccattttctaagaaacagcaggtcgtttttctggatctgcagcagtaataatggtaggttgtttctgttggaatttattttactaggatctta

SEQ ID NO: 146665 - DNA, 620 bp, Cannabis sativa
tactatcgtcacctccatcctgattcaaacacaaccccataactcatatccaaacacaatcaaacaaacataaacacctatcacgatctcagttccaaatcccacgaaaacaaaaaaactccattcaaatcgataagaaaaaaaatcttaaattaatcgaataattaaatctgtcaaaggaaacaaatgaaagagagagagagagaggtacgacagtgaagaagcttgctcactgaaggggcaagaactgagaccccacatctcgttcaggtgcaaagcaaaccctcgccattgttatcgttcaggtcccatacctcctcagaaattattctcatttttcctgtgacgccttaatgctaaggcacgctacagtaatttttttaattatagtgctatctttgctaacctaagaattttctcaaaaatagtgtcaaattaaaacttttatattaaatactaaactttaaaatctttacattaatatgtacaaagttgggatcaaatttcaaaaccttttacaacataatccaaaatacagatgttaagtcacacaacgactacataataaccaccctagatttcccgagaccgaacactccaggtcgcgccgccatgacatg

SEQ ID NO: 146666 - DNA, 1059 bp, Cannabis sativa
ttttcctaattaatttaacaaataaatcaaataattgcaagaaaattatgaaactttaccaaacaccctaaaataatatgtagaatcgaaatctacaaaaaatatggaaaaaacacctcaaaactacccagatcgtggtcgtcggcgttcacgtcggttttgtcgccagcaaagtgtaactttgttcccgattgctctggacgcgtcctttcgattggggaagctttccacaatgctaatgacctcaaaacaatcaagaactacccaacataacaaccctaatgcgtcagatcggagtcatcttctccaacttcggtgtaccgtcaatcatggagccaaaaatggcaatttttgtttggggccttaaagcttcgattcttcacgtcacaacgtcttctaggagtcccttaagtttaaacacaatcttattttaacccagaaatgactctaacacatttgaatccaagattgttcaagaacgtggatgaatgtgcatgaaaatggtgaatttcattctgggcgttcaagggctgtttcaatgcgtttaaacccctaattacaacctaagaaacccaatgaaaactctccaaacagcctagctctccaagaactcaaatctctctttctctctctaagcttcacatgaaactctatcggtctctctctctctctgcacacagcctcctcccttcaacttctttatgcgttctaaaccctaaaagtatctcataagcatcctatatatactcccaaactctaatcttaaccctagatcaataactagatcaataacttaattttttttaaaaaaataataaaatatatatataaaaaagtgtatcgtatgtatataccataatctataataataataataaaataataataaactaaatacaaatatgctacaatatatttacccatattattattgttaatatacctataatactattcataaataattaaatattaaattatctctaatatagtttagttatttatctaacattatacacaccctcaaaataaaataaaaataaaagaaattttattgtc

SEQ ID NO: 146667 - DNA, 762 bp, Cannabis sativa
agaaaattgtgcatgaaataaaaccgaaacttcaactctaaatttgactaggatctgatgatattttggaaaaagtcaaaacattaaagttctagatccctattttatcttttcaaaacttcttgaatcgtctaattttgagcaatatcgagagagttatggccaaaatactatcaatctacgcagcataaaactcaccaccccatttaatcctaagcagaataagttttctaatcctaagtagaataggttttcttttttagcaatttttattttattttatcattttttagctataaaagtagtggacttcaatagttttggggaggaaatttaaaagggaaaaatgatacgaatttcagagacagaagtcaatactaggcattctgtagagggtttttagcattattttattctctatcttcttctcctttccaaagttaatatgtgtgattttacttccatgaacatgtgtagctaaatacttgattaggatttagatggatgttgtttgacattactttatggttttaatatgatttattttcctcttaatttctatgtattctatttcattcatgcttaattacttttaattgtctggccatcaattaactgttttatgatttcgatgcgagatctgagaagtgagtgtcgattatgctacagtgaaatagaactgaatttaaacataaggtaagagtacttgtatggtttagatagcttatagggtttctgtgtttaatgcctgttgcatgttaa

SEQ ID NO: 146668 - DNA, 520 bp, Cannabis sativa
ctgcccagctccaccaacaagttctggtaggttaggcatttttctgcagaatattcttattgcctagaaagatcgatgaaccattttagtcttcagcagaaggcttttatggcctgtgaggagatcagaggcggttgaccctgttgtttgcccttagaactcgccgagttgggattttggctagcaattttgtcaagcccttgagattgcagattaagtaatttctcagaaagagatggagagaacctccatttggctctgagaagatagaagtcgagaaagagatggagagagagtgaagaacgcgagggtctttgattttgagtgagtgggtctctgattgttctttgtgtttgtgtttcatgaatgttttcagcaagaaaacgaagagcaggaagaagattagggtttcagttttcagcaaaaaaaaagagcaggaagaagaagaggatgacgaagagatgttttagtttttgggttttaattaataatttattttattttaatttaatgaaaatat

SEQ ID NO: 146669 - DNA, 1007 bp, Cannabis sativa
atgctaagtaaattagcttttagtccctcaataagcataacatttttcaaccttggtaatccttcaaaattgagtgttcacataccaatgacatttcctgttaaaccattgccaaacgtgacctcaccacattgcattggtctgatattcactaaaaaattcttgtcacctgtcatatgtctagaacaaccactgtcaaaataccacatttgaaaaacagcaattttatctgaaaaaccagctacacatttttctttttcaatctatttttgtttcaaagcactatgtttcttttgaaaaattttcaaattaccaaaataatttattttgtacaaattttgcatggtgaaccctataggtcaaatatgccccttaataccacaaaaatgacagattggaacaaaccttcttacctgagatcttatcctttatgaaaactggagactttgcttctgtagacaatatttttttagcggtagatcttaaatttacagcagcaggtaaattccctggaacactagattttacaaattttacttttccagaacttttagtaccatattatccaagaccagttcgacctatttgacctgcattccgaacttcctcaaaaataaaagatcgagggttaagtatttgaatatttttcttgaaattttcaagttacttctttaatagaataactttctcaaattttgaacaaaaatcagtctcatattctttaattttcaattcaagagattcagtttgatgagataattattttatttatttttgataatgatctattttcagaagtaacctgtatcctcttttcatacataaccttgtaagacttagccagtgactcctcacatatttcagattcatcggaatcagaattttctttttaaatggtattattcaaacataccaatgtttccttcacctgtgaatcacaaacaaacttagaagaaactaaggttagtgcaacatttttagaaatatcttcatcactatcagtttca

SEQ ID NO: 146670 - DNA, 715 bp, Cannabis sativa
gtgatcaggaccatggaacaggaccgggaccgtgacctggaccttgacccggacgcagaactagaccgaacctagcccagattttgggttcagacccagttctggacccagactagcactgagacttgaaccagaacctgaacacgaactcgggacatgatcccagacctagacgaagcccgtgacctaaattggaattcggaccttgacacggacacgaacccatacccgaacccaaataccgacgcagacctagactgggattgaaacacgcgacctaggcccagacgcagacgcagacccagacacgaacatgggacccagaaccaagacccgaacctggaccttgactcagatctagacctagaccgagattcaaagaacccgtactcggactcgaactaagactcagaccctgacaccaacatggacacagacccggacccggaaccaaactcagacccagaataaaaactggaaattatgactaggacccagatctaagacgataaccaaacccagaccataactcaaactcaaaccaaaacctggaccgagaccttgactaggactgggacctaagacctaagacttgaaccttgactaggagcgggactgggaccttgacctgacctggtcctaagccctcaccggatcttgacactcgcaacacagaccaggatctagaccttgaaaaggacccgaacctaaaccc

SEQ ID NO: 146671 - DNA, 525 bp, Cannabis sativa
  modified_base (44)..(46): a, c, t, g, unknown or other
ataataaattatgcatgactaggaaagtgatttaggcattcttnnnatcgattgtgcctttcaagtcatccctgtgattttatcctagttaccctttttcagccttaacttcatttctttgtttctacacatatttagcctaaataaggtaaacacatgaatatctaaaatttgaccctacactacactacacttgatatggatacactacacttgatatgcatacaagataatagattgattgaaatgcacttctagttttatgttagtgcaagtaggagtttgttgggattttatgccctaaataaaatccatttaaatattatctatttgctatcaatagaagattatgagtcatttaaatttacatgttattttcgtgattatagtttaatatatagtttctgataaatctagaacataaagtaatgcacaattatagtgatgtcatcacagtagaaagtaattgcgattatatgcttcaaagtatagtcccatgatttattagtgcattagatttacact

SEQ ID NO: 146672 - DNA, 672 bp, Cannabis sativa
agtaaaattgagagcctactaggctcggggtaggtggtgtgggtattaatcttccactaccacagggctgagagcaaatgaatgctatgaggcaagaaattacttgagtggccaggtagtagaatgtacatagttggtctcgggcagcgcggtgatggaaactgacactaagctggaccgattggcaaagttttgttttgatggagtagttgctaaagctgctagaagggttaaatttaattgaaggtggaaagagtatatcattcagaatgtagatataataggtaagcgactagaagttgtctggttctatgctcagatggttgagttaacccttactgttgggggtgcaagaactagatcacaaaagacataatatgaaaggagattcatgaaagtaaatgtctagtgttggaacgggtaaaaagtgttaaccctaacgatcttaaaaaaaaaagttaccaacccaccagttatgggtcctagtgggagaatttaaggtaaccaaagttttcgacacggtgggaacaaaagatttgtaaatccattgagagggtcgatatgcaagggacactagtaaaatgaacgctacatgagagcctgcattcaacgtggggtagtaggccatttaaaaaagaaactgcccatggttacagtagtgggaatggaaga

SEQ ID NO: 146673 - DNA, 659 bp, Cannabis sativa
  modified_base (33)..(48): a, c, t, g, unknown or other
  modified_base (528)..(536): a, c, t, g, unknown or other
tataattagttacaattttttttacttttagtnnnnnnnnnnnnnnnnactaaaagtaaaattttttgtaattagtcataaaaataacaatttgttgtggctaaatgtatttagtaacaatacttattgtgactaaaattaaattagtaacaacttgtatttaaatattatgtttagtcacaaataattttttgttgtgactaaaaactacatttaatcacaaaaaaaaaataatattgtcaataaaaaagtagtcactaaaagtaattattttttgtagtgaaattgtcattgtatatttaatattataaaataaaataaaaataaataaaagttattacgcttaacgtcattcattaaagaaatggtgggaaaagtattctctttcttttatctcatatttaataaattctccaatttctaaatttaataaagtaaataagtataaaaaataactaccttatcattgattgacattacttattaataaatatgccattaattaatatttagggtgtgtttggaagnnnnnnnnnaattactaggtagggtaattactatgatgataattacacatttagtaattacactatattttaaaatgcaaggtgtgtttggatatgaggtggtaattacatatgaattcctaatatcttgtt

SEQ ID NO: 146674 - DNA, 524 bp, Cannabis sativa
  modified_base (126)..(131): a, c, t, g, unknown or other
gtgagcttagggcattttaggtaatttaccctgagaagggtaaaactgtgaatttaatttatttatgtgcttatgaaccatataattatatagtatatctggtgtgtcctttttcaggtgtgttcnnnnnngttggcgcggtatagtcacaatcaggtatttcgggccgaactgggttcggggccgaaatataattttgggataaattattggcatcttatttatgtgtgaataatctaaatttttttttttttgagtttatttgtgatatgaatgaccattttgtcctagaatgcttttaagtgtgttatatggccttaggggcaatatggtaatttggcctacatgtattatttgtagtaaatggaattatttgtaaaaaagaagattgtattttctagtttttcacacccagccgacccctctctttctctctccctaaacttcttttccaagttttgatttttgttgagaaagagcttgaatttttgctaacttttggagcttggaatttggaggtgttg

SEQ ID NO: 146675 - DNA, 932 bp, Cannabis sativa
tcccacttgaccttccccaagcgatgtgggattgcacaacttacttggtatttccccttacggatcacgggactattgacagtcacattaagtcttctattaaggtcttggaaaccaaggtggggcaattggcttctcaaaacactaacagggctcaaggtaacttgcctagcactactgaagtcaatccaaaagagaattgtaaggaaattaccttgagaagtggcaagaactatgctggtccaagccaagataagctagaggatgaagaagatgatcaaccagcacttacaccggaagagaagaagactactgatggtcttcaacaaaaagaaacttctcctcctattagtattgaccatcacataaagatttcttatccttagaggttacgcaagaataacacggataagcagtttagcaagtttcttgaagtatttaaaaagctacatgtcaacattccctttgcagaagcccttgaccaaatgccaagctacgtcaaattcatgaaggagattttgtccaagaaaagaaagatggaagaattgagacggtagctctaacagagaagtgtagtacaattcttcagaagaaactccctcctaaactgaaagatcctgggagttttaccataccttgcactattgggaggcttgaaaatattcatgcattgtgtgatctggggcctagtatcaaccttatgcccttggcactatttaagagactataacttggagaagcaaaacctatagttgttacactacaactagctgaccgttctttagcccatccaagaggagtaatcgaagatgtccttctcaaggtggacaaatttatatttcctgctaattgtatagtcgttaacatggaagaagacaacaatgtccctatcatcttggggagacccttcttggcaacagggaaagcactaa

SEQ ID NO: 146676 - DNA, 561 bp, Cannabis sativa
  modified_base (148)..(152): a, c, t, g, unknown or other
  modified_base (485)..(496): a, c, t, g, unknown or other
ataaccctatccccgtgtcccacatggtactgagtctagaacgttcgtacgacaatactatcgatcataatgtcagcctatactcaatatgccgatcatactccagccatattattgtgacaacatcgatcagtatttcagccaacannnnnttatcagtaatcaatacaactctacttatattattactgctatcaatgtattctattaggcatgaacaacatgtatgcgaagcatgtaataacatatgcatgacattatactaatcttactttgattccgaattcaggtgtgccggccaacatgagtgggacaactgctcggtgaattataggcccctaaattacatcgatcataatatagataagtaacacgctaaatcactttttggggacttaaacttgaaactaagagtttccctatcgataaataacatgacgataacctaaacattacaaaaatggtaaaaactagggttcccaaannnnnnnnnnnnggtagaccggttccccaacgggaattccagttctgtggggtttcctggtgtaacgtccccgcttc

SEQ ID NO: 146677 - DNA, 596 bp, Cannabis sativa
gaatatgaataaccaacaactcaatgattgttgacatgcttacacacaagtataaaactcttcgttctttgcaaatatctcatgactttcttggctgcaaccaatgatcatggccaagattagattaatatctcccaagaacattgactacgtacaaaaacaatatcaaatctagtgcaaacctaagcatacattaaactccctactacacttgcatatggaatgttctttactactcctctttctaaatctttcttaggatattgttgcttagtaaacttgtcccctttcagaataggaacagaaatagccttacacaaattcattttgaactttttaagcacacaattaatgtaagcttcttgagataagccaataattttttgattcttgtcacgatgaatctcaaactccaaagaattagatgcctctccaagatccttcatatcaaagttgatagacagaaaaaaatttagttttatttagtaatgacaaattactactggcaagtaaaatgtcgtccacataaaggacaagaaaaatataatgactctcactgatcttgtaaagaccgcttagtttaatttaaaaattag

SEQ ID NO: 146678 - DNA, 836 bp, Cannabis sativa
agtccgagtcctgggtctgggtcttggtccatgtccgtgtctgggttcaggttcgcgtcccgagtctcgatccgagttttgaattgggtccgcatctcgattcgggtctgggtctaaggtcctagtctgattccagttcccgaactcaaacccagactcatacttggacctaggtctgcggtacgggtctaggtctaggtcagagtctaggtatgggtcccatatcaaaacactgactacgggtcaggtccaagcccctagtccagatctggatcacaatctcaggtcccagtttagttccacttcgtgtcccaggtcccaggtcccgtccatgtcctaggttagggtctgggtctagggtcaggtcttgggtctcggtcccaattctgatgcccgtgtcctggtccatgtcctaggttagggtttgagtctcggttcggtttccaatctcggtctaggtcaggatctgggtttgtgtcttggtccaagtttgagtctgagtcgtgtgttcggatctgggtctgggttccgaggcccaggtcatggtccgggtcctaggtcccgatctgggtccattttcgggtttggctcctagtcgtagttttgatttcgattcagtgtctgagttcgagtttgggtccggacctggttggggtatgagtcatggtttgagtctaggtccgagtctgggtcttggtctgggcctgggttcgggtccaggttcgagttttggtcttaggtgcaggtccaggtctgggtctgggtcagggtctcagtatggatctaggtcccgagtttcgatcccgacctgggtgtgggtctaggtttgagtctag

SEQ ID NO: 146679 - DNA, 1303 bp, Cannabis sativa
ttttattattgaattatgagttaacaagagtactatggactgtgtttttgcgattgtattcatctgctgtaacttacataggctctattaactcgtgttgttgatatgtagattacaattaagattggaatggaatggagattacaattacaaacaatgtttggttggggcttttaacttttgtaatccttttacattgtaatgagtattacaataaattctcattacatgagtatgattcatgaatgaggattacaattatcaatatattacaaaaagatttttctacctttctttctcttacctctttaccaaatataccaaatatagttgacagtaaataaaatgaggacatgttggtcaatatattaattatttaattttatttttatactaaacccaataaaaaaaattaattacaatgttcattacaaaataaatcaaacataataatagtaattccattactattaccattcctattactattacaatagtaattttattactattaacattatatttcattactattcctattatgaagtattaaactttattttgtaaaggtttataggttttctgctctagccacatttatgaccaataattttctcatttttctctgcgcagataatgaaattagttgaatttgcaagcttgatcaagattgatggtccattcagtgattcgatggctctttgcatatatccttcacttcctgtcttcctatctcttatgactatttttatcagttataggcctcccctctctgtttttcctccttccatctataccagactgttctaacattttatgaagtattatctgaattagttattgattggaaatataattgtgaacttcttttggggattgtcttgcagttctattgaaaaacccaattggtgaaattggcgactctttgataaatgtaaaatctttgcccaaggtgcgtggttttaacttcttaactcaaatgtatatctcggcaatattccttgatatgtaaggaatgttgaaaagcttgaacttcttcttgtttccatctttctctttcttattgccagattcgaacggttcttcactcaagtcttgtgtcgaactaaaagagtagaaactgtctcataatgatatcaaggtatattttctgtttggaaattatgaattatttcatttttctctcgagactataaaaatttaccatctgttggattaaaatactattgtgggcacatatgtataatgtatatgctattataaagtgtgatacaaaattaagtgaccaattatgttatgggta

SEQ ID NO: 146680 - DNA, 726 bp, Cannabis sativa
  modified_base (100)..(103): a, c, t, g, unknown or other
  modified_base (391)..(392): a, c, t, g, unknown or other
tatttcattcatgccttaagtttccaacaaagaatggggttgggtgcctgagaggaaatcaataggttgcccaacaatgttacaaccttgccctaaccannnntaaaaaggaagtatcctctagccagagttcggacaagggaagaaacattgccaaatagggaaccgccaaaggcagggatgaagatgtggatccccagcttgggtaaccaaataccaatgttggaccagtggaagagctagaagaaatcgaaattgacccaaatgttctgaccaaacggctcaaaattggaaaaggtttgctgctcaaagtaaaatcagcattgataaaatttctaagagaaaacctggacatttatgcatggtcacatgaggatatggtcggaatcgnnccttctataatttcacacgtcctaaatattgatcgtaattttaggcctgttcaacaaaaaagaagattgttggacaaggagcaagccctagcgctaaaagaaggtgtagaaaagctatgtgactttaatttcataattgaagctttctacgcagcctgggttgctaatccaatactggtacccaagccgaacaagaaatggcaagtgtgtattgatttcaccgacctgaacaaggcgtgcccaaaagactgttttccacttccaagaatagatcaacttgtggatgcaacaccagggcaccaaatattaagcttcatggatgcctattcggggt

SEQ ID NO: 146681 - DNA, 601 bp, Cannabis sativa
taagtcataacaaaataatatttattatttacttatagaaaatttagaggaatgttaaagaaaatgtgtgatcttaaagtagaaaaaaaattaaatgatgtaacatgaggaatgttggtcgaatatttcattgtctccaggtgcagacttaattgatacaaataacagaagtttacttgtgtcaactgatagaggcaagtccaagagaaaagaatgcgtagaaagcttgtacaattaacacttcttctttaattcatggtgatatttgtaagtctaactaaaaatatccagctgcttcagaaaaaaaaaatagtaatttaaataaaatttaaataacttttaaatagaaaacaaatgtatatttatttaatacaaaaaataaatcctaattcaaattcaatttttttttttaaaaaaaaagaaaaacagaaagatctatctaagtggaacagttcaatattcaaatattattctacaaatctaaattaaacatatagtagttttaaattaataaatgatgcagagctagtttatgatttcgattatctaaaactggtatcaaatgttctgtcgtcaatacgagcgataaaatgttttcgat

SEQ ID NO: 146682 - DNA, 624 bp, Cannabis sativa
ctacatatatacaattttttcagagaaagatataccgttaatattaactaatataatttatcaaaagaaattattagttaatatactaaaaatatcaaaatcctaaacttgattattttttatcaccccctttctctttacataataaaagtaagtatttacctattttgaagaatataaggtgtgatacggtgatgacatcaactttaaatgcaatgataactaaaaatgagatacggtgatgataattgttttaaaattatatgatgagttttctatagatttattgttcagtttctaatttttcttcactataatgtacattcaaaaaaaattgtgtgcttttttatttatataagaaattgtatgattttttttaagaattttataaagttttctatataaattattaatttttttaataaatatatatagtttaaaattatttaatattgagttttttatttaattaatatttatataataatttgattgccgcacgcgaagcgcggtctgtttactagttgttaattgttttacgtgtggttttgatgatcacgtttaaaaagaaaaaagagttttttttatttttacacttcaaaacagtttttttttgcattttta

SEQ ID NO: 146683 - DNA, 988 bp, Cannabis sativa
tggactggattctaataaaaaaaaaatgtaaaataagatttaaagttgaaaataagatttaaatattttattgtacacgtactatattttattatacacgtgataaatgaataattgtataaattttattttcggtattgtaaactatttagaatttttaaaatttttacagataatcataataatatctacaatatattatgtgatcgtaaataaaaaaaaattatactaaaaaaaattattctaataagatattctggatgaaaaacaaatggagatgtataccaaaatattactttgaagtgtactacaaaattttctaaaaatttaactatattaaatgaataatagccaaaaatgctttcaaaagataataaggaaaattgatagggaaaagggtgttgtgtattcatatccatacctaccttgagtggaggtggtttggagagtggtgcatcaatttttgtaaaatttgttgcgcctaaaagaattgtatgtaggaatgattttatctaattatttttttttttttttatagatgtgtctttaaattgtatttttacgttgtattgttgagctagctttaagtggttcactcaaaactaattaataatgaatgaaataattcatattcttatatatatgggataaaattgtccataatcctatattcaagccatacaaagaaatagaagtgaagagaccaccatgaaacaatctcaagagagaccaatgtgtatacaaagtacaaatccttccattgaaaaaagagggaaaaaaaagtatagaaaccttccacctaagaaagaaaaatgcttaggagtacttgagtaccaaggtaacgtaagtagaaaatatcaggtttcacatatttaatttaataaaggttagtaatttgtctctctgaactttgacatataccaaatcatgtcgcctgaacttttttgaccgttaaaaatttccctgaactattgagattgttaggttt

SEQ ID NO: 146684 - DNA, 571 bp, Cannabis sativa
aacactttggacataccaagagttgaacaaatttgatttttcaaagcaatctcggtattgggatagaagaagactaaggacttagtagcgttcaccccttgtccagaggctaattcaaaagaatggagcaacgtagtcacactaacagcagcacttgatgaggtttgacagaagagatagttatcatcagcaaataacatatgagtaatagatggtgccccattagccacacggcagccttgtatgattcggttagcttcaaactttttaattaaagaagaaaatccttctgcacaaatgataaatagatacgttgataataaatcaccttgatggatccctcaagaaggagtgataagtcccataacatgaccactgtgtatgatagaataatggactgaggtaacccacttcataataaggttgattcattttctagcaaatcccattcgatgcataattgccctcaagtagtcccactctactcggttatgccttgctcatgtcaagcttcaaagccatgaaacccttcttgcctcttattttcggcttgagatagtgcataatctca

SEQ ID NO: 146685 - DNA, 627 bp, Cannabis sativa
cagtcctgatgcctctctgcctccagctccctcccagtcggtgacccccgggaggtcctcctccagtgcccatttaggcacgatcgtcttgatagacgaggagggagaagtcgaggaagacgaggtggaggatgcggccgcccttgagcgcaagcgaaagggcaagatggttgaggctaaacctttcaagtggacccggaggggggacactttggcggtgagcaacgaccctgggattccttttgaagcaaaggaatacactatgccgcacggcatagtgttgaccccggttcccgtggatgaggagaggcgaaatctctgagtcgccaagcacaactacgctctggacgagtacagtcgggggcatgctgaggtggaggccttaaagaagattttgtgggaggagcagcagaatactttgcacgaggacgccttccggaacccttgggaccttaacatggaccctttgacggattggttcaaccgcttcgtcgggcccaccctagctcccttcgcctcggagatgaccagccagattctctcccacctgactcaattcccagctaaaagatatgcggcttgtgcctccttgaactcggtttaccaggtccaagacatcagctctgc

SEQ ID NO: 146686 - DNA, 742 bp, Cannabis sativa
tattataattaaatgacttaattgttaaaataattatattaggaatttatataaaatattatttataattattaattgctaaaagaggtcttatttatagtaaggattcattgtaaatattattaattatttataattaattgattctaaaaaatgaagttttaactattggtaacctactattataggtaaaagaaaaagaaaaatgtaaccatgatagttacaataaaaatgtaaccattaagtagtcaccctatatttttattctttatattatttgtcataaagttgtaatcttattagtttgatatttctattagagcacaatattttttaacaacatattattatatttatataaattttttctctgttaactattatatatatatatatttatattgtttttctaattttttattttttaaaaaatagtaccattgtgtgacatgaaaatttcaagattattattcttttttttcaatgcatagcattcttatattttgctacataaacttttcaccttatcaaacattcttcaaaatgttaccatggattaaaaatgttctttttttgaaataaagattgcaactttattaaagcaaatcagctattaaaatagcatccaaaccagtagagaaagacggacaggacatgaaccagaagaacgagctaaccaattagccgcttggttcccagaccgtttaacaaactgaactgaaacatgaagaaacgaaagaga

SEQ ID NO: 146687 - DNA, 2561 bp, Cannabis sativa
ttcccttaatttcaacgcttaaggcaagagatttgttgtgtgaagggtgcatcggtttcttagcaaatgttgtggatattaccagggaaccacaagtgagaccgaagcatgtcccagttgttcgagaatttctggatgtgtttccagaagagttacctgggttaccaccaaaacgtgaaattgattttgagattgatctaataccaggagcagagcttgtatcaagacctccctacacgatggcacttgcagagttgaaagagttaaaagtgcaattataggggatgagggatttaaaatttacaagaccaactacttcacctcggggtgcaccagttttgttcgtgaaaaagaaggttggaactttacgaatgtgtactaactaccaggagttgaataagttaatagtgaaaaacaagtatcctttgctaaggatagatgacttatttgatcagcttcagggaaagaccgtcttctctatgattgatcttcgatctggttatcacaaattgaggactcgagaagaggacattcctaaaatagctttccgaatcccgtaatgtccttcagattaacaaacaccccgacatcatttatggacttgatgaaccgagtgttcaaagacttcttggatgattttgctattctctttattgatgatattctaatttattcagacacagaagagactcacgaaagacatctttggatggtgttacaacgtctcatggagcataagctgtatgccaagttcaataaatatgaattctggttgcctcaagtgagtttcttggggcatgtggtaagtaaagatggtattttagtagattcggtgaagattgaagcgatacaagagtggcctcgacctaaatcagcaattgaagttagaagtttcctaaggttggcaaggtattataggaggtttgttgagggctttgcaaagatttctacgcccttaatagaattgaccagaaagaattgcaagtttgtttggactgacaagtatgaaagtagtttctaggaattgaaacaaaggttgattgccgctcctgtattaaacttaccggtaagtgatgaaaagtttgtgatttactgtgatgcgtccaaacaggggttatgctgtgttcttatgcagttagggaaagtaattgcttatgcatccaggaatttgaaagaatatgaacagcagtatcctacccatgatattgaattggcagcagttgtttttgcattgaaagtttggcatcactatctgtatggtgaaaagtgttagatttatactgatcacaaaagtactttttcacccagaaggacttaaatatgaggcaatgacgatggttagaactagtccaagattatgactgcaagattctctaccgccctggcaaagtaaatgtggtagcggatgctctaagtcgaaaaggaccagggcaagtctgtgaactaaagaagatttcagcaaagttagctgaggatatgactagagcgggaattgaatttgtgattggaaaacttaccaatattaccttccagtctgatttgttggaaagaattaaagtgggtcaagaaagtgattctgagttacaggggcataaggagaagttagaggctaggtcggcaaaagacttttcatttttatctgatgggttattacgatacaaaaatagaatttgtataccgggtaacaaagatatcaaacaagagattctcgatgaatctcaaactacaccatactacttacactcggagacaactaaaatgtatcatgatatgaaacctttatactggtggccgggtatgaagagggatgttgttgaatatgtgtcaagattattagcgtgtcagcaaatttaagcagaacatcagaggccggcgggtttactttagcctctaaagattcttaagtggaaatgggaagatatgaccatggattttgtggtgggattcctagaacaatagggtattatgacattatttaggtgatagtggatcgatatacgaagtctgcacactttttaccagtgagaacaacgtatacagtggatcaatatgctgatttgtatatcaaggacatagttcggcttcatggttccccaaaagttgatagtttcagaccgagatccaatatttacatccaaattctaggaaagcttagagaaagcaatgggtactaaattaaaatttagtgcagcttttcatccacaaactgatggtcaatctgaaaggacgattcagatacttgaggatatactgagggcatgtgtaatggattttaaaggttcttggaataagtgcctacctctgattgagttttcttataataatagttatcagagtaccattggcatggctccttatgagatgttttatggaaggaaatgttgttcacccattcactgggatgaagtcggtgaacgcatatatcttggacctgaagctgtccaacaaacaagtgaggctattgaaaagatttgggctcgcatgcttgcttcacaaagtagacagaaaagctacgcagatccaaagcgtagagatgttgaattccagattggggattttgt

SEQ ID NO: 146688 - DNA, 612 bp, Cannabis sativa
taaataatcatggcaaaacaactgtaaaacaacaataaaacaaatcaaacaaaagaaaggaaaacatgattaaaaaaaactaaaaatgttttgcacagtctcaatatctaacgcaataacagttatatttgcaagtccaatcttaaaaaatcagaacaaaaaagctactaaaacaatataaaaacaaatgtaaaataataagcaaatataaccaattaaaaaaacataaaagaaccacacacctcaaaactttttttttctagtgagctcgtcgaatatattttttggagaaccaaaataaaaaaataaccacaaaataaccatagagaaggaagaagaaatgtattttatagcctctatcttccacacctacggatagaactatcacaacaccacgagaacactcagaaaatgatcattaattccagcaaaatgaaacaagaacagtaaaatcgacgttaaaaaaaataaattatggaaaaaaaccgtaaaacaacactaaaataacacaaaaaaaaaactaaaaaactaaaaaataaacacaatataatgcagtataaaacttataaaaatacacctctacaggttgtgtgcttcagttggagtattgtt

SEQ ID NO: 146689 - DNA, 554 bp, Cannabis sativa
gttcgattggtaggtgattgcgcttgtttcacatgcacctttacctataaaagccaccatacttccttcatttggttacttttagcctctcaccaaatttcttcgagttttccagggagaaagaaaaccctcaaaccagaaaaccttcaaactctataggtttcttgctaactttccttcgcgattgtcagtcaacatttcaccgtcgatcaacaacaacacccagtttcaacactttatgtaagtttttcgcatccctcactttattgtttgtgttcatggcatgctttactgttcatctgcttttctgggtttaatgttcgaagtttctggaaattttttgccttgagtttctgtgtaacacgtttaggtttctcttttctggtgtttgaatcactcttattttgcacattttattttcccaaaggcccatctattctttacgtgatgaccttcatgggtacagagaagactttgtctttctcgatttttaccctttctctttcttttcctttctttgcttatgcgtaatgtcactatctgtaagattcttg

SEQ ID NO: 146690 - DNA, 554 bp, Cannabis sativa
tgtcaattaaatatacggattgtacgtaattaatattttaattttagtgatagagaattgctaaaagttattgtctctagcattctcctcaatgtgtcattatcatattatataatttaagaaaataatttttaaaaaatattttgctaactaattatagaacaaagagggtactagacaaacatacttatactcaataacaattctcttactgaaaatattagagcattgacgttagctattgggcacctgtacgtaggcatctcacgattaattagcgatattctataaaaattattttcttaagttatatgagatttgatatttaattatttacaccaatataatagtatcacatctaaaaagtgtgctaaataccaagatattttttagcaattctcataatattatggtaaggaaagaaaaaacatatagataaaaattgaataattaacagcgtacgtactaataattaaacaatgtattaattaataattaatcgaaatgaagaatcaacacaatatataataaaatccttgataatgatcatatta

SEQ ID NO: 146691 - DNA, 542 bp, Cannabis sativa
ggttgtagaaggaaagaggataggataggacaggtcactgggataggtcttgtaattcttttactcttgaaatttttggatattacatttgaacctggaatccatgaatagtctagtagataaattcggtgacttccttttaagtaaaattgttaaaaaaaaacaaaagaaaaatgttttgggtttacccttttacccatggtatttgtggatattacggttgagaggtgtaacagtagaactgtagcgtgtacgtgactacgtgttttaatgtggagtggagcccaactttcttggtctggtcgacttgtaaacgtgtacctttcgccacacgatatgtaactgtgggctatgggcctagatgggctactggagcacttcgtttacatgaatatctatttatccatgagaactttttaaaaatatgtattttaataggtaatatatataaatcaatctaattttaacaatattaaatatatacgaaaatatataaaagtatatatattggaaaccattaatcaatcaaaatgcaactgtat

SEQ ID NO: 146692 - DNA, 1663 bp, Cannabis sativa
  modified_base (1605)..(1632): a, c, t, g, unknown or other
ctccttcaaaactcctcccatcacaaactctagagaaaggtcattatctgccccagccaactgctcgttcaccttagggactgaccgagtcacatagtgagtgagcatttttttgcctcttttggtctctagatgtagtaccgaaggtggagcaagggccttgatctgctcgaatccgtttttgaatagctcgaatctgccccctcacctgctctggcctgtctgaactacctcctcgagaatccttagacttcgtcatttttgggacaggagggtctacaacggtttgctccttggagaggtcaatgaccacttcagctggtgccttctctctagacggggttgtctcaccgcccttggacttcttagccagaggagataagcccgagcttcctcccactctcttcttcagagcctcaagcattttttgagacttgtctgcatgaaatgaaagtaacatggttagaaaaaagcatgagaaatatgaaggaatgataattaagaaggttaaaaacaagatggagtaccctgcacttcggcaggggcggagtaccttgcacttcgacaggggcatctgcccgaataagtactgatggggcatcgtcatccgacgagtcttcttgctcctccaggacggctttcccctttcctactacaggggtggatggctgagcaggtagaccgggatccctgatctggatcatatgtttgatgggcctgtgctcagtcagaagtttcttcttacttttaagcggcctttcctgctcttcctcaacctcatcctcctgctcagaatattcttgagcatgttgctcagccccgactcctcccttcaacttagccttgcacttaagttgaataagctccttctcctgctcaaaatgctcatgagcatactgcttggttcctgcacctcccttcaacttagcctcacacttcagttgaatgagctccttctcttgcttagctccctttgcccggccagcactagacttcctcttcttctccttgacaggctgaggaacgaaatctgttggataaagcccgtactctacaaagttggcctctgaggtcaatatggtggtattccgagcatcatccgagagctgaacaatcctttgagctctgtccctaagagctagcgtgaggggtggacggtaatatatagggatctactgaaactgagtgtaagtggtgcccatgccttccacgaagtaatactcgtcaacaaattcccaattttgctcatgaccttatccgtggtgcctgtcaactacttcaagtttggctaagagaagtagaaataccccaacctgccttgcttgggggtagacttcaggtcaaaaaaccaactaacctcgtgcagagaaggcacaccccacttctgggcggcggagagaacaaacagggcagacagatacttaatgccctttggagtaaagtgggtcgaacagaggcagaagtaatctgccactttcctatagtaggtgtgcaaaggaagcattgccccttgtttagtatgagcacccaaccaggcacacatccccttcttcgggttagtggctcggtgaattgaggtagggacattgttgggttttatgcccnnnnnnnnnnnnnnnnnnnnnnnnnnnnatttacttattaatatagatcataaataaca

SEQ ID NO: 146693 - DNA, 751 bp, Cannabis sativa
gcatgaatttctatggttagggttctgtaggtttgttttagtttggagtatgttttgatgttatgttgaagttatttaagttgtattaagttggtaattgtggtgattgagcaaggtttgagtttatgaactcaagctttgctctctaatggtgaattttacttctggaggttttgtgtgatctttttgcattatagggcactctagtttttcccctttttgtaatatttaaagtattgtcatgttatccatcgatagggaaacttttagtttcgattttaagtccccaaaaagtgatttagggtatcactcatgagttttacgaatattgtgatttaggggcctgtaaatcgtcgagtaattgttccactcaggttgaccggcacacctgaattcaaaaacgaggtaagattagtttaatgatatgcatatgtaacgcccgtatttaaatatttttaaactcaaaagataatttgacacattctataacttcatacttatatgggtcaggatcccgggtatcaaaatacaatttaaaagtattttactaatatgtacatataatattttttttttttaaaaacacgccaacaggaaactacaaaatacagacttaaaataataaaagatcgaaacactccaggttacactgccgcgatatttacaatcactgccgagctccatctcactattcctccagcttcgctttttccttacctacacaaggtagcaaactgatgagtcaacagac

SEQ ID NO: 146694 - DNA, 996 bp, Cannabis sativa
aatgaagtatagcatataattcatttaacctagtaacctagtttctattcttcatcacaaataaaaattgtaattggtcacaaacacttagaatctagactattaggtgaatagtaatcctaagatgacggtagattaaagtaaaacttaatttagtggtcatctaaacaagattaaaacaataatcatgacattgaacatataagaatagaagcaatttgatatataatggaaactaaaaattaacattcaataatgaaattaagaattcatgtctcgaattttgaaataacccttaactaaaagaaaactactcaaaactaaacattataatgaaaaccataataaatagtaagagtaaaaggagaagaaaagaactagaatgaagaacacttcgaagccgcaatctccgtatcttccttgctctctctctctttgagtttttctctctagtttgtagtttttgaattcctccatttgtagtctaagaggtcttatttatagtaatgagaaagttagatgaatcctattagaattatgattttattcatagtgtatagataaattcccttagaattagaatagtattatgaaatatctcattaaaagaaaagataactcatcttttgaaaaaaaagataaaaaaatcacaactctacttgaaaagctatctttattttcgctatcttttttctagaaatttcctgctgcaacgactgatagtattttgctcataactctctcaatattacttggaattgaacaattcaagatgctctaaaaatctaagaacgagatcttaaacttttatgctgagctccaagtccagttatgcctctaaggttgtcagaatttgcaattaatttccgcctagtacaatcgagctcgccgacttctactatttttcaccaaaatatgctaaaatccctccaaaagactctaaatacatgaatagtctctaaaatagcctaacaaattaaaatcacactaatcaat

SEQ ID NO: 146695 - DNA, 609 bp, Cannabis sativa
ttgtgtagcagatgtatcttagtctttagtgcaattttcaaactttgaatagatggagatgttttttagtcattttcttcattgatcacctaagaccttcatggaattaagttgaggaaagttcaactcatcattttcgtatttggtctaaaatgctcctcttgtttcttgtttctttaggctattaagttagtttattgggaaaatttgtcatgatgattatgcaatgctacaaatacattataaatacttaagtttaatttttagcggtaataatatttaaattataatacaacttttataggtacttgactgtttagtgaagtaaattgccaagtggcaatttctgattagttcatgtcatttttaaaaaaaaaataatttaaatatatcaataagaaaataacacgtgaataataacttagcatttaatggtcaggtacttaaagagttttaaaaatataacttaagtattgttatagccaaaaattaaatttaaatatttatttacaattgagagttaaacttaaatatttatactataaattatccattaataaataaagtattattaagcttttattgtttattattataatatatatatat

SEQ ID NO: 146696 - DNA, 547 bp, Cannabis sativa
  modified_base (27)..(29): a, c, t, g, unknown or other
  modified_base (305)..(321): a, c, t, g, unknown or other
caccatccaagccataacgagatggtnnngtagaaagcctcccactacgacgaggagccgtgaccttctgaacaggaaaatttgtggtagatttctcagttgtaaaaatttgtgtcggttcaactgagggagtaggattatccactacttgagtagaagaggatggaacattaagagttatatctgaaagcatttcttctaacactactttacttttcggcttgaagtctttaatatagtcatcttcaaggaaggtagcctttgtagagacaaacattttattatccttgtgactataaaatagnnnnnnnnnnnnnnnnntagaatttccgacaaacaagcaaacttcagttcgagattctagtttgccttctttctttcttaagacatgagcagtgcaccccctcatcctataatggcgtaaactaggtatacgaccatcccatagctcgacaggtgtcttaggaactgctttagatggaacaacatttaaaatgtcgttagccgtctgtattgtatatccctagaaggacgtagacagagttga

SEQ ID NO: 146697 - DNA, 506 bp, Cannabis sativa
gagtatgtgagcaaaaatgtaaaatataatattttagacaaaaaaaattatttttgaaaattgaaaacaatattgtgatgttttctgttttttaatttttaaaactcagtttttaaaaaaccgtttttaaaaaatgttgtcaaacgacccctattattttttaaaaactgttttcagttttttaaaattgaaaacagtttataagttatgaagtcaaacagcctaagctccccataagttctgtgtaccatcttttcgatttaagtttccataatctgaaagaattgctactgtggtattattagattggatatatatatatatatatcattattttttaatttctattattaaaattaaaacctaatttttttttttttcttttaacataattttttttttttgaagtaacctatattagagaacattgtcccacatggattaaatgtaaaagtattgagctatatataagaacatgggctactccactcattgccaattagttt

SEQ ID NO: 146698 - DNA, 735 bp, Cannabis sativa
tcaaactactattttcttttatctcaataaaaaattgaaagaaaaaaaacctatcaatcaatatattaatataaacgaaaagtataagacggtaatatatcactctaagatttctctaattagtataatttgttctctttaattctctcatttttattttttataaacttcataaatattaaatatacacatttatttatttttttcgttaattttttattttttattttattattgaaaaaggtactccaaatctaccaaccaccgacacgttttttttttttttgccctttttggttttctgttttaaaaaatcaacataaatatatgcgcgcggttcgctttataaagtctcattatttttttcagcttcattcattctttctttctttttttttttatttttctttttagagttttgtttttatttttttagcattaattgatgagtgaagaacgtttgataagggccatattaatattttgtctcacattttttaatgaaaaaattggagagcgaaagaaaaagctttttagtaaaatttttgctcattctttattagtttttgagaaaattaaacataataattttaaatttatgtgacaaatcaaggaaatttggtgtaaaactaaccaattctaaatgaatttactttcgaaataattacataaggtactattttttgtaacacgaaaatagcataaaatcaacacgaaaactacataaaagtaaca

SEQ ID NO: 146699 - DNA, 500 bp, Cannabis sativa
taccatttcaaaagggaaaaaaaaattaacattctctctctatatatatatatacccactgaatcgacgatctaaaaaagaacaagcaacacgagccaaacaattggccgccttgttcgcacatcgtttaacaaagataatagagacattgtgtaaagaaaaaagtaaatgtttacaataagaaaataatcagcctaaatagagaagatatttaaagagtatgacggattgtatgaacaactatttgacaatcagtctttataacaacttgagaaagattctgatatttgatccaactaagaatctctttgactcctacagcttctaccatagtcgattgcacacaactagatgttgacggttgaaattcgccaactaataacttgtggcagaaaagtcaagattagaaatcaaaacttctaaagaatatgaagatgaaagtgagaaatgataatattcaaattctagaggacatgttacgagcctgtgtgttagatttt

SEQ ID NO: 146700 - DNA, 599 bp, Cannabis sativa
acatcgaaaaacgactctatttgtgacccaaaacataggctaaaaatagcctaacaattatagctatctaatatgaaacccacttctactgagttcaaatccttaaaattgagcagttttaagtttgacattgattacaattcttacaagagtttgcttgttcaggaataaccttttgtggttgagagtgacatatatgtcaaacttaatggtttttctgaaaaagtggatggtttgaagcttaagattgatttgctgcatacttcccaacagaagatttcatctgatttggttgagttgaaagagtttgtttgtgcacagtttgtttcttttgctgcccaaatggctacaatgcagacacaattttcatctgtgtttgctgattccattgctaaggtatgatagttttttatggttgtttttcaaattttatttagttgcttatatatgcttttgtttacaatttttttacaggacaaagccagtgactcttccaataatgacggtggtagtgataatgaagaagatattgattcagagggcaattaagaagcagatgataatgaataggaagatgctgaagatgaagatttggatga

SEQ ID NO: 146701 - DNA, 518 bp, Cannabis sativa
  modified_base (213)..(237): a, c, t, g, unknown or other
  modified_base (414)..(419): a, c, t, g, unknown or other
tctagatcctggtaaattatttccaacagtttaaaccaacaacggattttcatcttaagtgttttccaagtgataacagggtgagttccttgaagccttcccactacgacaaagtaccgtgactattgtctaagaatctaaatgccattgtcctctttcggttgtgtcaaaaccacttaggcagtgggaccatcttatttcgaataagatgannnnnnnnnnnnnnnnnnnnnnnnnaaaaatatctcctttatttgctgccttgttgttcagactttgtcattttcttggaaaagtagtatttgtttaaacaaacactttcttatcaaatgaccatgggatggtccactcttaagcacttagaatagctaacaaaccatcaaaccttcgttaaaagttctagcttttcttaannnnnngattaggtcatccatgaatcaagtaatggtttacactaagtacacagccattccatcattctgaaattttcctttcactagggtatattcctagaagga

SEQ ID NO: 146702 - DNA, 671 bp, Cannabis sativa
  modified_base (92)..(111): a, c, t, g, unknown or other
acattatgtacatataatcatgagataaatcatgtgaaccatgcaacattaaatgttatttctaatctatattaataagtaaatatgattannnnnnnnnnnnnnnnnnnnagggcataaaacccaacatgcaggccactttcattaaacttgttcccacttaagtcgagaagctcaaacaatcaacacctgtcccatgttacttctcctccaacacgctaacgcagacgtggcctatgagcctgacgcaactccctcataattctcattttctttagcttttcatgccatttaccctactaaatggtacacgaaaataccatatttaaagagtaaatttgcactataaaaaggaaccaaatacaatggaaaatgaattagatttggaaaatttgaaattccatgcttaataatactatgtatcatttgtaaaatgggataactttttctaaaacccaattttacccccctcccctctctcttcttctcaatcccttattcattcaataactccaaccgaactcccctcctacactaccaacccataatttttttttctcttcactcattctctactcattttcttaacttcattacactataatatactacactacaagcttatcaccctattttctttaaaatttggagggagcatcatacaaggagca

SEQ ID NO: 146703 - DNA, 600 bp, Cannabis sativa
  modified_base (348)..(349): a, c, t, g, unknown or other
atctatcaacaagttaaccatgtcaatttagatcaaacaataataggttttataaaacttgttttaataataaacaatataaaacacacacatgcaacaaattggatagtttgatataagattgatttaatttaaattaactaaataattaattaattttcgaaaattctaaataataaaatattatttcaaaaatattcaaattaaattaaataattaatttcaaaattaaacctataaatttgaaaaattaggttttcaacaaacctaaatatgtattcaaaagatgctaacaaactcttcaaatttaatgttattttagaaataaaattaaatattcaataaaannaaatgataaataaatatcatttatctaattttataatttaatttaaaaaaaataacaaaatccaaaatttcaatgtcatttcgagaaatgatagaaccagaactcgaaaaatttcaatgtcatttcgagaactcgaaatgatggagtatgtctcttccgatgcatactcaatacattccacccaagctgactttaaccaatgccttagaaaggacatagtacttatccaaggtgcaagtaaactacgttgt

SEQ ID NO: 146704 - DNA, 737 bp, Cannabis sativa
tctcgtaatcatatatctggaattgtttactcggaccccccgtcccacccctggctcctatcttgtgtgtatggtcccccctactttcatgcgaagaaacagttttggtcggatcttatgaaactgggagataagtttggcggaccttggttaattctgggggatactaacttcgtgttgagtaattcggagcgacaaggttcttcaggaacagatcaattcattccttacatttcaagccttgttaactctcgggggctgattaatctgactattcaaggtgaccaattgacttgggacaatcacagggctggtagaagccatgtgaagtctgccctagataaaggaatcgttaatggcgcctggctagacttgtttcccaaaattgtgctttgctcctctcagacgtgtaattcagaccatcgtccattatgtctgatgactaatggaatggaaggaaggtttaaaagaggtttcaaatttgaagaagggtggacgagagacaatcgaagtcgcttggtggttgaccaggcctggaattcggtcttccattcttgggctcctgcccgcgccttcaagagggtgagtgctactagggttgctcttatgcattggaatagaactcaatatgacaagatggacgtggtcattaaagagcttgaaaataagcttaacgggattcaaagcttacatgtgggctcccgggattggagcactgaaaggtcgctccgtagatc

SEQ ID NO: 146705 - DNA, 521 bp, Cannabis sativa
  modified_base (469)..(470): a, c, t, g, unknown or other
ctaacaatttcatgccatgtttccactttatttattttttaatgcttagaatacaataataataataaaagaagagaaaataatacgtgttgcactactattttttaatggtgcatgatatgtttaatgaaaaggatgctaacttgattcttagtatttccttgtcttcaagtcgtttatgtgatgtttggtattggagttgggagagctcgggccatttcttagtaaaatcagtttataagttcttacaattgagcaaagagttgggtgcacaggaagataatttcgtcttttaaaatactctttgaaagttaagtgttcctccgaaagtgaaagacttgttatggcgtgctgccactaattgtctgtctacgaaatctagacttcgttctagacatgtgtctgttgataccatctgtcatgtgtgcaaagtaaccgatgaaaccatctaccattgcttggtggattnntcttttgccaaagcgtgttggcaacagttggttgctggtgttaatttgacg

SEQ ID NO: 146706 - DNA, 612 bp, Cannabis sativa
taataataataaaaggaaaatttgttaaaatattcttagaaatttagactattcttttaatatactatctttaaataaatactctaaatattctccaaacatcttaaaatcccaaaattacccttataattcaaaagctctcttctcccactctctctctctgtctaacttcccccctctctctctctctgttattcccatccagccccaaacctttcaagccccgactgttcacgagctccgaccgaccaagacgacccacgaccgagaagactcatgacgactcgcgacgacccacgagaagcacccaagacaacccacgaccacagcatttttttctggtttctgacccatctagcgcttgttttctgcattttttttctggtttttgacgatgtcgcgaaacatcgcgaaatcttgaaacatctctaaatgtctccagttcaaaacaatgcttattttgtgcattttttttctaatttttaacgatgtcgcaaaatatcgctagatgtcgcaaaacacatcggaaacgtcatcgcgaaacatcgctaaatatcgcaaatcatcactaaacttcatctctgacctcagatttgttctatcattgcaaat

SEQ ID NO: 146707 - DNA, 560 bp, Cannabis sativa
  modified_base (239)..(253): a, c, t, g, unknown or other
gaaaacaagtgcaggggtatgcattgcgtacccctgcgcacgcggaatggggcttttaaccgagacaggaggttgcacgcagcctcaacggccgagggaactcggcatgacacaagctttagacagcctgtgttcgagtttccttggacagggcttgtctgaagccgcgtgaatgccgagtgaatcgcctcgtgcgcgcgcacatgtgcaaccaagtttcagatattttcatccaaatnnnnnnnnnnnnnnntaattcataaaaaatccaaattgagttctgtaaaaccctaaattcattaattctttgtctaaattccagcaaaaatatttcaaatttacaacatacattgcgatttccatacaatcatcaaatttgcatataaaccaacatgaaaccatccaaatcaacacaacatcattttaaatcaatatttcatgatagtaaatcattaccatggctctgaagccatttgttggattatagttttaccagaatctaaatttactaccatgtatgttgtttaacatcgtaaatatgaatttataaaacaatgtaa

SEQ ID NO: 146708 - DNA, 552 bp, Cannabis sativa
  modified_base (169)..(176): a, c, t, g, unknown or other
  modified_base (494)..(515): a, c, t, g, unknown or other
aaaaaatcaaaacttgactaacccttcaaacaacccctaactcatgcattagaccacataaaaactcatatctaaactgcagaacgcaacaacaacaaccacagcagctacagcaaagctaaaacaacatatcactcataaaaaccaaagtttgagttcaaaactccannnnnnnntaaaatcaactaatcatgcatcaaaacctgttctattctactcaattaaacatatttaaacttaagaaaacaaaaataaacaataacaacatccacagccacaaattcatcaaacatgcaataattcattttttcttaaacttcaagaaaacaaaggaaagcttgaacaaagattacctccactttaattactctaagattgatggaaacttgctgaatggaagaacaaaacccaaccctagcagccgtaggattttcgagagagagaaagagagtctgagaggaagaaatgagagtttgcttttttttttttttttnnnnnnnnnnnnnnnnnnnnnntttttttaaaaaaaaaaattttaaaattttttttttt

SEQ ID NO: 146709 - DNA, 612 bp, Cannabis sativa
actaggagaaagttacatgcaaggcacaaggcacgtatacttagttttagttttatcttaggtactatataatttaattaaaaattatacattaaataatcatatatatattttaatttattattatggtctaaatgaatcttttaatatagagtgattaattttttataaaactcatattactacccaatctataaatgagcactactattaaattggtttttcggtttataactatcttttatattatttcttatcggttcctaaaatcattggataaaaatgcagaactttaaatgacaatttataactattgagaaaaatcactttaaataacggtttacaactattggaaaaagtcactttaagtgactgtttataactgttgggaaagacttctatcaaatagtaacagacggaaaaagttactttaaatgacggtttataattgtcaaaaaagtcactctatttatattgcattaataatatatcattcatattcatgacaaaatcttcttacttcttagcatttgaaccaaattggtattcatccattaacaaaactgactataaaatgttaaactaagttggcttatgagtacatcataccta

SEQ ID NO: 146710 - DNA, 763 bp, Cannabis sativa
agtttctagaatgttcaaagtaggagttgacctatcaacactcttcaaatctgactttttttaaaaagaaaatttttatattaaactcaaaaaaaaaaggttgaattaaacttgttacagtgtccaaacagttgataattttacatcacaaaaaaaaaaaaaaataacttagagtaatttgcagtgtaaatatttaaatttaactttcgattataaataaatacttcctgattgtagataaatagctaagtttaattttttacggcaataatacttgttatatttttagaacttttgtatatacatgtccattaagtgtcaagtcattatatgtgtcaattttttattagtatatttaaattaagttttaaataaaaaaaaataaaagatttaatgaccttgactattgagagagtgtcatgtagctattgacttgacacttatgaaccaggtacctcctacgaaagttttaaaaatataacttaggtattatttctgtcaaagaattaaacttatgtatttatctgcaaccgaaaattatttatctataataaaaagttaaatttaaatatttataccgcaaattactcataaatttatatactcaaatcagggagtcttatcttatgaggctcacaataaaattttagctgcttgtagtttggcgaagtatacttttcggtagatatttatattgtaaattctttttttttttttgaaaataaaggaagctttattaataaacttctttcatgattacatc

SEQ ID NO: 146711 - DNA, 1003 bp, Cannabis sativa
ccatttttgaaattttttcatattcaacttttgtgggttttgtgtttattgatttcattattttaggtttttcattttagcaattcttttgtttttttttttttttttttttggtatgtatggcttctgttatattaatttaatgtatgtgttattttattgggtttttcattttttatttttttagttataatttctattacatttattgttgttttttttcttgattttgttttccaaatgtgttgttgtttttcatttcagtttctttatttgatcagttttcattttatttattattttttcatagtttttttatagttttaacaccttgctatgtgtgtttgcattgaaattgttgttatctagttatttgttgtccatttatatatcatcaatgggtaaaaattagaactatcatggatattgatattgaaggagtttttcctgtttgttagtttgtttgtagttgttttgttgttttattatagttttgcaacttgcatatgcccattcattacatttactttttttgtaaaatgcaggattgggttaacaaattcagtatcagtgatttttatagatccaagtgcgtatgtactagcaatttctctgttattattaacattaagaatactttatctgtaaatttgttaaaaatgttctgagacacacagtttggacattttttagatatccttgattttgtttttcaccccaagtagttcacagccttcttttgagggaggtttaccagcccaatcccaaagaattttgggctaagattgctggtcattgtatacggttcagcgccgaagaattttacttgatcattggtcttgattgttttggggattgcaataaactgttattttctcgggaatcaaaccatttaattgaggtatgtttccctggcataaaaacgattgatcataagtctatagaggacgctttcttgggcagtaggtggggacaggatgaatccctaggattgaaactcact

SEQ ID NO: 146712 - DNA, 1174 bp, Cannabis sativa
tttctgagaggattgaatattagttctcttatagtgttaattctgtgagtgctaacaattggatctaaatatataattggattatagattaactattaacattaaattaatggtaaataaagaattcaagagataatcagaaggttaaacggtaattttgaccaactctaattatgaattaataattggagagcaaactacttatattgattatatcaatggactacaagtaaaaattttgtaaatataattgtatattatcaaagagtacaatttcatatttatagtggagcaataatagaattaatagactaaattattctatagaagatttcaataataatctaaagtttattgaagcttcgaaatataagtttatagtccacagatcacccctatacaacactgtataggggaatatttaatttgaagaataaattgagaaagaattaatttctataagaaataattattattggaaaaaatagtattttttttttataaattgttattattttgaataaatatatcaattatgaattgaataattaaattaacgtgatatttaactatttagttttatttgataaaactatattaactagctaaatataatattatttttaaataatattcaaatagaaaaaaaatattattttagtataaaataatatttattttaatcctagtgaaataaaaaattaatgagaattaatatattattatttattttaaaataaataataaatctttgtggcaaattgagaaattaatttgggctttaaaatatagcccacacgtgtggggtgaccatataaaagtctaaatttttttgattattttattaaataagataaattaaaataaatgataattatctttttaattatttaaattaaatatattatagtataatgtatttgaattaaaagatactataaaataaaaggatataattcagttattaagttatgtgatatttaatttgaattttaaattaaaataatattatatttttataggatgaaaaagggttttaattaatataaacatgatatatatataatttataattaatatatatacatatatataagagtgaaaagaacttaacaaaaaagaacaaattttggaattaaaaatacgattgagaaaatttctctctctctctctc

SEQ ID NO: 146713 - DNA, 1290 bp, Cannabis sativa
tattcttcctcaaatctagcacttcgagagagcttgaatttcctagacatggaggaatgttcccactcaatttgttaatggacaaatcaaggccatggagccaagtgagattgcaaatggatggtgatatttccccaacaaatgaattgtttgagattgaaataaactctgtagaaggtggtaggactggaagatgaccttgaagtcggttgaaggcgagattaatgtatcctagagtcttccatggaatctgatctatttgtgtcaaagagttgtgagaaatatctaggtaatacaatgaatccttacccatattccataaccattggggaacactgccttcaatttgattgttggagagatccaagaattctaaattttgcaagcttcttaggaagtaggggaactcacttataccacatgaagacaaatacaataaagaaagagtattgggaaaggtatcattattataattattagatacacatgaaaaactattattagaaagataaagactttcgagctttttcaattttgaaaattggtctaattgcacgacaccgctcatattatttgaggaaagatccaaatcagaaagattgacttgctgaaaaattgatgttggaaagaagccttgtaagttattattatctaaagaaagagatacgaaggaattgtgttggaattgttgaatgctaccactgaatttattggaacctagatctaaatgttgtaaagatggaagggaatatatccaataaggtattgtcccattaagatcgttattaaataacttcaagaatgtcaaatgcaatggaggagaacccactaagtgatgttttgaagagatacacgagaatggattttttgttgagttactacaaatttctggaatttgacctatgaaattattctctgaaagatctaaatgggttagctgatgtttatttaaaatggatgaccatgcaatataaccttcaaaatgattacgagaaaggtctaaaatgtgggtgatagtacttgtacggaattgaaattggattgagaaagagatataacttgtaaatacttgaattttgtacaaaggttaggatctatcacgactccagattcagaaagattcaacactttaagtgggctgctccaattatattgtggaaaagaagcagtgagatcccaattgtgactcaaatcgagttgttgaaggtttggcaaagtgagaacattttctggaagtttcccctgcaaatgagtttcactaagatcaagagatgtcaaagaagttgagag

SEQ ID NO: 146714 - DNA, 726 bp, Cannabis sativa
aatccagacctgttcaatataccccaaaaagcataaacaatgcaataaaacaccacaacaaactcagaatcaaaaaacaattaaagaccaaagtttgaattctgacctcaaaccttgtctaacaaccaaaccaagccacaatctatcataatttagctcaattaacataattataacctcaaaataccaaacaaacaactcaaaatccctacagaaccctaatctcaaaatcatgcaagatccactacactttcctacttaaaattcaagaaggaagaagaaggaccttaccttagaaaaatactacaatcaagattgttgatccctcaagaaatgatctaacttgaagagaaaatttgatttcctccttgggtttcttggtggccgactcaaagaaaagagagagagggggataaattcttaattttatctaatctctaaatttctaaacaatacaataacataattaaattaatattagcaccaaataataaaaggaagctctagatttcccactcaaccactaaggacaaaaagggaagtcaaattacaaaaatttccttcacccctaccaatagattatcttacacctaggggtattttggtcacttctaaaatctcaactattcctcatattcccaatgtctaactatattgccccggtatactaaaaatactaaaatgtgattttaatggccaaaagtcgcgttccaatgttgtcgggca

SEQ ID NO: 146715 - DNA, 584 bp, Cannabis sativa
gacacatgcatggggacaaggaatattttcaacaattagaacatgcaatggtgccataactaagttcacatcaccacctttctcacagtcagaacctcttgaaacgttaaataattgtgcactgttacgtatgacgattctaaaccttccatcctcgtgttgctttatcaaattttccttaaaatgagttgccaaaggggtagcgcacttacttgccttttcgagacggtcagcgaactaattttgcagtgtgaaccttatgaactcatagttattggatatttctggaattcttctgtcacgttgttgaggctttcaatagcattgtttgtcattatgttgtacctgtctcctggacaataaggacgagcccacttttccaatcctatactctcaacataagcagcgatggcaggatccatctatcgaagcacctacaaatgtctgtcacattccctctttaaccatgcataagcagtcaaccatatttacgtgttacatacatcagtcttgaacttgtgggtgacattcatagaaatatgtttgtagcatgcacagtggcatgcttcggggaaaataacctc

SEQ ID NO: 146716 - DNA, 1371 bp, Cannabis sativa
  modified_base (986)..(1000): a, c, t, g, unknown or other
  modified_base (1184)..(1200): a, c, t, g, unknown or other
taacctaaaaattcaaatctattatacaaaaataatcggttacattttataagcatcctcaaaactgaattgcatgcaaatgaagaaacccaaaacaagtacaccaaaaagaaccaaacacatgatctggaaaaccgattcaacacaaagaatacagaaaaaaaaccttagaaaaatcatgaagatttaacaaaaaattaacaaagaaaacaacaaaatcaacacaaactcaaacttaaaacaaaaataaaataaataaaacaatgatcaaaaaccaaataaggacacattttgaaaaaattagaaagaacacacaccaaaacactaaacacaacctaaaatctcaaccgatcatcacaaaaacaacaataaaccctaaaaacccaaccgatcatggaaaaacatcaagaaaaaaaacaacaaacatcacactgcagaattataatcactaaactaaaaacattataacaaaaattatgaacaactgatcacatacctcacttaaccaagcaactgagctcaaaaatcaataaaaacaaagaacccgaacacacggtagctgaaatcgaagcttgcttcgatcgacaatggcttcccacacacaccgacgaagaagaaaaaaaaagaagaggaagaaaatgcaaaccctaagctcagataatgctcaaacggactggaaaatgagagagaaaatggttgagcaaaaaatgagtttgattgaagaaaataaaatggcagtaggatgcaatgagtagtaagctactccatgcaaaaaggaagctataatagctataaaaaaaataaaaaaaaaatatgggaattgagccaaaaataacaaaaatatggcttttataaaactcataagaacaaaacataaatctcatatacacaaagctttatttaaaaatgccataaaaaagtaaatggtaaaaaaaatcccataatttgggtaatttttattttataaaaggggtaagttgaaaaannnnnnnnnnnnnnntcaattaatcaaatttacctctaactttatatttaactgaaacataactctttttatatgtattgtacccaaaataccctgacataagagagtcacacagagaatatcttaaagtgacaggggaattggtacaatatttaaaaaaatggtaaaaataatagactttaaaaaagaaggtaaaaannnnnnnnnnnnnnnnnaaaatggtatagagtgtaattttctgtttacaaaaatatgggaaaaacaataaaagttttgatatatataacatccaaatttaattatactaattatgaaattttttttttaaaaaaaaaacttaaaatatgggaaaaattattatagataagaattaatgccataaaaaa

SEQ ID NO: 146717 - DNA, 784 bp, Cannabis sativa
  modified_base (39)..(42): a, c, t, g, unknown or other
ttggcattgaaaacttcctggaacttttcccaggtcatnnnngtaacatcgtgtatcatggacaccatgtaccaccacactatcgcatcttcttgaaactgaaaaaaaggcacagaccactctatcatttccggtgacgcccatgaaattcaatatcttggtgatcacagttagccactgctcggctttcataacatccgtacctcctaggaaaactggaggtgcttgcttgctgaaccttccatacagaggttccatcggattcactacaatcactagttcggcctggataataggggcaggtgccactaaaattttaggaacaggaactgcaggaacaccatgtctcaatcggtggatttcattatcttgttcctcgattgtggcatgcatttccgcaaacctattttcccaattctaagcttcctgagtagctttgcagcctgggcagcctgtggcaggttagcatcaccccgaccacgtgccctgcccttgggacctctacctcggcagcgagcatttgggggaaactgagctccctaaccttcatttgacctgaccgagttgccttgactcctggtatttagcctggcatccatctagtctgaacaacctacgtaaccaagagctagcatggtcagatcatgatcaacgagaacttactaatgccgcttatttgcaaattaaaaacatttgcctattctactatcaggctactaacaagcttccgaacatgctttcttaaatcatactactaaaataaactactaaagcaataaaagct

SEQ ID NO: 146718 - DNA, 880 bp, Cannabis sativa
tacatgtttgtattgtttgtttatttatttatttattgttatacctgaagttcggtaagcacatcagtggaggacacatgtcgagctgggaagaactcaaaacacgaaaacaacaagtatgcttagcatggaacaactcgttggaaatataatttacagggcatgtttataacttggctggctgaatagccttctgcgagacagaaacgtatgaactgctaatttatgtattgacgagaaaccatgtgggtgcatacgttcatgacgaggcctcaacctcgctgcgtgaaagagaaagcgacaacactaaaaatactttgtgtatattatacgatacacaaactgagtataaatcgtgtgacgagccaagataacagacaacgaggcatttatctcgtgaaaagatggtatgcatgcgaggaagatcacctcgacaccagaaagtacagttatcagagttaagacaatattagtctcaagagccaaatgataagcaataactcgctatcaaagtgatcttggctcccttctcggcgagttatccctatgagataaggtttaccgcatatcctttaattacgcgttcctctcggctcaatgaaagcgagatattcacagctgtgtaagaacctcatttatttggcttaatttgtaagcatatcccacgattctaggaataatggctgtaaacacattttggtcaactttgtaattaactgccactatgcaattataaatagtggcaaactatctcaaaaaagggggaggacgaaaaaaatcttatgcaagagaccctgaaaaaaatactcagaagtctgaataagattgactcgtggactatgcagaattttgttggatatattttaccagtatctagatt

SEQ ID NO: 146719 - DNA, 523 bp, Cannabis sativa
aaagatggtggtgatggtcctagtgttgataaggttggtggcgatgttcctgctgttgatgtgattcaaactgaggttgttgcaggcagtgaagagaggtccaaggatgttaaaaatgttaagggcaaagaatctggtataaagggagataatttcttcaatggtttaagccagcttaagattgatgatgaccaagttgtgttggctagtttagaggttgttgctaaaatcaatgtaagtgtactttttattcttttttagatggtgttatcatgttagttttttttagttgttagacagttttatattagttttgcaacttctacttttttttttttttaattttatcttttaggttccagattccaatccaaatgttattgttaaaaaggcagatgccattgcttatgatgaagaagtggatgacacttttacttatactcctctattggataatagaaagcgtgccccgacattgaaatcgccttatgttgattttggatcggttgatttgagctgcact

SEQ ID NO: 146720 - DNA, 647 bp, Cannabis sativa
ggcgtggtttccacaaaatcaatcgtgcacttcagacaaaagtagtgtagcttcttcttgggtaacacatctgtgcaatgcatggagaatcctcgtctatacataattccctctactatgatgtatcgtgcagccttgcttctcattttttgagcttcatttcgattatctgggtgttccccagtattgaggtaggtcgctattggcgtcatctagtttgggatgtatcaatcatttcaatctttttcgtgccgatgatgctaggttcttcaagaaactgaataggaacaagatttgctctatcacttacatcactacttaccagtcgagctaacgcgtcagcagtcgtgttttcttcccttggaatttgtttgagagtgtaacttttgaactgtgcgagtagatcatgtatttttctcaaatatgctatcatcttttctccccaagcctcatattctccagatacgtggtttaccaccagttgtgaatcactgcagatttcaacgtgtttgcccttcatttcccaggctaactttagaccagcgattaaagcttcatattcggcctcattgtttgatgctttaaatccaaactttattgcagcgtgcaggtgttgcccccaggtgtaacaagggtgattcctgcac

SEQ ID NO: 146721 - DNA, 785 bp, Cannabis sativa
tagcatatatttaatcaatctcttattttagtccttgtattattttacaatagagttgtaataaatcttgattttcttccattgttataaaatctctaacatttttcacattcataaaagagcccataatgttagatcatatctctctaaaaatatagagttcttgccttagttattcataagcaatacaaattcgaagtagacgtagctttattaccgtcgcgacacagaggtaactataaatcttgtgtgtgtctctctcatttattctacttaacttctatttcctattgccaatctagcaatatgatcgtataaaaaaattataaagataattttaaaatataaatttagaaatatatagacatataattttatatatatatggaaaaagtaaaaaattatgtatattaagatttacgtttaaaaaaattaggtatataattgtaattttattttattttttgaaattaaactcttattaacaataatcaaagtttaatacattaatgagaaaagaaagaaaatcctcaatccaagccaattcaccatccaccctaggagtgttcatccagtccaattcgcactattttgctcatagtgcatccgatctgcactaagtgcagatttcatattttggatccaattcaatctgcacagtagcgtaaatctaatccaatccaattcgcaaaaattacggattggaacgattattttggattggttactttttaatatttatgaaaaaaaatattttttcacataactagcaataaaataaaata

SEQ ID NO: 146722 - DNA, 611 bp, Cannabis sativa
ttgtttccattttgaggttaaattattgtcatttttcaaggttaaattagttctgatttgttgtttccatttttcaatgtgagttctttcaattttttgagattaaatgctagttgtttccatttcacaaactagagttttaatttttcgagtttaaattgtttctattttgttatattcattttcaatgtgagttgtttccattttttatgatatttgtttccatttcacacataaggttaagtgctacttgtttccattttgaggttaaattgttttcattttttgggttaaattgtttttatttttaatgtgagttgcttctattttttattatatttctttccatttcacatatataatattaaatgctagttgtttccattttataaactatagtttccgtttcgtgatgaaattatttccatttcgagattaaatgttagttgtttccatttcacaaactatactttcctttccgaagttaaatggtttttatttcttaagattaaatgctagttgtttttatttcacaaactatagttttcattttgagattaaatgctagttgcttccatttcacataaatgaggttaaatgctagttgtttc

SEQ ID NO: 146723 - DNA, 641 bp, Cannabis sativa
aacaagctccccgggagaaccatgcaaaatacactgcattcactattctgactgaagatatagaaagtgtatacatggcaactcagtcgttggccccgcataagaagcccgggcccatggataaagatgccaacaaaagggacacgacaaagttttgttggttccacggagactacggccacgacactaatgaatgctacaacttgaagcgggaaattgaattcctaataaggaaaaataatccgcacctacaaaagtgtgttaagacagaccaaggtcagaggaacgacaacaaccaagatttgctacctccacgagtagatggaaatctacaattcattgttggaggccctcacattgctggagattcaggcaaagctcgggagaggtatgcccgaatagtacaacacgagcaagaagaagtcatcctggccgtggaagaaagtaagcccaaagttccacgagcaggagagccaatcataaccttcaacgatgaagacgctgtcaaaattagatttctgcacaacgactcgctagtcgtggaagtccagatatctaataaaacggtggccagaaccatgatcgataatggagcctcttccaacattttgttcaagactgcttacaaaaagatgggactc

SEQ ID NO: 146724 - DNA, 814 bp, Cannabis sativa
ttttatttaaaaaaaaaaagaaatcacccaataattttttagccacattttatatagaatagacatatattttctcttattattatgtaatttcataatttaatattgattagaatttattattctatttatttctcataattttaataattaaatcattggatattactctatatatatacacgattttttccattttcaacatatgatacgaaaactttatttttgtatttttgatgcattttttttcgatctttttttaggtgaatcggcattaatttcattactttaataacaaattacaagacaaacaacatctttataagaagacctgaaaacaaatacaattctattaaaattaaaatgagttttatatatggcataatattctaacagttacattttttttcttttttttaactttttgtcactcacacaatcacatgaaattgatattcaaatattaattttataggtcaatctaataaagaattattaattttttttttctttttgtcaatgattatattaatatatatacaatttgaatttgaagttttgtgctctgtgaaattatttttgtacctcaatttatataatattcatttggtatcgtagaaaagagagaaacaaatgacaaatagtttaacattaagatgctaaatttttttaaaattatttatctttcatcgttttattggctctggaaattatgtagaatatggatttcttttctaaagtttgataaatatggagaaattataattttatttaatctatggcttttttttaatttgggttagttatatggaat

SEQ ID NO: 146725 - DNA, 1875 bp, Cannabis sativa
  modified_base (710)..(719): a, c, t, g, unknown or other
  modified_base (960)..(963): a, c, t, g, unknown or other
attttgctcatagtgtattcgattcacattaggtggcgtttggttgaaggtaataaaatagaatggaatagaaatgaaacaattttcattccattcatttctttagttgcattttatggcatgtttactaaaggggaatgagaatcaattgtatgacattggtttgtttactaaattttggaatgagagaaattagtggggcctacacaaattaaggagaaaacaaaggaaaaagttctctctccattttcataaggaataattttccctttccttaacttactttatattaattatatttttattaattaaaaataaaaaagataaatatatccttcaaaaatatataaataaaaaataattacatgctctaataatgacaatttagtcaaatgaagtcattccgattacttttcctgattatgtaaacaaaataaaatgattctgatttcctttccgatcagtttagtaaacaacaaaataaaatattgtttccgattattttatattttaacccgattcatttcttccattaatgattctgattccaattacagtttggtaaacatgccattaaagtattagaatgacattacgatagactgctctttctaccattttggtagaatgactattctattttaaaaagtaagaaaagaccattccaacgtaataagagaaaaaatttaataatttttttatcaattttnnnnnnnnnnttaaattttattccattctattcttattcctattctcaatcccattcctattcttatattttcattcctcccaaccaaacgcaacctaagtgtggatttcatattttgaatccaatcaaatctgcaaaagtgtggattggatcagttattttggattgattactttttaatatcaaattatttaatatttatgaaaaaatatttttttttcacatcagtagcaacaaaataaaataaattnnnnttattttatgtctccaacaataataaataaaataacaaattcaaaggaagaaaaaaaaaaattgtatgtataaagaaatgtgtaattttttcttaaattgtatgttaatatatatagggaaatttgttaaaacatacttaaaaatttaaattattctttcaatataccacctttaaataaatactctaaatattctccaaacaccctaaaacccaaaattacccttacaatttaaaaactctcttctcccactctctctgtccaacttcccccactctctctctgttattcccagccccaaacctttcaagccccaattgttcacgagctccgactgaccaagacaacccacgaccgagaagacccatgacgaatcgcgacgacccacgagaagcacccaagacaacccacgatcaccgcaccacttccggcaaaacccactagcttgttttctgcatttttttcctagtttttgacgatgtcgcgaaacatcgctaaatcatgaaacatctctaaatgtctccaattcacaacagcacttgttttctgtatttttttctggtttttgacgatgtcgctaaacattgcgaaatcgtgaaaacatctctatatgtctctaattcacaacatcgcaaaacacatcgcgaatatcatcgttaaacatcgcgaaacatcactaaatatcgcaaatcatcactaaacttcatccctgatcttagatttgttctatcattgcaaatacattgctaaatatcgcaaaaaattagtaaactagaagaaaaaaatgtaaaaaatgagagagaccgtgagagaagatgacagtaaggccttgcgatcgaggttctgggtctgtgtgttcgacggtaggggttctaggtcggggttaacaccggagagagagagagagagaga

SEQ ID NO: 146726 - DNA, 1111 bp, Cannabis sativa
  modified_base (765)..(771): a, c, t, g, unknown or other
agttgtaacatatgaggagttacacatctaaaaatagattgtaacttaaggatcacaattgataatatgaaatgaatgagataagtttcgataagtttctagctgttaaaaacggttacaatactcaattatatcatttaaatgggtactgggacgttggaaaaagatttgactcggagaggagttacaaaaactaaatattgagttttttggaaacagttgttttatggtagttaatataatattttatggttgttttttgaacaactagaaccacttttgaaaacgtcattaaacgtacatgaattgattgagcatgtttccttctccaacatttttatcccattaaacagcaattaaagtgctggtaacggctatgtggtcaaaaaactttgatttttatatgtgatcctcaaaacactacaaatagaagtcttggattcattttgtaagacaacaagtttctatcaagagagcacattgctagaaacactttaggcttgataaatctagaaagctatttctattattttattttccctaagcgcttgtggtaggggaaaataaaattttggacaaaggtgtaagaccttgttcaagtttgataattcccctattacacacttgtggtggtatgtggtgttgagatggctgtcaaatctcttatatatatatgctatttatatattgtgttttatatgtagcttaatgctttgagttgcgattcttctcttcatctctatattctctattttatgtgtatannnnnnntagtgttgtaacattatttaatccatgatttttttccttgtatttatttgtcatagagttataatcttattaatttgatatttttattggagtacatcaatttccaacagtcaaaagcttatcctttcctaccttacttcaatggaaggtatgaactcagcatgtgataatacaagggtaagaaatatgatatttcgtgatttactattttttatatagtgaagtatatattaacatattttcctacgttgagatataatttttttatgtaattatatgtgagatatatgtatatatatgagttatatatatcagtgtatatgtcatattaatatagtga

SEQ ID NO: 146727 - DNA, 669 bp, Cannabis sativa
cggtccttagacttatatatatgatgattcatattattatagaaactgctaattaaaatgatttttatatttatccaataaatatttattataaattgataaatatgcaacaatgcatacaactatattaataaattattcattaaatttatgattaattacgtagtgaaatataatttgttaaaaaaaaatagtgtaatataatattcataatataaatttattttctattttcatgataatatatgtatcaatttcacattttatattttattatattagtgattattaataattagaagatacatacttaaataataattaattttatatttaaatttatataatcaataattactttctatggttactttttataatatttatagttaaaaattatttatatgtataacttctatagttaaattttcatttttttttccatcaaatttctgattttgtttaaaatttacaaataattaataataaaatttaagaataacactaaatattttttttttctaaaaaaaaagaatacatatatttttttttaagaaggaagatacacatagtttatataaaatatatgtggaagatatatatggaggatatgtgaaagtatcattatagaagcttctatataattaaaatttaaaatttaataaattt

SEQ ID NO: 146728 - DNA, 1030 bp, Cannabis sativa
  modified_base (43)..(65): a, c, t, g, unknown or other
taaacatgtaaaatacatgtaaacataaatcacttcaaaattnnnnnnnnnnnnnnnnnnnnnnngtaatgggttttatttagggcacaagacccaacaaggtcaaccgactctatatgacttaaaagctgtcacgtcagttttccatctatgcgttaagttcctaacaaagaatagggtagggtacctcagagggaaccaaggaatagcacaggattgctataaccttgccctaactatggtcgaaaaggaaagtttctcctgccagagttcaggcaaaggaaaaagtatttgccaataggaagtcgcccaaggcagggacgaggacatggatccccgacttggggaaccaaacacaaatgtagggccagtggaagaattggaagaggtagaaattgacccaaatatgtcaaccagaaaactcgaaattggcaaaggtttgttgctcgaaataaaattagctttaataaaaattttaagagcaaacctaaacgtttttacctggtcacacaaggatatggtcggtatcaacccttctataatatctcacgccctaaacattgacccaaacttccatcccgttcaacaaaaaatgagactactagacaaagaactggcacaagcattgaaagaggaggtagaaagattgcgcaaaaatgagttcatcatcgaagctttctacccggcttgggtagctaaccccatactggtacccaagcctaataaaaaatggcgagtatgtattgatttcaccgacctcaacaaggcatgccccaaggactgttttccactttcaacaattgatcagctcgtggatgcaacggctaggcacgacatcctgagcttcatggacgcctatttggggtataatcaatttagaatgcatccaccagaccaagaacatacatgtttttgaacagatatgggcctgtactgttacaaggttatgtcatttggtctgaagaatgttggggctacctaccagaggctagtgaataaaatgtttaaagactagatcgaacgaaatatg

SEQ ID NO: 146729 - DNA, 547 bp, Cannabis sativa
gtactggtgttcgagccaacttaacccgaagttctgtaagtaatgaattgagccatgtaagttcagaaacagcttgagcaacacttcgatactctgcttcagtactagaccgtgacacgatttgttgcttcttacattgccaatctatcaagttgggaccaaaaaagatagtgaaacccgatgtagaacgacgatcatcaggatcactagcccaatcggcatcactaaaagctgtgatttcatattctgtgagtggttttagatgcaagccatgaaatacagtgccactcaagtatctcaatatacgttttacagcatgccaatgtgtagataaaggattagccatgaattggaaaaatttattcacgttgaaggagatttcaggacgggttatggtgaggtattgaagagcaccaactatcgatcgatagagctgtggatcagggtctggttctccttcataggcagataacttgatagtgctgatcattggtgtaggaactggtttagctccttccatttgagctttaaccaataaatctcttat

SEQ ID NO: 146730 - DNA, 574 bp, Cannabis sativa
  modified_base (195)..(206): a, c, t, g, unknown or other
gtttacaaaactttcatagagcataatatagaagttatcaccaagtgactgtaaaaaatacgctcaactgtcccaaagaccgtacgctccaggcctaaccgtcccaacatgtacaatatttatccgctcgctctcactgctgctcaacctaaccttttgcccttacctacacatggaaacaataactgtgagtcnnnnnnnnnnnnaagaaaagcataatcataaacataaaaatatatctagaccgcaaccaggcgcccatacacctaaccacaatctactaactgagtcaggaatgttcttgacaaagtatgactaactgggaatccaacctatacttagtactctagtcgtactgatgtggtagcagttaagtcatacaatctaatagcctagcatatatctgatggcatctctatgcaactttatgtacacctcactaatgccatgatatgctattttgatggctatagatttgcctaacatatatatgttgatatctcggcgcaactctatatacacctcactgatatcttgatatgttattttgacagaaactaacatgtacgctaaa

SEQ ID NO: 146731 - DNA, 623 bp, Cannabis sativa
ctaccgcttcatgattacttcatcaactttttagtttttgtcggccttgcacgttaccaactcattcccccaaaatcaagtacttaaccaaaagctctaccctaccatgcaagtgaacaacaaaggtgaaaggtacccagaaaacttacgtgagggttatgaactaatagttgatgacgatcggttgtagaatgtagtatggcaacgacggagaaacaacagtaagaaatctatggtttctaaaatcttctcaagggagtttcttgggacgaaatggagaaatagtgaaagtaacccaataaagaaaaaagggttggcttttatagaccagaaagggtgcaagacagttgtggtcagacagcatcgtattgtgggaatcgtaattgattcgtattctacaaatccaacgactaagataaatgggtgccaggacggttgaaaacgtttgagtacttctctgacactcagattcaatgcgccggtttctcaatggacaggaagtgaatcattgcctgtaaaagggaataaatattaatgatgaccatcataaatgcagcccacatgcctaaagcacgtgccattataccaataagccaaccggaggcatcaagcaagcctcactt

SEQ ID NO: 146732 - DNA, 806 bp, Cannabis sativa
ctaactcaaaattacctcaaattcaacaagtaaacatataaactagtcccatagttaccaaagaacaattctacgaagtcagaatctctataacatttttaaagcataaagctcctatataaaactaatcgtttttagcttaaaacgtaattaaactataccttaagctttctctcttcaaggatttgttatcctgctactatcggagcttagatcgctaggcttctgattgaaaatcgaagaaaataaatatagagagagaattttattgaaaagaaaaaaaaatgaggattcgttcgttctttcttttactgttatatattatatatgttaaatttaatatatatatatatattatacgtacgaagttgataagtttcagtttatattatataataactagaaagctaagccgcgcaaagcgcggttgttaaatatatatataaaaaattatagggagatttttcggtaaggatattatttttacttttattaaaagtgtagttgtgagaattaagtggtatataatatttgaaaaatacttaagtatatcacttttgtttttattgtaaggatgttttttatatttaaaattatatttcaattttatgtataacaatgtacattataattatataattaggtatattttatatttttaggaaattctaaaataattcaccgtactaaaaattaatcaatgtataattctatatatttgtgtgcgtagctcgctattttaaattttatttttcaaaattgtaaattattcaaaaaaaaatattaatgtttgttataactacatt

SEQ ID NO: 146733 - DNA, 734 bp, Cannabis sativa
ggtaaccaggggtttgttatgccggatcgagactcggtatttgagcgattcatgaagctgcaacctcagacttttcagggaggtattgacatattaaagtctgagccgtggatgaagagaggactgaatgccacaattagtcgggacttgaaggttaccacttcacatgatactttgtacaagaaagtgatagagctagccttgattgctgaggagactgagcaatatgtagtaaaagagcagaccgcaaaggatgccgtcacggaatcaaattcgcctgctagtggtgacgtcagtaacgggaccgacagtggcaaccgtgatcacaaacggaaggttgacgcttccggagtatcaaggggtaatagaaggcttgggggaaattgaggtggccgtcaaggtcacgaatcctctttcaagtcatatcttggatgtccaaaatgcaagaatcaccatcagggtgaatgatgggccaaggctatgtagtatatttgatatagattatatgaatcggacgttccaagattacctgaatagatgtgtgattgtgtttatcgatgacatcttgctgtaatctgaatcagataaagagcatgagttgcatctctaatcggtttcgcaacgattacgggaccataaattgtatgctaaattcaaaagtgtgaattctggttatctcgtgtcttcttcttggggcacatagtggataaagatgggatcatggtggatacggc

SEQ ID NO: 146734 - DNA, 582 bp, Cannabis sativa
  modified_base (404)..(414): a, c, t, g, unknown or other
aaataaaaataaattttacagaacacacttttattttctatttttaaaattaaaaaaacaaaaatagttacagagtacatttttattattcaaaaataaaatttttaaaaacaaaatttacttttattttgtgactaaagaattaaaaaaaaaaacaaaaaatgttatcaaatgatacttttattaaattcaacattacattaaattagggtattagtgatatatccccttctcataaaaaaataccagttttaataatggtgtacaaatcaagccaataatttaagtagtcaatttctactctagaaagtttttgagaaatgctaaagggcaccagtggtgtttagcactttcttatgtgtcaatattgctattggtccaattaagtatcgggtctcatatannnnnnnnnnntaacttttaaaaaatatcgctagcaatcacaacgcaatatatcgagaaagtgttaggcaccaatgctcaaaatttttccaatatggaacttccaataataagagcctggaagtgatcgtcttcgtctcccgagatcccgtggacgacgaaaaaagcgtcaagggctgt

SEQ ID NO: 146735 - DNA, 636 bp, Cannabis sativa
ccagtatgagtaattgtgtcgatcaagtcgaatattcagaggaagaagattattctgaatttgaaattgtggtgcggcgaccaaatgagctatcaaagctactagtggacaatgaggagcattgttgcgaggatcgtcaggatcaaccataataggtatgataccatgtcagagcagataatttagagagaaaagaaaacagaatgaaaatgaaaaagaaagctcaatcaaaatgtgagttgttatgggcttatatggaaattgtaacaaactgaattttacatcagacaataacaataagataacagaaagtgaccgataggaaaataaccaaaataaaaaaatagaatttatagttactttatcttgcattgaaatagactttcttccatttcaaaatagagtatatagttattttaccaaaatagtagaatatttattttattaaaatgtcatttcaatattttaaaatgacgaacctatgaaagtttaggaacaccactttgtacatattaatattagggggtctctgtcaagaaaaataaggttccatctcaaagccaattggtgatgagtaaaagttcttatatatgactcaatacttttacatttaatccatttgggacaatgttcttc

SEQ ID NO: 146736 - DNA, 514 bp, Cannabis sativa
cgattcaatcagaagaatgctcctagggtttttgaagctattcgtacgaagcagtctcttgcacaaggatccaatagcgttacaagttactttactagactcaaatctctttgggatttgattcaagagtatcgaccacaaccgatttgcacctgtggagctatgaaaatgattcaaggttaccaggaagaagatagagtccttgagttcttggttggcttgaatgaatcttacgccagtactcgatctcagatcttgatgcaagatgcattgccaaacatcaaaggcgtatgcctctgttattcaagaagagagccaaaggtgtttgtctattgttccagttgaaaatgataagaacggatctagcaatggatcaggaacaagctccaactcaggtcagtttgctggaagtattgagcctcatcattctaaaatggtctgtactcattgtggcatcacaggccatactatggctaagtgttttcggattcacggatatcctcctggacataag

SEQ ID NO: 146737 - DNA, 641 bp, Cannabis sativa
  modified_base (396)..(400): a, c, t, g, unknown or other
tcaaaattttgtaggatatcttacatagctataacctacataaatatgaaaaaaaaaatatactaaatttttttttttctgaatgtcgaaacaagtagagctagggtgccactacaaaaaactgctacttttaatgacaactttttagtcacaacataatttttttgtgattaaatgtgaaatttagtcacaacaaaatgctacttgtgactaaaacatattatttagttacaagttgtcactaatttagttttagtcaaaataggtattgtgactaaaaatacatttagtaacaacaaattgtaatttttgtgactaatatctttagccacggactttttagtcacaacatatgaataataatttataactagtcacaatttttttttacttttnnnnncaagttttgttgtgactaaaaatataattttttgtcatcagtacatcccttttaaggtgttgcattgtagaatcacccaattatattatgatatgtgaataatatttttaaatcaatcacatttatttaaaggggaactattccatatactgtttttttaacttttttttttaaatttaaagtttgagtttctaaagtggttgcagcactagttgcaataggggtttttatacaatttttt

SEQ ID NO: 146738 - DNA, 566 bp, Cannabis sativa
  modified_base (160)..(166): a, c, t, g, unknown or other
  modified_base (474)..(492): a, c, t, g, unknown or other
taaataaaatctatcatggtgtaatattttatttagcaacctagttcatcttaattaatataattaaatgaacaacctatatgcatctaaacataaagtaaacatataggctcacatagccacacagatttggatggatcttatcatgttactaggtcannnnnnnatgaaagaagaatgtaaaatttacgtgttacaaattatttacttgacatattgataattaaaccatgggttaaaatcagatcattggatctgtcaacaagataactatggcaatttagatcatgcaataataggttttatacaacttacatacaagctaaaacacatactcctggaacaagatgaatttggatagttggatgtaggatttatttaattttaattaattaatttataaaaaaaattcgaaaataataaataataatataaaatattttcagtttctaaataaatttaaataaaaaaaannnnnnnnnnnnnnnnnnntttgaaaaattaggtttcaactaatctaaatatcatttcaaaaaaaaaaatgttaactatcttttaaatttcat

SEQ ID NO: 146739 - DNA, 724 bp, Cannabis sativa
caagttctaggcgaataccaggcgaagggtttaaaaatggcaagatatttggagaaggttcagaagaacttggagatgtttgattgctattaaatttaacaaattccaagagaacataactcaaatgctgatgccttggcaaaactggcctcgtaatatgaacttgaaaaactaaattaggtaccagtcgatgttctaaatgaacctagtatatgtgaaaaggaagaagttgaaatgatagatgccttgcccacatggatgacacccatagttaactatctactcaacggacaacttccagcatacaatacctcgctacacgatagtagaacgaaaattatatagaatgggttattcaatgcctctcttacggtgtgtgctccccatagaagcgagcgagataattaaagaaatccacaaaggcttttgtggagaccatgcaggttggcagagcttgtcaaagaagataatctaacaaggatactattggctaacaataaataaagacacacatgaatttgttaagaggtacgacaagtgtcaaagattttcacatatacctcgcgtaccaccaacataattaataatgatgatctcgccataccaatttgcaatatggggaatcaacttaattggagcatttcccacaaggcgaggaggagcaaagtacgcggtagtggcagtcgacttcttcacaaagtggacagaggctaaacctctagtt

SEQ ID NO: 146740 - DNA, 705 bp, Cannabis sativa
tgaagcatactttgaagaagttcaatagggctgaggcaggagatattgagcagcgatttaatcaatgcaaagctaagtttatcttagctcgggacaatctagccagagacccgagcaacaacaacctgcttcaggaagagaaagtgaaaagtcttgagtatgttgcagccttgaaacaatactctgtttttcttcggcaatagagtaaagtttcttggttgcagaatggtgatgataataccaggtattttcactcctttttgaagaaaagaaaattagagaatagaatcactacctttgagaagaatgggatgattgttgatgattataaccaaagtagtagagcattttcttaaccatttcagaaattttatgggaaataaaagttctgctactaaaaggctggataaacattgcattgatcaggggccggtcctttccatggagcaacagattagattgataagacctttcaaagagaaagatgtgaagaaggcaatgtttggaattcactcaacgaagagccctggcctagacggattcggttctggattttttaaaagtctttggaaaaatattggacatgatgtgtctacggctattctcaaattctttgaggagggtattatgccaacctcattgaaggatgcagtcattacccttatcccgaagacccaagagccaaaggatgctagtgactatagg

SEQ ID NO: 146741 - DNA, 871 bp, Cannabis sativa
aacgtgtacctagccattttggggtggaacatcattggtgtaccaagtattctgagttctacggttagtgtgctcaccacttgggtgactagtggcactatcatcataggattgggttaagactccccaatatgagaccttctttgcccttacattggtgggatgtcttccctcccctcttcatctctgggtaggccttgaaatcggtcaatcctgccatatgatctttcaagcaagatcttcgcatcattaggctgataagacgacctttttaggatgcaattggctctcctggccttgaggtttgcccataatgcctggggtgctgagttccctctgggacacaatgaccttttccctgataaggatccctgatgagggatggctcttcgatctaagatccaaccttctcattgaacgatttggccaggtcattagcctccctattttggtggttcaactctactattgggcttggaggattgcggcttattaatccatccattcttggaattcacatctctgttaggcaaaagcatcgcccatagcagcgcgtgtttcttgttggtcatggtgaatgagattcgtatgaccctgaacttgtcctacaacctctttcagcctagcaagttcagtatcatcccctaggtccacgtggggttcattaataatagggttaccaaccctaagcccagtctcaccagcataaacacgaggtctaacccccgtgctaggaattttagttattggctggacaatgggtccaatcagtggcggacctagaatttaaagtgacgggggccgttttttttttttttttaaaaggagggagggcataaataaatttaaaaagaaaaatataaagtgtagt

SEQ ID NO: 146742 - DNA, 555 bp, Cannabis sativa
  modified_base (45)..(52): a, c, t, g, unknown or other
  modified_base (507)..(517): a, c, t, g, unknown or other
ttttaaatttaaacctcgaaatataaaattaataataatctattnnnnnnnnaatattattaatttaaaaaaatgacatttaagttcaaatatattaaaaataatattttattttaattttgggtttagaaaatcggaaaaatttgaaattgggaaaaaatcccacaaaatttggaaattgggtgcggctggcagctaggatgcaagtgcagccttgagaggctgcaaattgggccttacgcgcacagaagtgagggtgacgccgagatttctcggcaattgcagggtctgggcacggcatttccagcctcctgatgcacgtgtcccctgtctgaagggagcgtgcatcccgtgtcttcagacaagatgcgcccgcgtgtatagtcttcttgtctgaaacctggtgcgtgcgatgagcaccatgggcacccgattttcaaacaggcataactttttcaacttttatcgaaatcgagttccgtaaaaaaccaaaattgcttaattttnnnnnnnnnnnccaaataaaatattttcagaaagaaaaaaaaatatttt

SEQ ID NO: 146743 - DNA, 1033 bp, Cannabis sativa
  modified_base (558)..(569): a, c, t, g, unknown or other
attttgattaaaaaaataaaaattcacttttaaaattgttaccgaacagagcctaagtgttaaaaaattatctttgttcttcttacttctctctcttctttttctcagtttttaaaagtttctcatgaaataactatctctattctttgcctttaatttttatatgcatgaataaaaaggaaattatatttattatgggattttaaaagttcttaggttaaatatggcacttttaaatttcaccaatttatataatatttttttaggtctttttatagtatttgatatgccatatatatgtaaattaggttttctgtgacagttagtagtcccgtgatccgtaaggggaaataccgagtaagctgtggaatcccacatcgcctagggaaggtcaagtgtgatgattttgagactatacaagtatgggactgcatagttgaagagggcttaaatggattgaatggtactacctatatcaacaaggtgcatcttgtttttcggtaagaactccacagttaagtgtgcttgacttggggtgatttcaggatgggtgacctnnnnnnnnnnnntcccaagaagtgtgcgagtgaggacaaagcacgctggaaacactcgcgttggcctgtagggttagtcatcaatccaagaagcagcacgagtataagagccatttattccgtgggtgtaagggcctaatggaggcttgaagcggagacgttacaaatggtatcaaatccttgacccagccgaaagtgtggtcgacaaggacgtcggacccggaccccgtaaaggggtgattgtgatagtcagtagttcagtagtcccgtaatctgtaagggatctgtaaggggaaataccgggtaagctgtgcaatcctacatcgcctggggaaggtcaagtgtgatgattttgagattgtgcaggtatgggattgcacagttgaagagggcttaaatggattgaatggtactacctatattaacaaggtgcatcttttttttcggtagcttatcacaaaagaactccacagtta

SEQ ID NO: 146744 - DNA, 1180 bp, Cannabis sativa
  modified_base (208)..(208): a, c, t, g, unknown or other
ctaactaataaataagttaaatgataattttatttgataattaattattattattaaataaatagatttgacatttataggatgaaataaaaatatgtcatttgtgaaagaaaagataagttgttaaataaaatgacaaaattgaaactagtggggtccacatataaggccgactacttaagggtattttaagctattattttatctnttttaattccatataatttaaatcgtgaccctagatgaaatcctatataaagaataagatggctctcataacctaataacctagttttctactttgtgagacgattgaatattgagagcctctctatatagaattcgaaattgctctctccttctcttcatagtttcgaacccatagtgaagagtaccttgcccacttaattcaagttagtactcaatcatagtgtagaagattgtaaagaattccatcactaaaggagatctaggttcagatcttggcaataccctgcaacagaaaggaacaagggttagagatctgaacagaaagagccataacattccactgccaccaataagattttttaaaactttatatgtgtttatttcattattttaggaagttcatgtttatgatgttagattagagaatataatcaaacatacatgttagtaaatctagactcttgcaaaataacatccaacaatatatacaacaaaaatattgtctgaaataaactgaaaatatacacgataaaaaatacacataaactaaacaataattgtacaaaaaaaacacataaaaataatagaaaataactataaaacacctaaacaacaacataaagataattataaaataacaaaaagactataaatcaattgaaaaataacaagacatcaatcttgttaaaatatgcaaatcattcataaattaactctgaataaactacaaaatatccaaaaaatatactacatttattaatcatgtaaaagatagaaaaatataagaggagtgctcttaatttttttgtaagagagataaagtgtattaaaaaaagatttttttaataatatacttaaaatacaaactaattacaaaaataccttaactaatctcatcaattacaatattactttgccatatcatcaaaaaatatcttaattctaaaccaataagcctgaaataaaatta

SEQ ID NO: 146745 - DNA, 557 bp, Cannabis sativa
tttcacaatatgcataatataaatcagatttaaatcttataattaaattctaattatttaataatccatactgtgaatcttaggcggtctttacaaatgcgatttttatttagaatccacacagttgtgagtatcccacttttattgggccgagatgaacgcataatataaggatctatggtaagccttatctcatggggatgcctcactaggaatggagtccagttaacttgaatggcgagcagttgctcgtcatctgacttcccgagattaatattgttttaattctgataactatattttctagtgtccagatagagcctcactgtctgttatcttgattcaccaaactgtttacacttagtttgtatagtatgcaatacacgctaattgtttttatcgttattgtttctctttcacgtagcgaggttacagcctcgtcatgcacgcttgcgcactcacattgtttctcgtcgatacatgagttagcagctcatacgtttctctcgcgaaagactgttcagccagccgagttataaacatactctgcaaattgt

SEQ ID NO: 146746 - DNA, 691 bp, Cannabis sativa
  modified_base (452)..(453): a, c, t, g, unknown or other
caaaatccataacacaggctcgtaacatatcttccaatatctgaatcgtcctttcggactgtctgtctgaggatcgaaggctgtactaaatttcagtttcgtccccatggcccgctgcaaactttgccaaaacttggaggtaaacttcggatccctatccgaaactatggactttggcacaccatgaagccttactatttctatgacatacaaatctgctaactgatccactgaataggttattctaactggtagaaaatgagcagactttgtgaatcgatctaccacaacccaaatagaatcaaataaacccgtgttctaggtaacccaaccacaaagtccattgcgatgtcctcccacttctactcaggtaaggttaaaggttgtaacaaccctgcctatctctgatgttcgacctttattagctgacaggttaagcatctcgatacganntctaccacattcttcttcatttcgctccaccagtagtaaggtttaagatcctgatgcattttggtggtgccgggatgtagggaataaggagtggtatgagcctccttgagtatttcgtttctaagttccacaatatatggaacgcaaaccctggctttaaacaataacatcccattgtctgatactgtaaaatctctgacttgaccagcagaaacctcttctctaatttttactaact

SEQ ID NO: 146747 - DNA, 1135 bp, Cannabis sativa
gtgttgcgctcacacgtctaaatataataacgccttagtatagttcatctcagttctggttaccgagtccaacatgttatgccttgaacgcataacccttaatctcaatatatatcacataactaatggtgccactgcactatttgtccattttctatagacttgcgtgttacgctcacacgcctatatatgtctatgtggcgtagacctacgtgttgctctcacatgtctatatatgtctatatggcatagacctacgtattacgctcacacgtctatttacaataaggccttagtagggtttatctcggttataattaccgagtctaacctggttatgccttgttcgcataaccctattcatatatacttacgtaatccatacattacattcttttagtggtttatcctagtgatatactaggtctaaccaagttatgtcttatgcacataattcttgacatatatgcatgcattcattagataccaaagcatatagaatcttagggtaataaccctaacttgcatattaaataatcattcctacaacatattacggcatgctcgaaataacatttatttagggtaataacactagcttatgccttcacttaattaacaagataaccatacattattgctttcttacctttataatattctagggtgataaccctagaccacattaaaattaactcagggtactagtttagtgagtctagcttaatcatgccttagacgcataattctttattccaacatatttatcatggcataacatccaacaccacatatatcattagggtaataaccctaggctattaaaccgctcatgttagggtaataactctaatcccgatcactatttactcacaaatatcatttgcaatataagcgccaccgcacataactctacgtgcaaactactgtcttacctgatgtcccgcaaatatggagattccaaatcttcaggtgctcctgaccaagtgccggtaatcctagtcacaaattctaggattcacacatatagagttaatccctaattctacatttacaaaatatatacttggcattcaaaatataaatattcacatagagctcgaaacgagctttccaactgttggaattattttac

SEQ ID NO: 146748 - DNA, 571 bp, Cannabis sativa
taggttcgagggatttgcgtttgcagcaatgcaggtattgccacttcgtctcgggatcgaactgtgaggttctggtctttggacccctccgacgagagacgattcccgacatctaaaattcttctcgggcatacgagctttgtgggtctattggcatggattttgcctgatgctgaagaatttctgaatggtgcaattgtgtctggaggcctggacacgctggtccaagtttgggacttgagaactggggagaaggtccacactctaaagagccatcagttgcaggtcacgggtcttgcgttggataacgacgacattgtatcatcctcagtcaattggtaactgctttatgttttttagtttacattagttggtgttgtgcacctttgatagtgaatttcattgtggttgatgatactttgaaaaaacatgtttttgcgcccactgtttgaattagaattttttttaagttaagcaggtatttgatgagtctatctttgtcccaattttaaaatggtagaagaagaagaagaagaatggcagaaaggttagggggttctgtcgagaagaa

SEQ ID NO: 146749 - DNA, 533 bp, Cannabis sativa
gtctgaatatcatttaataaaacacatagtttaattagtaactcttgtaaaacacaaggttcagaatgatagttacccttaattaaaagtgaatccatattttctcaacaaaaaaaaaatcacgccaaatgtaatgttggtaaagactaattaggatttttaccctcaaatttttaagatcgttaaaaatttctctcaaactatgtagattgttgaattcaagaactttcgtctaattttattaatacatgtttaacgtggataaaagttcaaggagtatgattcggtacatgtcaaagtttacggaacacaatttggtacatggactactatcacctaagtaaaatttaatggaattggacaaaaatctttgaatctaacaatcgcaatagttcaaaaaaaatttaacggtatgaaaagtttgtgaagatatttagtatatattaaaatttggaggacaaaaatcataattagtacttttaaaacaatttgaaataaaaaaaaaaatcattcagaaaattaaaaaaaaaaaa

SEQ ID NO: 146750 - DNA, 623 bp, Cannabis sativa
tatttcatcaagattacaagaaatctagagaagaagaagaataataacacacaaaaagcttgaccaaggctcaacaacttttgtcctaaaagtcatttcctccctcatatggacacttagggaaactttagaaatgctcttataaggatttatcaagtctcatatgctcagcctagtgtataaagatgagcatatcctcacaaggttctaaccacaacaaatgattccaactacttctttttcaagtgaacaatatcacctctatttatagagtttttactcacatatgaacatgaatgaccaccataaagcccttggatgttaccaatcataaattgggcatttatggtattaattgggtgattttgaggagttttgggctgttagaaagactcacaaactttcaaaacgcatgcacttgtatgctgaaaaaatagtaactaattactagttaccatttttttcagctttggtcaattcttctccaaagtattccaaatcacttccacttgattttgaaccatttataaaccttataaatgaacaaatcaagtctccaatagctatattttcaatagctttcattcattcacattcataaacaattagtaacatcttttact

SEQ ID NO: 146751 - DNA, 577 bp, Cannabis sativa
ttttgtgtgactaaaaggttatcactaaaagtgactttttttgtagtgtcatatactgaccacgatatctcacttgggttttattgtacatataaaatacttatatataatcacatccaaagggcacaccaatatagctgcaatagctaaaaaaaagattccaagatcaaaatctcaaaccctatttcaaaaattttaaaaaaaatacattacctaattaaaaagaaaataaacatacatatattgcacttaaaatctcctaattaaataaaaaataatttatacgattgcacgtgaaaaaccgagtttttgcaaataaataatatatacgaaaatataaaactgtatacgtctgtaaaagcataatgtaattctgttactgcagaaaccagttttgcaatgacaaaacagaacaggcagatataaaaatatttgcaaaaaaataaaataacttgacacaagagatttgtacttggtatcagtgttctcccgaacacttttagtccaccgggccatgcccagagaatgaaaacaattaataaagtatcaacaattacaaagacaattgacttaaaca

SEQ ID NO: 146752 - DNA, 622 bp, Cannabis sativa
atatatatatattaatattatttaattttcataattattatttactgaaaaataatgtattttttcgttaaaaatcttatatctaaaattatttaacattacttttattaaaaggataattatagaattatatttttaatagaaaaaatatttatactttatttagtgtgtactaccccaaacatggaacatgactaacataatcttaatcaaatctaatcaaatactaaaaggaaaatttacatagtatattaacttttataaaaaatataatcaggcggtattttttactttttattgcgcttttttataagtttcatacttaaatttttattggtgttttttagttgttctactggtattttgagttgttctgttttatgttctactagtgttttataaaaacacagtgttttccttgtgacagtatttttgtaaaaggtaccccaaattccagtatttttataaacttccctactaaaaaaatggtttaatccaaatttggtgtgtgaaaacagggccatatataagttgaaaaatgcttcttttattaattaattaatcaaatttacctctaattttatatttatttgaaacatacttctttttatatgtattgtac

SEQ ID NO: 146753 - DNA, 669 bp, Cannabis sativa
gggtgcggttaaattccttcaggagccccgagtgactccgaatgttggtggaccccccacttttcctactcctgtttatggtagggatggtggtgattccaccacagagcagaagaggaaagtttcgcaggcatctggtggctcagggcaaagcaagcagtttcgtgggaaccaaggcagaggtggacgccatggttactcttaccctgagtgcccacgttgcaagaaacatcatccaggagaatgtaactagaagacatgctttttgtgtggcatggtggggcatttcaagaaagattgccctcacgcaaagaaggaagaatcgaaagcagaggcaaagcctatacctgctcgggtgtttgctatcacccaagctgatgctgcagctagtccttctgtggtgataggtcagcttcctgtcaacaactccttgtatactgtattatttgatttgggagctacacgtccatatgtggctacgagagtaattgatcttttgggtacgccttgtgatattcttgaaagagggtttgggaccttaatgcctagcggggagtcggttatttccaataggcgcattaggtctatgccagttaggattgaggatagggagttgagtgctgaccttatagaactggaattaaagaagtttgacatcatacttgggat

SEQ ID NO: 146754 - DNA, 598 bp, Cannabis sativa
ttgattgatgtgagtcttcataatggagtcgtcactagactcgttgattatcgtgtaattgccgtaaaagaggcttatgccatctgttaagtcctcttgtggaggttctgatacgtttcccccataacgcattaaatgcaaaatgactgctcgaacgggctcttctcctcccagtgatgcattgttacatttctacctccctgagagtggaggtgtaccttatgctcctcttcgggaggctcactcagcgaggtgtacttctctgtccattcatgacttagccaatttttgtgagtgaggtgctcttaaaatctacgtgtcacacgtaaccgcaaccacgtattttgggaaaaatctgagccaacatttaccccccaagtctcatttataaagggtaaatgaggcttgtacgtagcctccgattaccttataaacatagtggcacatgccctaggtgcgtggggttgcatttatgaccgtcatcattgatatttatttcttttcacaggcaacgatttgcttctcgtctattaatagacctgcgcatttaatcctggtgtcagagaggcgctcaaacgttttaaccgccctttctcct

SEQ ID NO: 146755 - DNA, 858 bp, Cannabis sativa
  modified_base (692)..(694): a, c, t, g, unknown or other
gttagttgcaataaactaggcacttataaagattgtgccacaaattactctaaaattaattatatcttttcatttttataactcttgcatatataatactaattcgggataacttttaaaaaacataaaacaacaaagaaaaaaattcaaaagtacggtttgtacagaatttttaatacttttacagttttttagattttatttacataaaatacagtcttttgtctatttttatattgtactcttgttattttgtagttaatttttttgttatttgtatattatttttctatggagttttgatgttattttcttgctgttttcttgttacttttatattgttttttttttgtgtgtgtgtttttatataataccgtaaaaatgtaaaaaaaacaaaaaactttgaacaagtaaaatgcaacaattttataaaaattgatatttatgtaattattccaatatttttatctttttaggctataacaaaaggaaaacccttcttgtttttgttttattttcatatttttgattcaaaaaataaaaattcaaaatattttttttgactaattaggatttttactctcctaattttaaaatgtacaaaatcatgctcgtgaacttttaagttaaaaaataccattttttgtatccattaatcaaaaataccctcatattatatatatatatatatnnntatattttttttttaaaatatacccattttttgagtggattgcctaatatgcccctactctctacttaagtctagcatataatttatattaatctaagagctcgtttgaaacgctgtattatgccgtattgtattgtattatattgaattgtattttatgcaat

SEQ ID NO: 146756 - DNA, 776 bp, Cannabis sativa
cggtttacactagttcacccaaaatccccatttcttgctcaaaactcctccaaatgccaccaaactttccagaatacctaatttagggtatacacaatattttctaaccagtaatttaaagaaaaactcattgtatcacagcatgccattaaagatcaaagctttgagttcaaagctcaaacttgcataaattgctcataacacaaccaaaccagctactagaggctaaaattaactcaaatcaaacttagaattcgaaccctaggcatccctaaccctaacagccactaaaaccctaaatcacatacttaaactaacccaaaggttcaaaaacacataaataaaggttctagggttttacctttgcttcaagaacccttgaatcttggctgaattccaaaaaaatgaggaagaaaagctaattcctccttggtttattcactactacaatttatacatttagtgacactctttagtgacatgtataaaaagtgcatgtcactaaatgttttaagcaatttttagtgacatacattcttagtcagtaaaaattttacatttgtgtttcataatatgtgtcactaaaaatttatttatttatttatatttaaaaaaaaaattatgtgtatatagtgacgcacagtgcgtaactctaaaagtgttcagagtcacataaaggatgtcactaaaggttcaataaaaataataaaaatgaaaaaaaaaagaaagaaaacacagcattaaattctccattcacgcgcatgtagtatagctga

SEQ ID NO: 146757 - DNA, 688 bp, Cannabis sativa
  modified_base (394)..(394): a, c, t, g, unknown or other
ccaagtcgactgctatgactcaggactactcaactccgagatgttatctttcttgccatgtgtcaaactttgatgtccacatcaccagggaaagtttttcggttaacagttatctaagggaaattgttggtttaacaattctttttatttttcgttaaagttaacggttaaaattaacactgttaaattaatcaattaaaaaaataattttaaataattatatttaatttatttattaaaatatgacttagatcattatttaaaagtatcagcaaaattagataattagtttttatagcaaagtattttaatataaatttgaattagacgttaattcagttaattaatcatactttataatcaatttattagttatattgtttaaaatatctanacttatttacttattttattgtttgataaaattagttagatatattttcttataaataatttcaaaactagattaaattttatatatttaaaaaatataattaaattgtattaggtttaattattataataattaggtaatagcaactctaatacagctctaagtaaacatgcattaaatgttactaatacctaatatgtatatatatttttatatatgggtgactattcaatggttacatttttttttacctgtaatagcaggttacgaataggtaaaaattctatttttaga

SEQ ID NO: 146758 - DNA, 567 bp, Cannabis sativa
cactaatgccatcactagaggagggataataggaggcaaaaatgcactcaactatcaagtatgtaagaggcacaaaatgcactcaactactaaagaaaaatagaaaaaaagggttaggaggcaaaaaatgcactcaactatcaagtatgtaggaggcacaaaatgtcatcaactactaataaatatgtatatatagtatataatatataatatataacaatatatatgtataaatatgtataactttctctttttttcgaacctttcttttcgattttttttttacttttttttagatgaaagtgagaataataaaaaaaaataactagtagaagaatattacttaccttgtagaaagatcgtttctttcttgcaactcccgagcaacgacgccaaaaacttgttgtcctcaaaagtgagtgttttaacatttatactcgcaaatgcacgaatcgtttcgaaatatagtgttcatgtaagtgcaaggtcgaacccatgggagttgactaacatcaaaagaaactatttcaaacaaaacaagaatattctaacctagctccaaatatt

SEQ ID NO: 146759 - DNA, 1823 bp, Cannabis sativa
  modified_base (397)..(397): a, c, t, g, unknown or other
gggtactcctatttctctcaaccacgcttcaagtggttgacgagcacggacgattcggccatcagcaagattgggcattttactgatgagtacttcatggtggatggtaggggcatcactcgcactcgcttccagcacattccgacatatcaccgccctcccctcactcttgctctcacgtattgcactcaaaagcttgctcgactaccgggggaagaccgaaatattatccagttgacctctgaggataattttgtgaagtacgggctctatccccaggactttattcctaagtccgtgacggggaagaagaggaatatggtgctggacaggccgaacgagctcatcaggagaatgaactcattcaacttaagcgcgaagctaagttgaagggagntgcaagggccaagcagtatgcttaggagcccttgaatcttgaagatgaagttgaggaagagcaagtgaatccactaaagaggaagaagaaatttctggccccgcccaggcctgttgaacatgccattcgcataagggagcccatttcacctgctcggccgtcccctcccgtgtttggtaaagggaaagctgttatgtctgaaataagatcgacgtcaggtgattatggactttcgagtcttgtttgggcagtcaccttgcatactactttgtcttgtttttgtgcttcttgacttttatgccttatgtttctgatgtctttttttttttaaccatgttgtttttcgttctgtacagacatgtctcggcagatgcttgacgctctgaagaagaaaatgggcggaagctctagcgcctctcctccagccaagaagtctaaaggcggtgaggggtcctcttctaaggaaaggaggcctgccagggaggtcattgatcttttcgaggagctaactgctgcaaacccctctaccccaaaagttgctatgtccaaggtgtctcgaggaggaagcttggacaggtctggaccactgaaggttgggtctgagctggtcaggagtgaacatgaacgggtgcgggcacctactccacctttgtcggtgcttccagaggccaagaagggcaaggagatactggcccattacatgaactggttggttcctgaggtcagtgagcaactggctggtgctgacaatgactcttctttggaattgctggtgggcggagtcttgaaggagttcaccagggtaagtctttcttgatacttccctttaatcttatgtacttagctcaaatgctaaagttttttctttgtgcaggtcgctctgaagttggcctacacttactcccgggctaagtctgccgcttccaagaacacagatctgtctgacaccatgagggcggaggcagacttggccaggaaggatgctgaagatgccagggcaaaactcagagctgttcggttggagttgggtgaagccaacaagaagatgtttgccgcccagaagaagataactgagctgactaaggatctcaatgtttctgaccgtctttaggagaccatcgataccttatctactgaagtgaacagtcttcaggatgagaggacttctcttcgagcagttcttcatcgggtgaaggaggaggagctttcgaccgaggttgtgaggttgaaagagaaggttaatgctctagagacagccggtcttgagcttttctttgatatttggaaggctaatgctcaggccagctttgactacttgggtgctgctaaggacatgtaccttgagttctgcgcgtcccaagtggcctatggcaaaactgaggcggctgcttcaaccttcggtcagactgctgatgtacctcctgtt

SEQ ID NO: 146760 - DNA, 968 bp, Cannabis sativa
  modified_base (48)..(67): a, c, t, g, unknown or other
accatgcaacatagaatgcgatttttgatctttattaactagtaaatnnnnnnnnnnnnnnnnnnnntttatttatggcacaaaacccaacaattgttatattatttaatttaataatatgtagagtaaaatgtggttgctgcctcggatttttcccaaaatacgtggcagcggctgcgtgtgcaacgtggatttcaagaacacctcaccgacaaaaattggttgagtcatgaatggataggaaagtacatctcaaagagtgagcccttggagaggagcataaagcatgcctttactcttcgggagctagaaatataacaacacatctccgggagaagaagagctcgttcgaacagtcatttcacatttaatgcggcatgggggaaacgtatcagaatccccatagaaggatttgacagatggcgtaatcctcttttacgacgattacatgataatcaacgagtctagtgacgactccattatgaagaatcacatcaatcaaggaaggataaagattactctcactctcacctaatccttacgattacgataccgatacctacgacataggtcatgtatgtcctattttatataaactaggaattggtgcccctaagaggctgacacttaaaagacaagtgatccctttctagtgatccttacaaaactctataaatacccctgaacaaaaggaaaaaggggtcgatcgatccattacggaatcaaagggagtaaagaagagagagagagattcaccaagaacagtctctgcataagaactctcataaataaaaaaagactcgtggactacggctcattaatgcccgaaccatgtaaaaataacctgtgttaattattccataactctcctcattatatcatttaattggttaccgaaaacctcggtcaacagttgtaatatatgttattatgtgaataatatatattaagtgtttgataaataaatt

SEQ ID NO: 146761 - DNA, 654 bp, Cannabis sativa
cataaatcaatgatgaggatgatgagattaatccaaattgtattccaaatcaatttaccacacgcgaggaatataatgagctattaggataaagtatataatgagctattaggataaagtgtataatatgttcttgtaattctcatgagcacgaataatttgagagagaaaactgtttttcttttctcctttgtatttcaaaaatagcagtgtaaaagtgagcgtctaattttttaaaccaacttttatttatagtagttaaatcccattcattaaatcatatttaattatttgagtttataaatatctataatcgaattcagttactgatatttatgagagaatctctcaactacgtgatagaatatctcgaccactttaacctatcctttaattactttttaaattcaaatatttattgagttgaattaattaacaaaaaaaaaaaaaactaacaagtaaagacgcctactatgccttctttaggataaagatggtgtcttttatttgagaacttttgtcttaacaaatattgttttgacaaaatttatcttaataattttttgtctttttttttctatttaattaatttaaaaattatttattcattacaaaaataaataattactattttttcaatttaaaatagatttt

SEQ ID NO: 146762 - DNA, 545 bp, Cannabis sativa
gcatccctttgcggggtgggcggtgtgaggattggtggtgttggcactatactccgaatggttattatactgtgaagagtggttatgctcttgctcttgatttggtaagggataggactgatggctcttcggtcgatcaagctcattggtggaatggtatgtggaatttaagggtccctcaaaaggtcaaaattttttttatggagaatgtatcaccgggctctcccgaccaattcccagcttatcaagaggaagatcccgattcagccgctatgtcaaagatgtggtgaggatacggagactccagagcatgcgttggtgttttgttcttcattgcgtcctttatggactaagcttaggatctggcatgtgctacatcgtgggcggtctgggtcgttagcggaattgcttgtttatctctttgatgtgattgatcaccagaattttgctttgttggctatgatttggtcgtggctgtggtttgataggaattctgttttgtttggaaagaaacaatctcgcttagaggtgattgatgttttagc

SEQ ID NO: 146763 - DNA, 1185 bp, Cannabis sativa
  modified_base (733)..(741): a, c, t, g, unknown or other
  modified_base (924)..(929): a, c, t, g, unknown or other
attaatctatttaagtcctctttaattgtgtagtctcatacttacacagtcttacaattatcccacttgacctttctcaggcggtgtgagattgcacaacttactagtatttcttccttcctacggatcacgagactattaactgtcacatatatccatcaatgatcatactacttaaaataatggtaaataacaatattataaatttagactcctaccgatcgcgacttaattaataataatattgctcattaacaattaactaattaattaaaggttgtataatatctatatttatacagagttctattaaatttttatgcatttatacgcatatacaaatcaaaattatatataatatattgtataaaaatatgatatgatatataatataatacattaatatatgaaattacaaaaaaacaaaccctaatatgtgagttatctagattgactctctcgtgccaaaagtaaattatatatatagagcaagattatggtaagatctagcaaaagttccttaccgctagggaactttttttgacttgattttagatcatgtggttattatgatgtaaggtatatactcttacaataagactggttgtatacgattaaactttatacatattataataatatttaatgatatttatttttttaaaaataatattaataattgaaaaaatttattaatttttattttgaattattattttttttaaagttactnnnnnnnnnttttatattggtatttattttcaaaaaagaattattttttaaaactcatttttttttgcttttcataatttactactggtttttttatatgtttacacctagtcttttctttgtttttcttttaggctgtgcgtagttctggtgttattgattgttttttcagtggtttttatcttgttgttnnnnnnctcttttgagacgccacttataaaaaaaaaaaaattaattcggttagatattattttttctaccaaaaaaattgagcttaagagaagcaagttggtacggttccaattgaagagcatctaaaatcattcaaacgatcttacattagaaatttttttgaaaataaatatctatataaaaataatttaaattaattttaaaataaaaaataataataattaaaaataaaaattaattaattaattaattttttaatta

SEQ ID NO: 146764 - DNA, 1242 bp, Cannabis sativa
  modified_base (497)..(497): a, c, t, g, unknown or other
ccctggttgtttgggttattaggctgacggggctggttgtatccatggccctgtcttttcacatactgttgaaatggcctcaagcgattagaatctctatctcatctttcaattggcgacatttgtcggtcgtatgcccaatatctttatgaaatttacaatatttgttaggatctcttttgctccttgaattcctcataggctcgggtttgccgaatgctaccttctgctcatgtgcgaggtaaatattttcccgagtttcgttaagctcggtataaatagtatacacttgcacgtatttgttttgcttcttttgtttctttctatccttcaacagttctttaatttcgtcctttctttttggaccagaagcccccgagttatcaattctcgtggaagcagtccctgttcaaacattgttaggtttacctcccaagcttgttttcaacaagttcatttccttttggtcttcttcctttcgaacaaacacctgagcnctttcgttgaactcagtgatgtttcttaccggacgtccttgtaaaccatcccacaacttgcccctggcggttaatggattagtggagattcctgcctgaagggctgtaagttgcgtgctgtcatccaagtttctaatcctagcagtaaccgtgctaaaatgacttaagtacgccttaagtgtttcgtcaggctgctgctttatattggttagcaaggccgcttcaggtcatctatccctagtgacttgaaattgcttcttgaaatccctggacaactgctcccaggaaattattgaatgacgagtaaacttgttaaactagctactcgctgctccaacaagcgaggtggggaacaaaatacatcgtaaattgttcatcacgttactcactcgcattatcgtgttaaagttattcaaatgcgagaccggatctgtggttccgtcataggacgagacatgcaggtttttgaatcctgaaggaaaagggatattcataatatctgggtgatacggctcaagctcctcgtcagagttgtatccagatgatttccctaattcccccacttgatatctcctgcacttgtcctccagcttctgttggggaaggtcaagtttcttccaattcgagtgctctcgcagatctggttgggagtaattgctggcagatctcgtcttactcatagactgcgtcctactcatagactttgtctttaagtggctcccagatttacttgttcccatacttt

SEQ ID NO: 146765 - DNA, 700 bp, Cannabis sativa
aggcaatgcaatacaggattttcatactaaagcattgacttgcctgattaggcaatgtgatgtaatgaagatggttactttatgaggtaacatatatgtataattatattttcaaataaatatgattcctattattggtataatagttttgtattactaaatatttgtatactgatgcttatttatggcagatgtcagtagtgatttagatttcatcttatgaacactgcgtaatggtttgattctgattgtgtataaatgataatatttgaataataaactatataatcattattattgtttttctttatgagtccttgtgactcatgggtgctatgtggtgcaggtaagagcaaggaaaagttagagctgccatgaggtgactgccttctccagcaatgtacatattgactccaccggcctgcgtgccgagttgtcaggagttgtcttgggctgtatctattgtgtatttttgtttatatgtttttgaggcgtcgtcgtatacagtttttttttaaaacgttttataacaaggatccccgaaacacgctttttatgttgttataatgttcgttttcagtcttttattttagtaaggtttttaatattgtcacagtttttaataattaattaatctattattattaaattagtttataaaatcacacacatggcatccctatggaataggacgttacaa

SEQ ID NO: 146766 - DNA, 738 bp, Cannabis sativa
gtggtacccctatgtgaaatgtggtccggacccatctcggaatatttttttgccattactcacaatgaattcgtactactaagacatgaatataaatattggtttctcgttaaaattggttgaaatggccccctaattcaataactgcaaatattcttcttttcagggtaaatttttacaagttttatccttactcttacacttgttagtatccagttaaaatcttaccctttacataaccaaaaatcgtgaaatttcacgggaacgaagccaagaccgttgtgcattacttttctattgcacatgtatagagaaaaagtagttttcatgcactaacaatcattctaatcgaaatagtgaaaatctcacattttttattgtggtacccctttgtgaaatgtggcccggactcatctcggaatattttttgtcactagccacaataaattcgtactactatgacgtgaatatgaagattgattttgcgttaaaactggttaaaatgccccctaattcaaaaattgaaaatattattcctttcagggtaaattttaacaagttttctctttactcttacactcgttagtgtatagttaaaatctcacccaacacatctccaaaaatcgtgaaatttaacggggacaaagccaaaaccattgtgcatcacttttctattggactcgttgagggaaaaagtagttttcatgcactaacaattattttaatcgaaatagtgaa

SEQ ID NO: 146767 - DNA, 633 bp, Cannabis sativa
caagttaaactactagatctagcccttccggtacaagatctagcttagcaaattgttattcatggccaagaaacaacaatcaattaaaatgaaactcacttgaatgaacaaaggcaaatatgctaaagtaagcacccaaccaggggcggagccaggataaaattattgggagggggcaatatcagcaagtgtatatatacaaaaagtataaatttcaattaagaaaaatattacagtgacgcctctgacctaggttctctcgtttcccatggcgaggaagaataaacctggtcgtcggccgggattgaaggtggtgaatgatgcgatttcgctggagcttcgtcgggaacagtagctggttctctcgatagccaggagattcaggggttgcagacagagcagacctcagttcaggaagaagaggaatccctgcaatcagcaaggaaaagctgggctgatgaggttgatcacttccaagcagcttcgcagagccattggcaacaattttcaggaggtaaggtcctaaactctgatgctaagttgtcttttactgagccattgattaatgagggtaggaaaatagctcacatagacttggaagatgtgaaattagaagaggaaagttggaaatca

SEQ ID NO: 146768 - DNA, 571 bp, Cannabis sativa
atttgagaacaccaaactgatcccacaaagagaaatagttctttaccttgtagctaaaaagtcaccatttttcttttacaatcgatattggtagcataattagacaagaaatccatcccgagaatgatatcaaaatctgctatgactagctcaacaaggtcagcactcaactccctatcatccattctgatacctaatccaccttttggaaataattaattcttcgctaggcaataggttttcaaaccttaactcataattgtcacaaggtctacctagtttatcaattattttagtagtaacataagaatgtgtagctccagaatcaaataatacagaataataggagttgttaacaagaaggttacctatcactactgattatgggtgctcataaaatactcaatctaatttaatccacatgatctgatccattccgcaaagtgtggatatcttgtgcggattgtattagattagaaaatctaaaatctgtacttgtgcggattgtatattgattgacatgtaaatataatcgatccaattcaatccacactatttatatatatatttt

SEQ ID NO: 146769 - DNA, 637 bp, Cannabis sativa
gggctttttcccgaaccctagtttttcccgtttttgtgttattcaaggtgttagcatcctatttatcgatagggttattcttagttttgatcttaaataaccgataattgttttagagtgtctctcattaagttttgaacgttatggttcagagccttgtaaagcgtcgagctgcatttccactcaggctgaccggcacacctgaggtcggagcaaggtaagatagcatgaatattacatatatgtgaatgaatgcttgtttggatgtttacaatactaacactattatgtatgtgttttaaagagtgttagtatagtgtaggatatcagtagggttacggtgttaccaacaccagtaccaagggatacgtcgtgcatgtgatacaacacttagtaattcccgggagtacattaatggctctaccaacacgagtatggagttggtactttggtgcatttggtacagaggtcgtacttcccttaagaacgttcttatccatttggtgagcccaattattgagcttagggtggcttaaacaataagctgatatcgcatggtttacttatatgtgtcttgcttatcttactgagtctgttgactcatcagtttgctaccttgtgtaggtaagggaaaagc

SEQ ID NO: 146770 - DNA, 859 bp, Cannabis sativa
ttgatattatatagaaaaaaaaaataaaaaaaattgagtttgactttgatgttttttatataaatatattttaaaaatcgatattttttttaattaagtaactaaattaagcatgaagctcaaatttattttttattatttgctattgaattaaaatattggaacgatctgccataaatattaagtagattgttattattttttatcatcaatattgagtttgttaaactgtttggttaatgtttgtgtgtcttttgtttcgcgatctgctaacagaactgattgtttggctcaggatttttgttatcggtctgatcgcaccttcaatgtcagcaatgttcctaatgttgtacattctgctataatgactgatttgactattataagttaatgaagttcaccttctattcaaaaaaaaatatatatatataataatttaatattttaaaaaaaaattagcaactatatatcaatgggtaataataaaaacgtaatattcactaattatttaggcttaatttttttgacaataattatttaggcttaattgtattagcataaataacatcttcaaagattttattgtttatgactacttttttaaaaaaatttttcattttcgaaattgtaaaattacaattaggacccttaaactaattctgatcaaaatatatatttttaaatatgaccaaaatacatctaggatttataatactttattaattaaaaaaattaaattaagaatatagctaaaagtatcgggcagaatgataattaaactgcccgtcgtattataataaatatttatatatataatataaattgatcccacttaactttagggaaaagcaaagcaaaa

SEQ ID NO: 146771 - DNA, 628 bp, Cannabis sativa
tgtaattggggctaatcccccaatttctattcttgagggctttgctaaaaggctatggaaggatatggtagtgaaggtgggattgcttgctaaaggaataatcataatccggtttcagaacttggaacaacgtgatagggtgctgcaacaaggttatgtgttctttgataggaaacctatggttatgaaaccatggaatcctattgatgacttcacaaaggaagaagtgacttcagttccaatctgggtgcaattgaaaggcttggatatcaaatattggggagagacatctcttttcaaaatagtggcacaaattggggagcctttgcaggtggatggaataacaaagaatagagatcaattgcaatatctgagggtactaattcgggttagtttggcacaaacttttcctagtaccatatctttcattgatgaacatgatcatgaggtggaattagaagttaaatatgaatggattcctctagtttgttataattgctctgggattggacatagcaccgatgcttgtaggaatgtggagagcaagaaggaccaagggaaaccagtttgggttccaaagaaacaacaagttactgaactggccgagaaggatgcagatggatttcaa

SEQ ID NO: 146772 - DNA, 1405 bp, Cannabis sativa
acctacaagctaaaacgaatggacagaaccatggtgcctagggcctagaatgttgatcacctccgaaagtattaccaatagttgaaaaaaataaaagtttatgttatgtaaagtaatttgtaccggacaaacatatgcaacctctaatccaaagtttataaaactgagtgacctaaaattgaatgtcgtgtcactcaggggagtagtagagcataccacatggacaaatgtaaacagaccaaatttaataaagttaaaagctaagtatgtattcaaatgtgaatataaagtgctcggatcccaaagaaaagctcaaaaataaaagataagggcttggggacgggccttaagtgtctccactttaaaaatatatatatagaagtaaattgtcttaaaaatgggagaaggattaaatatgtaaggagaaaaaataataataataatgatagtggtagtgaaaatccggtttaatcaaaccgaggcggaagacgaggacccctgcgctcctcaagcaaggcatcaagtctcttcttcttctcccagaagcgaacgagaacctcctcaggcttaagatagaagtcaagcttaaggttctgaccgttagtctgccacgccatgaagacatcgtcgtcaaaacatttgttgcagtgctggcaggtaacgggggccgggagctcatctctttttgctttcttttgagcctactccttgaagtcacgcagctccttcacctcaacggtcaggttggctgtcgttttcaaatcagcttggtgcagctcctctaaggactttagcctgccagtcaattctcaactgcctctttggcctctctaagctcacgccttgccttggtcacagcctcatccctggccttcagggcgtcgtcctttgccttcagctccgccttggcctttaacgcctcctggtgactccgctccatctgagcctccctttgctgagcctcctcccggatagctttcctctcggccgctaagtctctcagactcttcatggcctcatccatgcccccaaattcggacatgatgtacccatggtcaattaaagtctttgagaggcgaccagtctctgtagcaatctggcaacacaagaaaaatgtgtgagtacgagaggacaggcatcataaaacaaaacccgagaacaccaacaaatagacttaccacggtcatggcagcgctaatatcctaaatctgatagattgagttcatggaagcgcaggctgcatatctcttggctgggagttgggtcaaattggagacgaagtggcttgtcaactctgaggcaaaaggagtgagggtagggccgatgaaacagttgaaccagtccgtcagggggtccatattcagattccaggtgttcccaaagtactcactgcgtgaggaattgt

SEQ ID NO: 146773 - DNA, 673 bp, Cannabis sativa
tcagatcatacattgtttataaaacacttagttggttgaaaattaacagcaatgattgtttatgtcaatgatattatgtttacaggtaatttcatagaataaatttctcatctcaagcagcttctctccagtgaatttgagattaaagatctaggctaattaagacattttctagggatggaagttgcaagatcgagtcaaggtatcgcagtcactcaacggaattatgtccttgatctcttacaagaaagtgggattatcagatgcaagccaagtgaaactctgatggaccctaataccaaacgtggagtatagagagacagaacaaaagttgatcgaggaaggtatgaatgtcttgtggcaaagttaaataacctaactcacactcgacctgacataagcttttgtgtgagtgttgttagccaatttctcaataatccattctaggaacacatggatgcagattcttaagtacctcaagggaacaccaggaaaagggttaatattaaggaaaactctcaacaaacatcttaaaatatacatagatgcagattgggtcagttctctcactgaccgaagatccacttttgagtactgctcctacgtttggggaaatcttgtatcttggcgcagcaagaagcaacaagtggtagctcgcagcagtgcagaagca

SEQ ID NO: 146774 - DNA, 505 bp, Cannabis sativa
gtcatgggtcgttcccagcctatcaaacacagaagaacgtggctgcctcagcgattgattcacttggttgacaagcagaatgactccattattctaggtggatccatcgggtatggctcctcctgatgaattcccggacaaggtcttcctgcctaccacttggcccacgagtggaactcgtgactggggattggacggctgaccattggttgtctgggaggcattcctcatcgggtgatcctctgtttctcccaggggaatgacactcggtgtttgttggcctacagtctggtaggctcttcgtatcagcacagtagcttgccgactccgatcttcgatctctgcatggtgagcccttaatgcctccatctctttgtccctccattcggcgaacatatgcctctgttcttcaaatgcgaggtttacagcggcacgcagttcctcctgatcatgatgcagggtattgctatgaccctgcatgagtccgagcgcagcacggagattt

SEQ ID NO: 146775 - DNA, 623 bp, Cannabis sativa
  modified_base (38)..(53): a, c, t, g, unknown or other
aagttcatatttatggtgttaaacaacatacttgtgannnnnnnnnnnnnnnnggtaaaataaattccaacagccccgtcctccacaagacgcccaagatcctgaagatgaggaagtggcctcaagagtcaacgtgggctctgaggtaggagaagagaccaacgacgatgaatacaaaggaaacttcgacgagtacgacccctatgacgaaggtagttacacagtaatagtgctcatgagacaaaaggctgctgcttatgaagctgaaatcacagcccaaaaggagcaaaacaaaaggatgcaagaggtgatgctcgccatgcagaaagccatggaggcaatagggatccatgtacaccctaaagccatccctgtaggacttggagaaacatcagaagagtcctcaccaagcacccaaaagcataagtccagggagcctagccctacacattatccctctgaagggaaccagcggaaaaatcctacttccagccccgggaaaaagaaaaaggtgcaggttcatcgaaaggtccgctcagatttctcgaaagggaaaggtccgcagaggggcaaactccaaaaagggagtcttggcccttaggatcgagaggatcgaaagagcg

SEQ ID NO: 146776 - DNA, 1110 bp, Cannabis sativa
  modified_base (32)..(35): a, c, t, g, unknown or other
  modified_base (164)..(167): a, c, t, g, unknown or other
agaaaggctgggggcacatagatgacctggannnntgcttcaaagtcctcaggaagtacaacatgaaactaaatcccttaaggtgctcctttggagtctgctgaagaaatattctgggcttcattgtcaatgcctgaggaattgaagccaatccagagaagatnnnngccctcctggatatgaagtcaccaaataaaaccaaggaagtgcaaagtttgaatggtcggatcgccgcactcagtgaattcgtttcaaaatcaacagacaagtgtgtcccattcttcaatatcctgcgaggaaacaagcaattcaagtggttggaggaatgtgaaaaagctttctgagagctaaaagcacaactcgcaaaacctccgtactctcaaaacctctagatggagagatcttggaatatacttagctgccacgaagaacgctgtgagtgccgtgctaatcagaaaagagaacaacatacaacaccgagtctattacatcaataaaagactcattgaggctgaaagccgatacccactgatagagaaactcaattactgccttattctagcaacaagaaagttaaggccctattttcaagctcatcctattccggtgtacactgaccaaccattacgctaaatattgtaaaagttggacgcctctggacagctactcaagtgggcggtggagttgggtcagtacgaaattattttccaaccccgaacagcaatcaaaggccaggccttagcaaactttgtggtaaaatgcataggcaaagaagaaagcgtacgagaaagcaaccccgagctggtacaaacacctcaaccaaataacagtgacaataagccgacttggaaactacacgtagacagattcaaagcatctaataacgaagccaagtatgaagctataatcagtggcctaaagttagcccgggagatgagagccgagcacattgaaatctgcagtgattcatagcttgtggtaaatcacgtatcaagagcatacgaatctcggggagaaaagatgatagcataactgagaaaaatacatgaccttctcgcacaattcaaaagctacggtcttagacaaattccaagggaagaaaacaaaact

SEQ ID NO: 146777 - DNA, 518 bp, Cannabis sativa
  modified_base (464)..(469): a, c, t, g, unknown or other
ataaatcaaataaattctcatatattgaactatataataatataattcctcaattattcataattatctaattaggattttgctaatccacttctcacttctagggtattacactcagtttcttggaagtaactagtcatctggagtaggtgatcaagcacactctgatgaggtttcatccgtgcattgatgaaattcttggtcgccttaaaacgagcttgaattgatgccttcccaaacagtttagttaactggttcatgatatctgcagccgtgtgagtgtttgcaaaccttgttttcaaggtgtcgaccatgctagacagcataaagtattgagctttgttgttagcattctgccaacgctcaaacttttccttgactgccttggtcgcattctgatctggctgcttaggagcctcttcagtcaacacaaatagggtattttcaccaatgagagcaatatnnnnnntctctctccatttgataaagttaattccattgagcttgttgtcagtcaa

SEQ ID NO: 146778 - DNA, 526 bp, Cannabis sativa
gacctagacccagacctagaaccgaactcggacctagcccctggatctagacctggatcaaaactcgggacctagatgcagaccgagatcctgaccctaaccgagacctggacctgcactcggacctaacctgaacctagacccaaactatgatctagacttggaccaagagccaaacccaaactcggaccaggacacagaccccaaacaagacccggacccaaacccaaacccaaacactgaatcaaaatcgaaacctagtctagttacactatcctaggtcctggtctgggtcctagttcacggtctgtgtccaaggtcaggtcttcggtctcagtgccagttccaaagcctgggtctcgggtccaagttccccatccaagtcccagtcctaggtctcagtttgtgtctagggcccattcgcggttcaagtcctagttcgagttttggttcggtttttgatccctctccaggtccagatctgggttcgagtcccaagttcgagtctatatccaagttggggtct

SEQ ID NO: 146779 - DNA, 649 bp, Cannabis sativa
aatataggtccagtccaatttataaccaatacatcctatacaagcttactttactaatgccctagaaaagacattccacttaaccaagtataagtagaccacatcgcttagtatcacgttagtataaatccagtgcattgataaattatgagactaaaatagtttaaatcatatggtcacaattattttttttttttaactgtgtagacaacactataattatgagtaacaatatgattaggaattaatagaatttatataacaaatatgtgatcatgaaagcaacatataaaccaatcaatataagaaagagtaataaaatgatttatgttcttttattgataaatacaataaggttacattgaaattgaattttatttagggcataaaatcctaacatataaatacactatattattatccattatttctatcatatcgattagtgacctccatagaaagtctataattagtagggactaaaattacaatttaccctttaattattgtatccttaaaacacttagttgacttaataagattttaataagctaatataatcactaaaatgagttcactatcattaagtacttcaaattagctcaaaggaaactgcttgtaacgccctaatgctaaggcacgctacagt

SEQ ID NO: 146780 - DNA, 996 bp, Cannabis sativa
aagccgacgtccgttcgaaagcttgtatgttcttggtcaggtgggggcatgcttatctgattataccctgagtatgcatccatgaaagttagaatttcatggtcggttgttgcatctaccaactaatcgattctcggtaagggaaaacaatcttttgggcacgccttgtttaagtctgtaaagtcaatgcacaccttccaggtgccgttcggctttggaactagtacgcggttcgagacccaaactaggtagtagacctctttgataaaattgttgttccatagtttttccacctcttcttttagtgccttggctctctctttatcgagtaaccttcttttctgttgaactcgcttgaagttttcgacgtcgatgtttaaagcgtgacttatcacggtggggtttattccttccatgtcttcgtgtgaccatgcgaagacatcttggttttcccttaagaactggatcaaaacggatcttatgtccttaggaagctcttttccaattttgactaatttggatggttgttcgaggtctaatggcacttcttctaattcttcaatcagaccaacccctgtatcaatatccccaaaatggggatcaatgtcttcgacctcgttttggacgagtcctcattgctgagaactactatttgtagctttgagggatttggcttctttctccctggttgtgatggataggttgtaacactctcgtgctactatttgattgcccttcaaagagccaattccacccttggtaggaaacttgacgaggaggtgaaagctaaaagtgaccgctttcaggtcatacagggttgggcggccaattaaggcgttgtagggagatactatatccaataccacgaataatgccatgatagtgacactcttgggggctgttcccaccgtcaatggtaacttaataattccaaccgacgccataccatttcctgtgaatccatagatgagatgttcacagggctccaaatccttt

SEQ ID NO: 146781 - DNA, 561 bp, Cannabis sativa
aaattttagctctcttaggcttaggagcgtcgaccttaactggaatggctcttttcttagtgcccgatgtctctggaacatcacccactaatttcttagcaatttttttcaacatcatcttagcttcgactttggatgaaacagtcggaggtttcttagattttttagtatttttcttggccggagatggagacttcgaaccacttctagtggttgccatttatataagaaaaaaatacaataggggaggatgaacttacagttaaaatcgagagaaaagaagaaagtggaatacaatgtaggttgaggaaaacgtgggttagggcttggagaaggtgattgtgggaagaagaagtgggttagggcttagagtgggtgatcgtgtgaagaagaggttgaagacaaaaggaaatagaagcagagaaaaaaaatcaaaaaaaaaaggaaaaaggcagtcatgacataggtggcgtgtaccttggtgtgaagcatgacatatgcatgctaaaaggtaaaaatgtaattatgaaacttttaaaaactaaaattgaaaaatttaaa

SEQ ID NO: 146782 - DNA, 660 bp, Cannabis sativa
  modified_base (484)..(491): a, c, t, g, unknown or other
ctctgaaaaaaatattgttttattaatttagaaatgtgtttttacaagttgagaattttacacttggttctctatgatagaacatagagcctaatgggatttatagccaactaaacactaaagtgtaccaactgtcataactatcgagatgttagttatgacagttggacttacagcatagaaaaaacaaaagattaaacatataacaaattgaatacacatttcaagacatataatctaccaatttacatattttcatcataggtaatatatattttttaaaatctactcttgttacttaaaaaaactatacctcctggcttaagaaataaaaattaatgtttgaaaagcataggtctcgtttggtaatgcttttattttttaatgttttaatcacaaaataaaagtaaaatttttatttttaaaaataaaaatgtgttctgtaaccacttttattttttaattttaaaaatagaaaataaannnnnnnnctgtaaagtttatttttatttttcatttttcgattttatttaagtcgggtctaggtctggaatcgaattcgcgttcgggtcagaggtcgggttcagcgccagggccgtgggagggtatttgggtccaggtctgatcggagtctaaaatatcgattaagaaaaaaaaatt

SEQ ID NO: 146783 - DNA, 976 bp, Cannabis sativa
acatatatatatacatatcttataatgagctaattaatattaataataacaaactctgtaattaactaacaggaacctggtggccaacctctgttccacgctcttcgcaatcaagcctgagatgattggacaagtgactgtacttgggctaatgccattcttccacatctatgggatcactggcatttgctgtgctacgctgagaaacaaagggaaagtggtggtgatggagaggtacgacctgaggacgtttgttaaagcgttggtatcacatgaagtaacttttgcaccagtcgtccccccaatcatttcggacttggtgaagaagccaatggtggatgagtttgatctgaccaacctcaaactccaggctgttatgagcgccgctgctcctcttgcccccgagctactcagggcttttgaaaccaagttccccaaagtccatgttcaagaggtacgtactctctctctccaatcttctctctttcctaatatatattgtcacttttgactttttcaactcattaaagtttattcttattattattgttgttgttgttgaggaccttaaaatatcaaataagtcgtgtttaatactgtgtttaatcaattaattttttatttatgaaaaaattaaacctctaattgagttaacaaaagtagttaattaatttaacacaacatagcacacaaatttttaattgatttcccgtattataaccaataaaggtaaaccattaatattgaattgcactataattaaatttttattaatttaaaatgtaattctatatgtactaaattgtagtaataataaaatatcataatacatatcattattagcttactttagtaatttttttgaatttatataattataattaaattctatatattctattttaaactaaaatacatagcactagattttaaaaaaaaaaaaatactattagggtgtacatcaaaccgcttaaac

SEQ ID NO: 146784 - DNA, 758 bp, Cannabis sativa
attctgcgataacaagtcaagaagagagttgaacgactgcttccgtgttcttgaacgacttggatgcaggaattggatgactttgtttcagtgatttactattattagttatattactgttgttgatcgaaggcagcaaacgggttctttgtgttactgttattagtttttgtttttagttctttagtttttccctttagttttttctggttcgatttttgttggttcttgtcttctttgttgctttcgggattctgctggtggtggtacgattatggaggacagtacatgggtagatattcctattgaggaggaagaggaggctatcttgtcttatgatgctagtgctaaggatggtaatgactaggtgacaggtggtgtatcgttggaaggttcttgactgaaagaaaaattgattttgaggctatgcaacatatgaaggcttcattgtgccagctggggaaggggatgtttgtcaaggaattagatactaatcgctatctctttcaattttatcatgagattgacatccaaagtatgatgaatcgaagcccctagacttttaataggttcttgttaattttcaaaaggttacagcagggggaggatccaagattggtttccttgaatgaagtttatatgtgggtgtaattgcatgatcttagatcggggtataaaactgctatagttgttaaggatgtcgcaaactatattggaaagtttgttcaattagatgaaaggaatttcatgggcttatg

SEQ ID NO: 146785 - DNA, 787 bp, Cannabis sativa
  modified_base (234)..(237): a, c, t, g, unknown or other
  modified_base (745)..(761): a, c, t, g, unknown or other
tttttgtcatattttttcatagttttcttggtttgtattcacttgatgtgcagaatgctaatagggatattttatggtaattgttatatttcctaggatatcttggacgttggttagtattttctgtatgaatgatttttagtgtcatttggatcgaatttgcatattgactattgactattaactattactaatactacaaagatttattagtcattactatgtatttattannnntttttttggttttttttttatatagaaaaaatatgtatattgtaaatcaatattataacttattaatactgttatatttaattatatttatatatatataattaattaaattattatttataatatataaaatttgaattaaaataatttaatattttttttaaaaaaaatatctaatatagtggcacttttgtgtgtcactatatctctacaaataataataaaaattaaaaagaaaagaaaaaaaaaagatatagtgacactttttgtgtgttgctattacttttttagtctgacaaaatttgactctatacgtctacagtgacgcgcaaagagtgattgtaaaaggattcaatgacacaggtgaagtgtcactaaaaaatatctttccagtcaccctcattagtgacgcgcaatgaagtgtcactaaatagttttagagtcactcaacatgggtcactaaaacccagttttctggtagtgtaagagtggattcaataaggaattnnnnnnnnnnnnnnnnnacttggtaaattcggttcggcttatt

SEQ ID NO: 146786 - DNA, 1678 bp, Cannabis sativa
aagtttccatcaacttgttgaaggagatcttttcccatggatactcatagaagaaatctaggttatcaaccatccttatcacaaatggaggaacatcagtcttctcctcctcaccagtgaggacgcccataacaaacaacgccatccccaacttgtacacatcatgcttctgtgcaactctcaaaaactttacgaagttggccaaagctgatggatatcaccgttgaagtactcgacaatcaatctttccaaatttcctttctcttcaatctcttctttcgtaggcatgggtaacaagttcaaccccatcaccaatgcaaactcgacccggctaaatctgtatctcttctttccccaaaaaaaaagtgtacctcgtctaccttctcagatttgatcttgtgcatgaataactgatggatcaataccccagaaaaatttatcggagtcctctcgaagaattgtttaaaaggagattccttcactctgtcccataattagaattcgtcaaactttgccttgatcttcagatagtaataacttccaccacgccaagtgacacggcctgtataatgctctgacactggaattataagacgtgacagtcttgtattctggaaaaataacacaagagaaaatacaagttaaaaaacaaaaaaataaataaataaaccatcagaccaatatcggcccctatcggacccatattggaccaaactcaaaaaaccaataaaaaaataaaaaaactatcggacataagagcgcatcggaccaatatcagcctctatcggacccatatcggaccaaactcaaaaaaaccaaaaaaaaaaaactatcggacataagagggcatcgggcccaatcggatcaaacccaaaaaatcaaaaaaaaaaaaattatcggacataagagggcatcagaccccatcagacccaatcggacaagtatcagacccacaaatcacaaaaggcatcagaccatgtatcggacaacatcagacacaccatcggacctgcctacatcagaccctaatcgaactctatcggaccattatcgaaacttcatcatcaaccttgaaattttctacaaacccacacccatcggacctatatcggtccaccatcggacaccatcgggcctaaagattttctcgcacatacaacccaaaactgaccctaaaatctaaaaaaactttcacatatcacagatcaggcatcacaaatctaatatataccctaaatcaatgaattataaatgaaaaaaataaacaaaatccatgatttttaaaaatagggatttgaaaatgtaccttagacttagacatcgagtttggggttctcctccgtgcagtattcggttggtcggaatggtgggtaggggtgggtcggaatggtgatggtgctgtggggtaggcattgtgggtcgatgtgttcttgcgatggggtatcgctcgtgcagagagagaatagagggaaggagagagaaacgggggaggtgattatgacaggggtatttttggggtttaagtaaaatagtcctattttaacaattactctaagtttttgtttacctaagtaattatgctttaaaagatgcataaaaattcaaatttccctttatccctttcatattcccaattcagaaaaagaaaaaagaaaaaagataaatgatgtgtaagtaa

SEQ ID NO: 146787 - DNA, 683 bp, Cannabis sativa
  modified_base (272)..(272): a, c, t, g, unknown or other
  modified_base (327)..(336): a, c, t, g, unknown or other
atataattttctattgaattaattttattaaaatagaaacaaataattaagtttcttcaataaaatcaacttaattattaattctatttaaatatacaagaaaaatattctaatttaagttgctttaaaaaattaattataattaattttcaacttaaataaatgttctacttaattaagtatttaaaaaatatatataaatgagttttctagaaattagcttatctagaatttatttcattaaactaagtgtatttttctaaattaatttnaaaataatctaatgaaaaataaatttcattttttaaaaattaattatgttgctannnnnnnnnnattaggttaaactaatataattagtcttatacaattatttgaataaggtaaatgggttttcacagttggagtagtttgtgtgagggaggactaggttcagtatgtcgtacccactgctatgaccccttaactcacacgcaaggcccaaaagagaagaatttgacctttaattaaataattattattaattaaataagtctaatactaattgagcctaaataaaactatcaaagtgattattttattttagcaacttagtctatttaagtatccaaaataaatgggcttcatatatgcatctaagtccaatatcaaacatatatgctcacatagataattgatttgga

SEQ ID NO: 146788 - DNA, 629 bp, Cannabis sativa
gggcataaaacccaacactatatgttctggatttaacagaaattgtatacattaaaccataaacatgaaaactacatgtaaatataaatgactattaatcttttattgacaaaaaattatattatattgaaatgagttttctttagggcataaaatcttaacaaaaacaacataagctgaagctcactcgaccaaggaatacagctaaaaagatgcttgaatatgtgcatgttgatctttggggaccatacaaggtgcctactcactacggtaagcaatactttctttcagcaagtgtccatggtctgcgagtccggaagctcgtttatgttctcggaggctctggtacttaagttgacatggagacttcactcaaagaggagtttatttctaactaacttaacaacctcatttcttgcagccaccgactttaggatcttaatcttaagcctataaatatcaccttgacttttgggatagaacttacgaattagagatgagattgagagtttcagagagaaaaaaattgagaggaagagagataggtgctgagaaaagagagagattgggtttggattttgtaagaagaatcttctgtagatgaagaagatgttgggattttatgccct

SEQ ID NO: 146789 - DNA, 591 bp, Cannabis sativa
ccccgagatatgtcagggattgactttggatattgaaacaattgtgggagtatgttagggattgaccctgaacatcaaaacccgttttataaaaaccagatactcctggaagatttataaaataaacgattagactgggaaagttcttatgagattaatgattgtaaatcacattgctgatgaagtatttttaacttaggttgtgaataaaataatcatttctttcaaacaagtaattataaagcgtaaaccctttaaaattacttgaggggcatatatgtatgattaaacgaaattaatctagaaatacatagtacaatacaaatccatcatttcaaaaagtaaaaaaaaacttttgaaaactttttaaaaggtcctcgaccaaacctttttgacaaaagaggggttgaactgttataactccccgaccaaacctttttgatggaaaaggggtcaaatcattataacgccctgatcaaacatttttgtcgggaaagggatcaaacaactgtaatttttggtttaaaacctatctgacaagaaaagaaaatcaaaagttaggattaccgcgtaaagctgaatactaacggc

SEQ ID NO: 146790 - DNA, 601 bp, Cannabis sativa
ctcaaagcttgctcaaacctaataacaacccacaattcaagcttaactcaacataatctagcataatcaaacctctaaaaagaatactaaataactacgataaccacagcagcaaaaacactaattcatgcaaaatttcattttcttaaaacccaagaaactaaagagaaggatacaagaaatttacctagagcttaatatctcctgctggaacaagcttaaaatgcagaaaaacaacccaaaccctagctggttctaggtgggttcgaaggagagagagagcttgagagaaaatttgatttttgcttatatttgatattttgaaaaattaaatgaaataatattgattttactcaataaatatcagcttgaaacacataaaataagattttagtaaaataattcaagtctcactaaaggacaaaataaagaattacaaaatgactatccctccatactaatagccactaacggtcactaaggggtaaattgggaaattttaaaatcccaacaattctcgacattcccaatgtcctaactatatcgccccgctatactaaaaatactaggatgtgactctaatagccaaacaccgcgttcc

SEQ ID NO: 146791 - DNA, 599 bp, Cannabis sativa
aatatttatttatgtggaacaataaaattgtgccatgtgtacactgtgtacgcgtagacattccaccatggcagttaacagctaaaaatagatggaagtgttaaattgctaacagaacaagagtttgggggttttaccaccaaaattttagaattaggggttagttgcaaaaacctggccccttaaggaagttatgccgcaaattactctattgaagttataacaagtggagtagtcaaaaactaagagattatgtcttgacaatgatatttggaggcttatcactcgattgaaaacttattaattttaaaatcgttgttattatcaccgtataatttattgttatcattgtatctgattacttatatatgttttagtgtagataaaataaataaaatcataaattacctactcacttttatatatactagcaaaaagttacgtgcgaggcacgtatactaaattttatgctaatttgtttttttttatgttatttcaaagttgtacaattaaaaattaaagaaaaaatattattagttattaagtgagattattattatgtgtataggaagaaattacaaattaattaatcttataat

SEQ ID NO: 146792 - DNA, 705 bp, Cannabis sativa
tttcaaaatatcaacatttaaatatataaatgcaattcaaaattatgtgggaattgattcttaaaataaaataaaatatattttgaaaattattcttgttaacacagattttcgttaaccaaacatgagcctctcagtgatgatttcatacagaaaaaataaaagctgtagaaataaaaatatgaacactgggttttttacgtggttttgtagttaaaattctacatagtccacgagttaatcttatacagatttctgattgtttttcagggcctctcttgtatgagtttttttgtccttttttttttatcttgtttttcactatttataattacatagtgggcagttaattacaaagttgactggaatatgtttacaagaatcatccctaaaattgtgggattcgattacatatcacgcagtgtaaatgcagtttatgatatgaaaatcatatacctgtgattttcccgttttcactgggtcaacataatcgtgtattaaacacgtctttagctattgtatctaaagatgtctcgacaaaaacttggttctagtgatctcactagggagctaggaccattcttccttctgaggtcgatgatgtatgcgttgggctttgtgccctaaataaaactctacttcaatgtaatcttttctattcaatcatcaataaagaaacataattattttcattacttatttagt

SEQ ID NO: 146793 - DNA, 572 bp, Cannabis sativa
  modified_base (40)..(55): a, c, t, g, unknown or other
tatatctatttaagatatcttacaaaattttgagaaattnnnnnnnnnnnnnnnnatagaaaataatattcaaacaatctattttacacgcgtataaaataaaataggcgtgcaatacacttcttgaacgtaatttttagcgtgttaaatttttccgaatttcttaaaattttgtaggatgtcttaaataaatataatttacatgactatgagaaaaatttactaaaaaattatttcggatactaaaacaaataaaaaatatattgatatatatatccgttttaagtgttttaagtggatgcattatataaaatttccattccaaaactattacatccatgtaatattttcattgatgcacatattattatatcaacctatgtgcaatatttactaattatggtattgacttcattatatagacacaacccctcatattcaatatatatacacaccccctcatattctatattaataattatatattaatattacatctcgaaaaaacgcaaaaacaaagggcattaagaatatctcggtagaaataattcaataaaattaataaataaggt

SEQ ID NO: 146794 - DNA, 893 bp, Cannabis sativa
  modified_base (432)..(437): a, c, t, g, unknown or other
acacctgcaacaagttggatagtttgatatagggtttatttaattttaaattaatttaaaattttcgaaaaataaataaatgaaaaaaaaaattcagaataaataaataaattaaaaaaacttaaaattaaacatataattttgaaaaattaggtttcaactaacctaagaatctatttcaaaaaaaagtgctaactacttttcaaatttcatgttattttaaaaattaaatattcaataaaataaaattatgatttaatatcattcttctaaatttataatttaatttaaaaaaaaaataacaaaatttaaaaattagcataatatcctatttctatttaaaatattatgattaaactaatcttatttgaaatttaaataaggtcaattgatttaaaaataataatttaaaaaaatctgaccttaaatttnnnnnnaagataaaataatcaaattttaataataagatgattaattaagcaaaaaaaaaatagattttcacctattctcaaattcaaatttcactaatatcttaaattaattttaaaaatactaattaatttaattctgataattaaattttaaatatgaaaacaaaaatctaaatacaaaattacacaaaaaaatccaaaattaattccatgaagaaacatgaaaaaaatgaagaaaattgaaaaaaaaaatgcaagttgtatggatggtatgcgttgcataccatccgcgagcgctgagcaaggaacggcaccgagaaaactcggccagagaagctgcacgcagcctcgtccgtgcgtgggaccaagcattcagacaaaactgagacacccgaccgagaaaactcggacatctccttgtctgaagcgcgcgtgactgagtgatcactcggatccgcgcgc

SEQ ID NO: 146795 - DNA, 698 bp, Cannabis sativa
  modified_base (208)..(217): a, c, t, g, unknown or other
ttggcatagatacttagacttagaagatataagaaaagaatgttgaactttgatggggggaagagaaactcatcaagtttccttgatgttgaccaagtttaaacagtgtttaaacttggtttgagtgacacattttgtaaaaatgtcagcagggttgtgatcagtgctgattttcttcacttgaacctctccattggcaatgatctcnnnnnnnnnntgtagtttgatgtcaacatgctttgacctatcatggaacataggatttttcatcaagtgcaatgcattttggttgtcacaatggacagtcatgtcttcagaactgaatccaagttcctttgagagactttttaaccataatgcttcctttattgcctcggttgcagccatatactcggcctttgtggatgacagggctacaaccttttgaagattcgacttccagctgatgcatccacccaaagcagtgaatatgtacactgtcaatgatattcttgtgtctatgcaacctgcagagtctgagtcaacgaatccttcaacttcacatccacctttctcagttgttttgtagattaaacccatgttgagagaccctttaacatacctcataacccatttgacaacatcccagtgctgttgtcctggatcagcaacaaatcgactgactatgctcatggcataggccaagtcaggccttgtgc

SEQ ID NO: 146796 - DNA, 519 bp, Cannabis sativa
  modified_base (482)..(494): a, c, t, g, unknown or other
gaagtgtgcacgaggcacacggccgcgcgaaaaatgagcccattgttactcggatggttggaaggctgaccttggcttagagaagtcaaggtgccgcacgggtattccgctgcctaaaaagctaatcccgtgacaatcagtagtttcataaaatatcaagccattgttgatttgccatgacccgatctatttctaagcagattccatcctcttcttgctgcttgttgctccatgtaaaaaaattgcatgtatactttctatagcacatgattctacacaatttcaaaaagccaccgaatttcgatattgcacttttactcctattctctcttctttgttaaggatatcattaaaatctcttaataccaaccaatgcatttgagtcttgcaacctactaaatccttccacaaaattgctcttccttcatcatcattcattccataaacaaacgtgacatagaacctgttgggttttatgcccnnnnnnnnnnnnntttaaatataatcagatttacttat

SEQ ID NO: 146797 - DNA, 1078 bp, Cannabis sativa
ttttgttgaccttaatttcaagtctgtcatgactgtaattaaggatattcaagaaaaagttaatgtcattcatcgtcgaccttctgatgaagtatttatttacacaattcttatttcatattttactcatgttattattagttgttttcctgttttatttcagttgcaatattgtttttgaaccaggttaagtcatctaatgaatttgtcacccaagattctaatgatgatgatggtgatgctgatgaggatgatgacaagggactacctgatccaaagaatattgattctgattcagatgatggtgatgagttgggtaaagatggtggtgatgctactaaagttgataaggttgtttgtgatgttcatgctgatgatgtgattcaaactaaggctgttgtaggcagtgaagagagggccaaggatgttgaaaatgttaaggtcaaagagtcttgtgtaaaaggagatggttttttttatgtttaagccagcttgaaattgatgataagcaagttgtgttggctggtatataggttgttgctaaatcaatgtaagtgtagtttatattctttgttaggttgtgttagcatgtcagttttattttagtggcttgacagttttatgttagttttgcaacttttactttttttgatgttcaaattttatatttcaagttccagattccaatccaagtgttgctgttgaaaaggcacctgccattgcttctgatgaagaagttgatgacactgttacttatactcctcttttaaataagagaaagcgtgcctcgacattaaaatcgccttttgttgattttaggtcggctgatgtgagcagcactccaatggaggtaatgtcctcagattctcaatctagaggagatgagagggattttaagatggttacgtatgtgaagggccttcacgctcttaatgatacatttgccgatcctgtctctcctgaaattgaggcaaaatttgatgcttggattggcaaatgattgctaaaacatcctaggtgattattttctttattctgttttttattttttttatttgtttcattttgtttttttttt

SEQ ID NO: 146798 - DNA, 1152 bp, Cannabis sativa
  modified_base (733)..(748): a, c, t, g, unknown or other
atgagtcaagcttgagttcaaaactcaaagcttgctcatccaactaattagctaacaaaacctgctcaattcaccatatataaccatattataacactagaaaacaaacttggttaacccatctatcatgcatcacacctatttcaatccactcaattaaacacatttgaactacagaacacaacacataattacagcagcaacaacaaccaaaaactaagcatgcaaactatcatctttttcttaaaactcaagaaaacatcaagaaggttactagaacttataccttagcttgaattacacttagaatggctgaaaatacttgaattgctaagaaaaactcccagccctagcaactcaagcaaagccgagagagagagagagacacagcttgagaggaagaacttctttaatttccaattttctatctttttaaataaatgataaaacatgcataaacctttcctttatttcagctatgataaatcaaataaatcaaataattccaacacactaagtccactaaacgacaaaagcttatggggcaaaatggctattctgcctctccaacactaaaaggattaaaaggcacttaagggtatttttgggaaagctctaaattcccgactactcccgacattcccaatgtctaaataactgccccgctatactaaaattctaaattgtgattctactgagccatacaccgcgttccatgttgccgggcaccgannnnnnnnnnnnnnnnaatttcactatatgacataaaatgtattcagaattcaaatagaacaacataaataattatttaaatatctataactaattttcgaaatcaaatcttaattatttgctaattttgaaattaaactaagcgttctttacaacacgcaacttcgaaagtcccgtacagacttgggggcaaatgttatcccaattttggcactctgacgtggcatcacatgatggtgacacgtggaatcaacttcgagtatctgctcagagaatacagtctgaacaggacgcctcatatgcatgcctagagccaagcgatcagcaatccgcgcagagcgaccaacacttagcgaattcagctttctcattgtgagtcatcaaagaaatcactataacttggggatcagattgcagaga

SEQ ID NO: 146799 - DNA, 854 bp, Cannabis sativa
gtacggctgggctaacctactcggcattctggtcaatttgaattacgtcagcatctttctgagcgagaatttgagtatgggtttcgggcttcatgatcgtcgtgacattgtgattgtctactcccctccttctgtttggatcattccttaggtcatgggtcgcccctaacctttcgaatacataagcgcttggctgcctcagtgattgatttgattggttaacgggtggaatggcaccatatatctggttggaaccatcaggtatgacttctcttgatgaattactagacaaaatctgcccgcctaccgctaggcccacgagtggaactcgtgaccggggaatgaaattcagaggttgctaacctacagtttgtctcccgcctaccatttgcactctgggaagtattcatcgctggatcttcgtctgtctcacccaggggaatgacattcggaggttgctaacctacagtttggtaggcttatcgtatcagtacagtagcttgccgactatgattttcaatctctgtatggtgagccttaacgcctccatctctctatctctccactcagtaaacatacacctttgttcttcgaacgcgagatttaccgcagtgcagagttcatcctgatcatgatgtagggtattgttatgaccctgcatgagtccaagagcgtctcggagattttgtaactcagtagcatatctgatggttgtttgggtgttggttccaggcggaacagttgtgttatgaatgccctggttgggtgcacaactgttattcccagtctcttgcacaccaggcgatttcatctataggagttgttacacaattacccacgtttgccgactgtcc

SEQ ID NO: 146800 - DNA, 815 bp, Cannabis sativa
gggctggtatacattcttattgggtcgaatattaagtgaaatgggcgagtcttttttgacttggctcttgttgctttgaccgaaggtatatatatatatatatatataagagaatgggaggcttgatttgagagagaagagtcttggaatcttgattgaattggttcttcttggtgttgggcttattaacattgggtgagaaataatatagcacaaatattgagttacaataatagcacttttattatggacgcataataaagtgtagaaatttgaaaaataccacttttgcattttgtattgattttgtttctttaaagtaagttggacaaaaaaaaagttacagattttggtttaaaattccaacagtggtatcagagctaattaatttccgcaaagaaagattcaaattaatacattcaagaagcaagtctgaaatatattaaaaaatcaaggacaggaagaatttgaacttctagaacacaaggatggcaatcaagaggaggaattagatattggagatttggaggacattctagacctttatctaatttaattttttagcaaatacaatatgactagtcttaaaattgatattgataagtttgatggatcaagtgactatagaatatggaggaggaaaataagatctctactggcacaacagaagttgttgaaagtccttaaacagcccattgaatggcttgatggaacatctaagatacagcaagaagagtatcttgaaacagggactgggaaagtacattggttgactataaaattgattttagggtacttaaagaagacaacatgtg

SEQ ID NO: 146801 - DNA, 911 bp, Cannabis sativa
ggacaccaaccatgctgtcttttgtattcaggaatactcttttgaggaccatatctcccacaaagaatttcctcgccctcacttgcttattgaactatcaagccaccttttgttggtgtactgctaacttaggtttgctgaggctcatttttcttcaatttcatcaagtgattctgctaggagagcatgattagcttcttgatcgtaggtcaatcttctatgggacggaggttctaattctacaggcaacatagcttcataaccatatgccatagcaaacagtgtttgtccaattacttgtttttctcttgttcggtatgaccacaatacttccagtagttcctctagccaattccttttagcttcttcaagtcgtttttttcatagtgtctttgagtgtcttattgattgcttcgacctgaccatttgattgagggtgtgcctctacgaaggaactctttatgattgagggtgttctatagaaatctgtaaacatctggctatcaaagtgtttgccattatctgaaatgattttgtgcgggaatctgaaccgacatattattatgttcttcaccacaaattccaataattttttagaagtgatcgttgctagaggctcgaattctgtccactttgtgaaatattccatcgcaaccactgcatactgtacccctcccttgcccttgggcagttgtctgatcaggtctattccttaaagggcaaaaggccaaggactttgcatatgagttagcttattgggcagtgcatggggtatttttgaaaacttctagcatttatcacatttctttacataagcctttgaatcttccatcacgattggccaaaaatatccttgccttagttttttctttgataggctttgccctgctgtgtggttgccacaaaatcca

SEQ ID NO: 146802 - DNA, 647 bp, Cannabis sativa
aatgtgggcgaagcaaactataatgttgtctatgagttctttgccaattatccctacaaaggcgataataacaaagtgtatgttagaggagtacatgtgtccattatgttagacactattaacaacttctttaacattggcacactaggggaatggcgagatgagagaatattagcactgaggagagaaacccttactgatgaggccattgcaacaatattggggcaagagggtactcaatttcatattgagaggaatcagaatcaaaagtctttattccggtggcaactcaatccaaaggcaaaagcttggacctattttttaaattcttgaattatgtcgacgtcacatgcttcaactctagactatgttgttgtgtagtagtctatgctatcatgacgaagatgacattcgacataggattggtaattttgaagaatattaactatgtttacgaaatgaggaccacaacgggtacgacccatcgtgccctaattacatctttatgctcgagacatggtgttccaatgatagaaggagacattgttaaagaactaatgtagtccatctctagaagcagtggcgaacccagaatttaaagtgaagggggcgtaaataaatttaaaaagaaaatataaagtgtagtt

SEQ ID NO: 146803 - DNA, 529 bp, Cannabis sativa
ctaaaaaattatttcggatgctaagacagataggggtgcatcaatatatccattttaagggggtgcatggtagaattttccaaatatttatatactattttttatttatattttttttaaaaaaattcacggtttatgtttttaaagtggtttcgccagtagtttcaatgtgaattgctataggatttttaattacgatttaggttactacattagttgcaataggaatttctatataaaattctataaaaaatacttaaaaaaaactatttagaagtgtaaaaattaaaaaaaaaaattattaatatatttaaattatttttttaaaaaaaatttaatgacttataccaattaaaaattatcacgtgataatttaattcattaacaatcagtaccctacaaaaatttaagaactataacttacctattaaaacttaggggtgattctacaatgcacccccttaaaagagatgcactgatgcacccttaacttgtttcggcatccagaaaaattttttagtctaatttt

SEQ ID NO: 146804 - DNA, 617 bp, Cannabis sativa
tagtaaggtatatattatgaagaatacctatgggaccagaatacgttccagtggtctgagaatttctgaatgtcttttcagggaagttactggagttactaacttactattaaaatgggagattggatttttgaaaatatctggtacttgggcagagttatatcttaaacttcgtatcgaatggtatttgagatggttgaaggttcagttacaggggatgctggatgttggacttgaaattgttggactttttgtatcccacatcctggggtacgctagttttatttgtgaagaagaagaatgaaactttacaaaagtgtattgatcgatggaaattaaataaactcatgacgaagagtaagtatttctttgtcaaggatagaaatcgtgatgattaatgttagggaagtaccatttttttttcttttctgagatcggtcttcgatctggttattaccagttgaagatttaagagaagggtatttccaaagcaatttagagttgacttcaccccatgtttacaactgaggttaaaggttttctggaattaatagaatgctacggattatttgttaagggaagtttacacttttagtggagttaggtcgaaagaattg

SEQ ID NO: 146805 - DNA, 688 bp, Cannabis sativa
cttgagcactagcgctggagccttgggatggatagattcattatatgtgacgaccctttatgagttagtcatcgtaaatgcatcgggtcttagcactgtcagctcgccccagcacctcttgcacctcgttgtgtttgtgtatggacggcgaggaacacgtgcttgagtatactagtgacctttcagaaacgtgcttgaggaacacgtgcttgaggaacatgtgtcgtacggctagtgacctttcacacacaaaaagcgaggcgcatgtgtctcccaagctctgggaagatctaagagatgcgtgcatgcgccttaggatctcctgggcagtcagtttcttccaatggatggcaaggcactttgtagcttttttggcaaagactcccctagtaggatgaatgttactttggtagagtttcgctaactagtttttaatggcacgatttactttctttgatgtaactctagggttgcagttagatcgtgatgaaagagaccttctgagtaaactttgcggcaaatggcgtgcctccacaaacagtaccataaccacgccggactagaggcccagtagacgtcgaggtactaacggtctcctcttagctgccgccattacaggatcaattttcgatcaacttcatggctcagcacaaaggtaggggaagtagtcatcaacaatggatctggc

SEQ ID NO: 146806 - DNA, 841 bp, Cannabis sativa
acccatgttttgaaaagtgtttttttttttaataaaggcaacattagtatcttaacgccagtttatttatggcatcttattttacgtaagtaagggtgttacagaaataaaacacttcacaaattcaaggataattcacctcaaaattttatggcaataaggggagtagcttttagctctttagctttataaagtgattatctctctctttttttattaacgaggcatacttacatgtgttgttgcgaatactatattttaacacttatattgattctatatatagtgtagctgtgtaacaaaatttttagtttaacagtatgttttagttttttacattaacttcaacagaatatactattacttaacacaatattctttataaattttataatattaatatatatatttaaaaataaaaattatgtaaatattttatataagaaaatttaatttgaatttaaaatacttaaaatattatagatattttatactaatttgagtacaaatttatgttttcctttctttttagagtcaaataacgtttaggagagttttttttaataaaataaatcaaaacaaatttaaatgagtgtgattttataaatttttaaataattatgaatatatatttgataaatatgtttttaattaatttgtggaattttaggaaaatagtttaattaatttttttggaggctaatataattatagtatagctatagcatattctttcccttaattctaacttggcttttttttttcttcacttttttaaattaaaaataataaataaggtaaattgcggcctaaatacttaatgtttcaaattttatacact

SEQ ID NO: 146807 - DNA, 756 bp, Cannabis sativa
  modified_base (503)..(505): a, c, t, g, unknown or other
gggcacaaaacccaacacttagtgcatgtggtacaggagtcatacttctattaaaaatgttattgatgcatctgaagctatctaaataggtgtatgggcgcctagatacaagtcaatattatgtgatatgttttgtgcttttctaactgagtttgtcgactcagaattattgttgcatatgtatgtaaggaaaaggcgaagattgagcaccagtgagtccagagctcgaggaaggtcgtacctattaggatggttaaatttgggcctttattttgtaatcgcagtgcgacatatttacaaaatgtattttgaatatgattgtaaattttaaagacaagatcccagcttttatgtacagttatatatttacaaaattttaaatttgacatgattttcgagaaaccctttgattagcaaagatgtgcacaggaaatagaaaatcacgttggggattattttaccaagatctagatttatgaccatgtatgttgtttaacatcctnnntatgaatttctaaaataatagaatctaaacacatataaaactcaagaaaccttacattgattgcagcggaattaaatgactccttccactcggatctctaatccctgttcctttctgtcgcagagtattatcaagatctgagcctggtttcccttcaggtgttggattcttcacagtcttacacactatcattgagtactatacttactatgtgtgggcatgtactcaatcactataaggctcaaaaattg

SEQ ID NO: 146808 - DNA, 779 bp, Cannabis sativa
  modified_base (426)..(426): a, c, t, g, unknown or other
agatgaacccaggtgagtcttgggaactcaagcatcagatcgaccaggatttgcttcaacttttgcatgaagttcacccttgtcttggtgctaaccctccttctagcgaaggaaattcttctgaccccgtactcagccataggatgatggctcgtacaaagaaaaccacgtgtctggttgacgcttctgatcctcaagtggctcggctcaccactctacccgatgccaaataggatttggcagtcccgatggaggaggatcgtgaggaggacgctgaagtccgcgaggttgaggagctggacgaggcgcgtccaggcaatcctcccgctgcggagggagaggaagaggttggaccccctaactttggggagtacaatgaggctaggcaaccagtcgatggcgacggagacgtcctggttgagggcntggactacgtcagtgaggagctaacttaggcggttcctcataggaggcagggtgccttgggtgccaggtggggtaagtcctccgtgcaagatttctaaggcacgcctccacactctcgaccaggacgggtacctgggcgagctggactgctacatttccgcccacgacaatcgcgccataaatcctgataagggaatgtgcgcctggttgggggctcacggccagcaaggggtgctgacgcccttgcataagtactttagagatgtggcggacttctttggcctttgcccggcccaaattactccaaagggcattaagtatttgtctgctctctttgtcctctacgcttccca

SEQ ID NO: 146809 - DNA, 1077 bp, Cannabis sativa
tgcgctgggaaaaccaaaaattctccccttgctctcaaaaccaacccaaacactaccaaactttccagggtacctaatatgggtataaagaataaattcctggcagtaattcacagaacaaaccaccaaaacccaagttgccattagcgatcaaaactttgaactcaaagctcaaacttgcataaaactcaaaccaatcaacaatactagctgctaggaacttagattaactcaattgaaccctaaaattcgaaccctaagcaaccctaactctaacagcctctgaaactcaatttcacatattcaacctaaacttaaatttcaagaattagggcaagaagttgctagagcttaccttggcttgatttcttattaaatcccttgttgaaacactcaaaaaccaacagctaatcccctgccctgagctggttcgaagagagaaagaaaggaggagaaagcttcttcaattcgttgtttttccttaattttcctaaatgagataattgatagggaaaaccaatttccctagctgaataaatcagcttgctagatgtcaaaaatctagatagccacctcaagatacacttaagaaaatgacttaattgccctttaccccaaaaccatgattttttaaaagctaggagtaaaatggtcaaatttcataaccccactcaatcccgataatttatttcctctaaaatattccccgctaagaaataaagttctaaacttacccatgtgatcaagctagtgctaattgcctttactaatccaaatttctatagcggtcattacacggaagccctagagaaagaggtggacaaattactaaccaacggcatgatccgagacgtgtattatccagaatggttggccaatccggtgctggtaccgaaaccaaacgggacatggcgggtttgtatagattttaccgatctaaacaagggttgcccaaaagacttttttcctttgccacgaatcgaccaaatggtggacgccacctccagattcaagctattgtccttcatggacgcatacgccggctacaaccatatcaagatgcacatcgcggatcaa

SEQ ID NO: 146810 - DNA, 713 bp, Cannabis sativa
tatgtaaacatatttttaatatagtgtaaaaagaggtaatttttgatattttctttaattaagtagctaaattaaacatataaattcaaatttttcttttgttactcgtcatcggatcaaaatttaatggtttaatgtttttaaaattaatatttataattaaatttgtttcgtacccatcaataggtaatacccattaaaaagtgttccatatatatatactagggtagatgttacctgcaatgcacgtataattagatttctttttaattaagtcaaattatgtgatgttaagtgtaatacatgtatatgtttaaactttttttaattagataatgtatttttttttaattaattttaaaatagagtttgatattttaatctttaagaaatttttttttagctattgctacatttgtgtgtcatttgaatgtgattatatatatacgtattttttaaatttttaaaaaccttttaattaggtaacttatttaataatacatatattgtaatttactgtattcgtaactaaaactcacataaccaaatttgagtttgtctatatataggttggattcgtaaatttgatagaaaagtgttttattccaaatttacgaaaaatatggtgtgtaaatcagtttaccattactaaaacagaaaacaaaatcaattttttattacaactatttcaatttaaaatataaaataaataa

SEQ ID NO: 146811 - DNA, 576 bp, Cannabis sativa
  modified_base (39)..(52): a, c, t, g, unknown or other
attttggtggttctcggatgcagtgaataaggtgtggtnnnnnnnnnnnnnngtatctctttcttaagctcatcaacaccaggaacataaactcaagctttatatagcaacactccactattcgagactgaaaagtctctaggccaaccagccattacctcgtctcgaaccttaactaactcgggatcttgtagttgtgcctttctgactctctctaacagatcagattgaagtgtcaaattgtgcaattttccaaccaaaaattatctcagaggctagttgaggggctatcaacaccttggtacaaacttgccctgggccctttctactcaaagcatcagccacaacattggccttcccggggtgatacagaatctcacaatcgtaatctttaacaaattccagccacctcccttgcctcatgttcaaatctttctgggtgagaaagtatttgagactcttatgatcagtatgaatcgcacatttttcgccgtagagataatgtcgccatatctttagagcaaaaaccacagcaggaagctctaggccatgagttggatagcactgctcataatc

SEQ ID NO: 146812 - DNA, 593 bp, Cannabis sativa
tagatttgtccctactcgatgtaaattatctatagaagatctttgattatttggattataaaaatagataattaatagcgtatctatatttggaacatgtagagcgtatgtaaagtcattctgaatctatagtgggagtaagagagttgtagttatctcggaaaataatatagtatttaattgggcatattttattgttcttgttgttaacacatagcaaacatcagatgtatacggccccactgtcggttgattaatttttgaggtcaacaatgtacattatgatttaaaatgacatagtttctcgtaaacttttatatttatatgaatctagtcattctattatattctgtctcattattccatttatatgttgacaagtctttgtaaattagctacttttctctcctaaactttgataactatcgaatcgaacctcctcaaaacgaaaatgaaaaaaaaattagtattttttagtaaattttaaaatgttaatttagatcttaaaaatcatttgaatcattaagaaaattaaaaaaagaaattaaattttaaaactaattatgcgaattaaatatgaattatttttacta

SEQ ID NO: 146813 - DNA, 975 bp, Cannabis sativa
  modified_base (300)..(302): a, c, t, g, unknown or other
ctctctctttctctctctctccaaacccctagaccagctagggtttgctggtttttgttgctcaattagggaattcagcaaggttgtagtgaacctaaggcaaggtaaagtatttaagcagctccctctttagctttcttgagtttcaagtttggaattttgcatgaatttgtagtttttgctgctgttgttgttgtagttgtttgttattgtttactgaggtttaattatgttagattatgtttaattaagcgtgatttagtggttgatagtaagtttagtcaagttttgagttttagnnntcaaacttggagctttaatggtgttttcaattctgagcttgggtagttattttattgcttgaaaatggtttactgggtataatatggaggtctggaaagtttgggtgagtttggaatcgtttttgtaaagctttgattttttttgggttttcaggggaaaaccaggtaaccggtttttgctgttgggattcctaaaaaatttagcttgttgatttgcgttagtttcaaatttctagttggttaattccctactagtttagggtatttccatattaagttgtagttgttaaggttttggtttaaacctaagtcccaattgtgatttagcgagtcacttattcgtattattattgatgtgatttgagagcctataattcgtcgagcagttgttccattcaggttgactggcacacctgaattcagaattcagataagattggtataatgtcatgcatatgttattacatgtttaggatacatgttgtttatttctattagattacatcgatagtagtaatagtatacttagagttgtactgattactgataaatgtatgttggctaaatactgatcgatgctgtcacatcaatatcctagagtattactagaatattgagtataggctgacattatggtcgatagtattgtcttatgaacgttctggactcagta

SEQ ID NO: 146814 - DNA, 530 bp, Cannabis sativa
aataggggtttctttgtagaattccgtaaaaatacaaaaaaaaaaaaaactgtttttaagtgtaaaaataataataaaaaaaaaaccccttaaaattattatattcaaaattaaattactaataattattaattaattttatgcaatttgttaataagtaaaaagaatttagcaattatttttttaatttaaataattgaaataattacaataaaattccttataatttaaatttattacacacatagcctaattctcctgcaggtgttggattcgtcatagtcttacacactgtgattgagactagacttgctatgtgtgggcatgtactctatcactatatggctcgaaaatttgaagagaaagagagagagaagagagaaggctcaaattttactgaaaggctaatgattcatcattttaaaattttagaaataaccacataaggtaaatatgtagaaaaatcaaattttcaaattcaatggctactaatatctaaaactaactttaattaattaaaaaattaataa

SEQ ID NO: 146815 - DNA, 641 bp, Cannabis sativa
accaccactgccaccaccacccattccaatctgttttaaggtatttcataatttttatttttcttaaataataatatttatatttttatctatgtttgttaaatgtatatatgtatatgaatatgtatgtatatttatatatgtatatatatgtatatatgtgtacgtatgtatgtatatgtatgtatgtatgtatatgtgtatatgtgtatatatatgtgtatgtatatttatgtgtatgtatgtatatgtatatgaaatactctactagtttaggcatgttaacgtgatttttaacttaattgtgcaactcgttattaatcaacgaatttatttaaaatcgtgaataattaaaactttatttaactaattataaataccaaaatagcatacttatgttaaaccggaatcccgtttacaaaaatatttataaaatatttacagtgcatatcacaaaagtttgtcatccaacgactatacaaaatgagcctcgttgtcccaaagaccgtacactccatgcctaaccaccccgacatgtacaatctctatatgctcaatcttacggctgctcaaccttagtcttgtccttacctacacatgcaaacaataactgtgagtcgacagactcagtaagaaaagca

SEQ ID NO: 146816 - DNA, 626 bp, Cannabis sativa
aacaatggagatcgaatatctctttgattaaagctcattatttaaaataatgtacttttaactaataatttattttaatttatatattttaataattaaaattacttaatttatgttggtccaatattaattcacattaattttcaactttaattttatttcgaaaatctaaatatatattatttcgaaattatataaaatataataaaataaatttctaaaaaatatctaatttaagttgttctaaaataactaaattttacacttaaataatttttcaaaatttaattaaacaacaaattaagtatcttgaactaatcaccttaattttttaaaaaagaatccatatttaagttgaactaaaattaacaaattttcaacttaaaaatatttttaaagaatatttgaataactaattttatagaaaatttcacttaattattaatttcaaaatattctaatttaagttgatcctaaatcaatttcaaaaatcaatttttaacttaaatgtatttttttatgaaaatttaaatgattaagtatctagaagaatctaattagttataactttttttatttaattaagaaaaatacatatattttatcttgaattaatttcattaaac

SEQ ID NO: 146817 - DNA, 1141 bp, Cannabis sativa
ctattgaaatgaaagaaaaattgaaaaaattaaaaattaggaaagaaccttattggagttgccacatcaaactctctaaaacactcatttatatatatatatctatatatatattgatactatgcctatactcatgtaaaataaattgattagtttattttgacatattaaaataaattttcattctttgcttacatagtagcctttccgtatagcctatactatcatatatggtaataaatctattagtttattttgacatattgaaacaagtttttattttttcttttcgtatattggaacaacaattcatttcatttcatatagcctaccatatatatgtcaataaacctactaatttctgtttgttggaacaacatttttttttcagtacagagtaaactataatcaaacataacaatatatgtcaataaatctattaatatacttcagataatatacaagtatatatatgaaataattttatctagtatacttcatagtaatatacaaataaaacgatataatatacatttcgtcactcatatattatataggtattttgaattttaaaaataagatatatttgttaactaataaaaattgtaaaatggtaactaatgagtatataatttgagatgtattttttttttcttccaaaatttatttgtatacatcttaataatgagttagttgtttttaggttatattatagcattttattatttcatatacatttgagtaacctattactttattttcaaaattaatgagtactgatgtagttgattatgatgtcgataagatatcaattggttaccttttataaaacgatctacttttaaatgaaaatatctcatatatgtaaccttcaatatttcgagtagttatttttaaaactatatattcatttttagattatattataattttttaagataattttacgttacttttatgaaaaatataaatatatacatttgctttactttgtcacaataaaataaaataagtcacatagtttattaacagtttttgtagggtctatttggaaacaactgtgtaattactatgtagtgtaattactagggtagtaattacagtgtatagtaattacattgtattttgaaatacaaggtgt

SEQ ID NO: 146818 - DNA, 589 bp, Cannabis sativa
  modified_base (523)..(524): a, c, t, g, unknown or other
atagtatatcattgataagaaggattataaatcatttgctcatgacgtcattttacattcttctatgtaatttaatggcactgatgactatattccagaaattctatctcgaaatgatataaatcttcgatcttagagaatctcctactcgtatatgcttactataggaaatttaaatttagagttagattgatagtggtggtccaagaaggaatatataactgctcaataaatatttggtataaatttaagtctatgactttaaattttagattccaaatagaaatttaatttttaatttccaagaatgcattgaacattacaatacgacttttacaagttgttaatatcaattttctagcaatggatccgaactgtatgttaatgtatggaatatgagttttgtatattctgtgaccagaacccacttggactattctaagaagtctttgttgtaactagatataggtcatcataagaacacaaccacataacatatatctatgacatttgtatcttgttnntagtggttttgacaagatcattatttgtaaagagaaaatatgcctatatccacttgaaagtagga

SEQ ID NO: 146819 - DNA, 692 bp, Cannabis sativa
cagccatttggatccggttaaaaatgaagccactgactccggcgaatagtaactgaagcgagggaggttaagcatgcaattcatctcaagagattctcccttcaccgatttcaatgcctccggctgaaaagcctcgttggagttgcaccgtcggcggggaggctattgcaccgtcttgggggttctgtcgagaagaagaagaagtgttagggggttctgttgagaggaagaagaagaagaatggcagaagaagaacaacaagggttaggggagggagggttctgtcgaaaagaaagagatagagaaagagaaagaaaaagagaaaaaaaaaagaaaaaaaagattttttttttaatttttataaattgtttttttaaaatttttaaattaattttagtatatttaaaattaaaattacgtggaccactaaaaattttccatgtgtacaagtatgtacacgtggacagtccaccgtggcacttaactgtgatttttggacagaggtgtgcagagcaaaacgaaactagagtttaggtagttatgccaccaaaatttatgtttttgtggttaactgttacaaaatcgtacagttcaggtggtttagccgccaatatccctaataaatattataattctataaataaattaggctaattaggatttttcccctagaattttgacatgtaccaaat

SEQ ID NO: 146820 - DNA, 713 bp, Cannabis sativa
gatgatactgagatccaaaacctctgcgctgctcttggactcatgcaaggttataccaacaccctacatcatgatcaggaaaagctccgcgctgcggtaaatctcgcgttcgaagaacaaagacgcatgtttgtcaagtggagagacaaagagatggaagcgttaagggctcattatactgagattgaaaatcgtaaacggcaagccactgtgctgatatgaaaagcctaccaaactgtcggacagcaacctccgaatgtcatccccctgggtgagacggatgaagatccagcgatgaatacttcccaaactataaatggtcagtcgccaaatccccggtcacaagttctgcttgtgggcctagcggtaggcgggcagaccttgtctagtaattcattaggagagctcatacctgatagttccaaccaggttaacggtgccatttcacttgtcaaccaagcaaatcaattgctgagacagccaagcgcttcaatattcgataggttggggacaactcatgacctaaggagcgatctgaaaagaaggagaggagtggacgatcagattgtcacgacgatcgtacagcccggagctcgtgctcaaattctcgctcagaaagatactgatgtgatacaaatcgaccaaatgccgagcaggttagtcaagctatgcaggcacagctagacgagctaaaaaatatgttccaaggcatg

SEQ ID NO: 146821 - DNA, 648 bp, Cannabis sativa
  modified_base (89)..(110): a, c, t, g, unknown or other
agctaattaataatatttaaaattatttattcaaaaaaaaaatatttaaaattaaatataaataaaaaaaaatattaattatgtttaannnnnnnnnnnnnnnnnnnnnntttttttttttttttgtgtggatttgtatatataattggtgagtgagcatgttattagccttattttgaagaagagaccattctcataaattgatatatctatctatgttttgtacattagtatcttaattatggtcaagtcaattaaaaagggaaagtacattagtcgtgaatgtggctatgtgtaatatcatggtcatacgtcttacctaaaatctttttggtttgtttgaacaaaattaaaaaaaataatcaaatataataaattagttcattaaaataataaaaatacatttactaatatattattttttaaaaaatatatacaataattaaattaaattatatattttttttaatattacatattattatattgtaacaaaaataaagagatatattatatcattacatatatacaatagtataatatatcgtatcactaaaaattaatacaccatattaataaaattatatactataaagaaattataataatactaaattaatactcaaaatatatatcatgctaataaaa

SEQ ID NO: 146822 - DNA, 575 bp, Cannabis sativa
ttgctaacaatgtgccctagaaaggacacctgagataaccaaaattcacacttcttgaatttcgcataaatcttgtgttctcgaagccgctgtagaaccattcggagatgtaagtgatgctcctctttcgattgagaatatacaagaatgtcgtcgataaacacaataacaaagatatcgaggaaatccttgaataccctattcatcagatccatgaaagttgcgggagcattggttagtccaaatgacataaccaaaaattcataatgtccatacctagtatagaaagtcatctttgggatgtcctcctctcggattctcaactgatgatagcacgatcggagatcaatctttgaaaagaccttcttccgctgaagttgatcaaaaagatcatcgatcctaggtaaaggatatttattcttgattgttagcttattcaattcccagtagtcaatgcacatccctaaatacccatctttcttcttgacaaacagtaccggagctccccagggtgacacactaggccgagaaaaccctatgtcaagcaaccactgaagttgaattttcagttcttt

SEQ ID NO: 146823 - DNA, 761 bp, Cannabis sativa
acacagccacctactgtgggccatggtgtgacttcccctctggttgggatcacacgatgcgtgcaagagacttggaacacaagttcaacagtcgatcaatccactcccaacatcaaagtcccatcccactaatgctcagaggacagtcagagaggatactgagattcaaaacctccgaacaacccttggacttatgcaagatcataataacgctttgcaccatgatcaggaggacctccgtgtcgatataaactttacattcgacgagaagaaatgttagtttatagaatggagggacaagaagatagaaactttaagggctcaacaagcagccattgatgatcgtacgaggcaagccaccgtactgataagaagggcttaccaagtcgttaatcaatagccagctaccgcgtctagtatccctctgagtgttactgaagagtatgatgttgggcatactgcccaaactcgtaatggtcaaccgtccaatccacggccacaggtccaacctttgggccaaacggtagacggccagatccttcctaaccgccctttgggtagagttacacctaacaacttcatcccgactgaaatctctggccagcctaccggccaaacaagttaggcattgagaccacctgatacctcagtatttaatagattgggtgctgcacatgacctcaggactgacctaaatagaagaaagggtatggatgaacaatacgttgttgggttttgtgccctaaataaaaccctttaca

SEQ ID NO: 146824 - DNA, 526 bp, Cannabis sativa
  modified_base (58)..(62): a, c, t, g, unknown or other
agtgatacgctaaatcacttctcggggacttaaactcgaaactaaaagtttccctatnnnnnaacaacatggcaataccctaaataacacaaacaacacccacagctaccaaatcctcaagcatgcaaaatttctcaactcttaaacttcaagaaaacaaagaacaagttacaaaaagcttaccaagaacttgagcttactaaaaccttgagaaaacagcttgaattacaaaggaaaacaccaaatccctgctgctcaaagaggggccgaaagagagagagctttaaagaaaatggttttgcttcttttcttttattttttttccaattttgtaaaatgaaagataaaattgtttttgttacattacttcagccaaaaacaattaaatatatcaacaaaaattcatttaattgactcacataaacacaaaacaccaaaaggtgcaaaaagaccaaaatacccttgcccacaccaaactaatttaaagggtactaatggtattttgggaaaactctgaattcccgac

SEQ ID NO: 146825 - DNA, 962 bp, Cannabis sativa
tgtgtagacatgtcgacaatctttaagttattggttattcggaatcaaattttagtagttgtgtagatgatttaaagtcaacttctcactatatttttactttggttggtgcaactatttcttaaaaaattattaaatagactttaatcacatcatctaatgtgtatgttgagtttttcgcatgttatggggcatctctgcaagttttgtggttaaagaatttgattttagagatacgactggtttattctatttcatcttctatactaatctattgtgataatagtactgttgctttcttttcaacgaataatgagattagtagtgcttccaatacaaatggaagtaaagtatctcattgttagatacttggtcaatgagatattgtgatagaatattgcaagacaaagtcgattttcgcagatcctctaaccaaaggattaagtgtcatgctgtataataaatatgttgttgatataagcagttcttttgggttagtaggagtttcttgttctatcatttaagattatatttatgtgtaatttacttgttaatgttatgaattacttggtttgttttgtgggccaataattttttattattagatgtttatacttttaattatgttgttatattctcgagaatgactgaattgaaagcatatatatttcatatcttgttgtgattattgttttttaagtttatttgcttaaggacaataatattttgttggcttaattttttaatcatatttagtgacactgacttatttattaagtagtgtataataaatttcactggcttatttattaagcatcacataatcagtgaaattgaggactgataagaatattatgttattttaaattgatcgcatgttgaacataatatcttaccaccatactagacttattgatcatgtcgatttaatactttggtatttgtgattatgaatgtctttt

SEQ ID NO: 146826 - DNA, 1228 bp, Cannabis sativa
tacctataattaaaattaatataattatacaccactccataaaaaatgtatatattttttatgtattcaaatcattacttaggtaattaatacaaaatgaaaattggacaaagtaatgtctatactattgtttgagacaataatttatgtatatatatatatatgaattgcattgaaataatacatcaacaattaaaaaataacttaaaacgtgaggtcaagtatcgatctaaattaactctcccaacaagaacgtaacaaacacctaagactaacattatttttttgttatagtgagatttttctcacctataaactcgagacccgactcctacttaaaagacacgtgtactcactttccccgaggaaagcaaagatgtcaatgagagacccctcaagtacgtacctcgcgtgaaccagactcagcgagatgatgcgaatacgaccaagtctaatcgcattcatacgactcgcactatgcatgaccaatgaacggttttaacccacatatatcaggatatatgcgagtatcccaacgatcctcctaccaaaacatagagatcgattctctatgttgcgagctggtctcgatgacccaacaaccttgataaaccgatatggactcgcatgtcttggttctatcagttcattacaagatgtccatataagcgactccaggaggacggagacatcctagacttgattagtctcgaacgcatccaaggcctacgagctcatgcgagaatatgaacagccagctcgcactataaaagtgcatacgttgttgtatttagtgaattaagctagaaactgttcttcatttactgttcttcatttattatgtttaggttgtttagtttaattattgtaattcaatgtgtaaacggattgataattaatgcaatccttgtgtaaatggcctttatataaaggagtgatccgccgtgaaatgaacaagacagaatccttgcaacagtggactaagcagaccgagatctgactgaaccatcatactccctttgtgttcattatttttctactcttttgctaagtatttttgttcttgatttgaatactcgccattctgggtcgagtactcgcactcgttatacatataatattattattgtttattttttggtgttgtaaaatttcttcaacaatatttggcgccgtctgtgggaacactaatactttgctgatttagaaggagaatcacaatggctgg

SEQ ID NO: 146827 - DNA, 819 bp, Cannabis sativa
tacactagcatagttggaagcatcatgtatcttatggtctgtacaagaccagatctatgctataatgtaagtagagtgagcaagttcatgggaaaacctggcgtagaacattggaatgctacaaaatggatactcaggtatctcaggggcactatggatgttggtctcatctatagtaaaggcagtaagcataccaatgttgttggatatgtagactcggattatgctggtgacttggatacaagaaagtctcaaacagggtatgtatttcgctaaatcaatgtacaattagttggaaatctaatctccaatctgttgtggcattgtccacaactgaggctgaatatatagcctgcacagaagctgtaaaagaggcttttggcttaagggtatcaccagagaaatgggaatagatcaaagaagtatacaggtcctgtgtgatagtcaaagagccttgcacttaagcaaaaactaggtattccatgagaggaccaaacacatcgatgtaaggttacatttcattcgagacatacttgctagtgacagggttaagttgatcaaagtgtctactgatgataatgctgcagatatgctgactaagtccttgtctacaacaaaatttgatcactgcttgaaacatttaaacatcgacagcaagatgtgtacctagtaacttgtaattacaaagacaaggtggagaattgttttatagtgtgtcttagtcattaggcgtcacttactatttttgtccttgtcagttagttaacaaaccgttaactaactatatttggtaagctcgggtgtatccttatgttttgt

SEQ ID NO: 146828 - DNA, 576 bp, Cannabis sativa
atacaactaacaaataaactaaaataaataaataaactacttgcttcttttttttgtttactaaaagagtaaagaagagaaaaaaaaatatatatatagtgatttttttgaatttatatatatatatagaaaaaaaaaaactaaattctactatactaattaaaaaacttcttcttttttttgatataaacaaataaagaaaagacaaaaaaacagtaataaaaaaaactactatactaacctcttgtagcgcagaaacctccccagtaacggcgccaagaattgatgtcgcccaattaattacactgcggtcgcagtagtaaacgggctatatgtcgtattcacagggaggaaaatacactcaaaaggatagttagtaattttacgaaaataaggatcttgaatgtgatgagaatattgagaaaatcatttttgaaaattaaagaagtaattaaaatgagaagtgctcagaaaataattatggaacacacaagcttcgtacatgcaattatattttcctaataaaattaattctttaaactcaactataattctacaccattaattatagttgga

SEQ ID NO: 146829 - DNA, 562 bp, Cannabis sativa
agatcaaaacccaaacagagacctaaacccgaaccgagagtaggagttcaacccgaacctagaccgagacccaaacccacataataaccgagaccttcacccagaatcaggataaggacctgggaaacggaactatgaccaggaccaagtacccgacccagactcgaacttgaatctatgacccagcttgtgactcggcacgagaaatggaaccagagtgcgatctgagattgggattaggatctcgaccaggggcttggacaaaacccgtaatcgatggttggatttgggagctagccctagacccgaaccctaacaaggaccgaacccacaccaagacttgaacccagtgccaaacctaaaagtggacccgaacccaaacccgtaccctgtgacccaaaattgaaaccaaaacaggaagttcaccgggacaggaactaggacttggacttggaatcataattgaaattggacatagatccagaaccgtaaccagaccaagtcccgaaatccaaattagacctagacccgaattggtagccggacccggatcccaacccaa

SEQ ID NO: 146830 - DNA, 652 bp, Cannabis sativa
gattacctggatagatgtgtgatcgtgtttatcgatgacatcttggggtatttgaatcagaagaagagcatgagttgtaccttagatctgttttgcaatggttacgtgaccacaagttgtatgctaaattcaaaaagtgtgaattttggttgtctcgtgtctctttcttggggcgcatagtagataaggatgggatcatggtggatccgaccaagattgaagctgttcgagattggccaacaccaaaatcagccactgatgttagaagctttctgggtttagctgggtattatcgtcggttcattgagggtttttcaaagattgttgtacccttgacggagctgacccgaaagaacttgaagtttgttttgactgatcgatgtgacaaaagttttctggagttaaagcagcgcttgattaccgctccagtgctaactcttcctttggataaggaaaagtttgttgtttactgtgatgcctcgagacagggtctcggctgtgttcttatgcaagttggaaaggtaatagcctatgcttctcgacagttaaaggagtacgaacaacggtaccctactcacgacttagaactcgcggcagtagtatttgcgctaaagatttggcagcattacttatatggcgagaaatgtgagat

SEQ ID NO: 146831 - DNA, 951 bp, Cannabis sativa
ctatcaatacaattacatttgcttttatacaatcaaatcattagtatccatgctttatcttcatctttagttttcttaggaatcatccctttaattcgaaatttactcatatgctgagcttttttgactgtgttgctaatgaggcatttttgttgattccataacatctcattccttgctttccacacataatacaccaagcttgcaagtacagtcttcaccatactcttcctagctgctgagaatttcttcgtgttatggcaagcttgcagtagctgctgtatgttcttggctggtgtgttccattgcaggaacgttttcacttcttgcaggcaggtctgactatactcacactcaaaaaacagatgtgcaattgtttcctcttctctgctacatagcagacattttgtatctatggacggcatgaacttgctgagtctttctcttgtattcaatctcccccaaaagactagccaaagaatgaacctatgctttggaacaacaagtctatcccaaaccaggttattccatggcaatttttcccattcagcaaatattagatggtacccctgctgtatattgtatttttgcataacaaaaccagctattgaaatcttttgctgaaacttactcttgacagccacaatttttttccaagcccagctacaatctagtggagcatcatagctccaccaatcttgttccttgatatagacattatgcatccatttaacaaaaagacaatcttttttactagctatatcccacacatacctccccaaggctgcaatgttccaatgatgtacatttcggaatcctaatccccctgctgccttgggcttgcaaattgattcctaagccactagaccaggtccagccccttcatgaatgcctttccagagaaaagatctgcatattgcttcaatatctttcaacaatttctttggcaaa

SEQ ID NO: 146832 - DNA, 1189 bp, Cannabis sativa
ttgagtttttaagctattagttgagttatagcatgtcaattttagttttaggtgctgtttgagttagggtttgatttaaatctatttctagtttatatttgagttgaatttgatttggttgtgttggtttaaggtgtggcaaatttcgtttctattagtttttgctaaactattgctaagtggttttataggtattctagaaagtttggttgagtttgggaatgatttgagaaagatatgaagttttttagggttttctacaggaaatcggttaactgattctgctagtaatatagaatcggttaaccgtttcaccaggcaggatcctaggaacttgttttccatttgggaaattcggtttaccgatttgggcaatttttagagccttagttttgatgtttccttaatatttagggtattgccatgctatttatcgatatttaaacttctagttttgagtttaggtctctagaaagggttttagcaaattgtttacccatttatgtgattgtgacatagggcctccattcaatgcgtgattttccagtcaggttgaccaacacacttgaatttggaagcgatgtaagattagcatagaatatatatatctgtatgtgtattatatgcatggtgatattgtgattcatatactaccaacattagtacgatagtggtattgagtgtattggtacatcatatgatgttcaaatggtacaatttagtgttaccaacactagtacgattaagtacgtactgcatgtggtataacactcagtagtacttggggtattgtaataccctaagattaaggaaagggattagtaaaaccctagttagttaattgagtattattgtgaaattatattattatataatttattttgtgtgaattaatatgagatatgacatgttaagaccccattggtgagctaggggcattttaataattttgacccgagatgggtaaaataataaaattaatttatttacgtgcttatggactatattattatatagtatgcttgtgttgtccttttcaggtgtgttttgacaagttggcgcggtatagttgttgggattttatgcctaaaataaaacccattacaatctaatctgatttgttatcaatagaagaatagaagtgtaagaccgcttagcttaatttggaaattagcagttaatcacgttt

SEQ ID NO: 146833 - DNA, 765 bp, Cannabis sativa
ctctgaatttaccaaaaacaaatctcacaattaaacacaaatcatgactttaactcataaaatccaaagctcttgaacttgagcttaaaaccaacttattgccaatattttacaggagccacatacccaaaataataaggatttcaaccaagagaaaaccctaaaatctcagccacaacttaacaattaaaacctacaacaatttcaagttatccacacccaatttaccaagatcaaacatcaaactcaacaacatgcataatcaagaacaccacacccttttcatgatcttcttacaattaaattcagttaataaacaaagattaaaccaaagaaagttacctcaaatctcaattcaaggctaaagtcaaacaatctccaagtaccaagctccaagcctagcaaaatcacaccaattttctccaaagttcaaaattgagaagaagtgggtttagagccagagaggggtcgggtgagaggggaagcaaacaagaatttcctaatttcatttcataaaattccattttccatccaagtaaatcaaataaggtcaaaagaccaaaatgcccctagggccaattctcacatattcacacatacaagggtaaattagtcatttcatgcttattaatttccaaataaaattcagattcctcattatcaaataaaatgccaattaattcaattataattgcatttcgggcctgaacccggttcagcccgaaatatccgattgtgactataccgcgccaacctatcagaaca

SEQ ID NO: 146834 - DNA, 1216 bp, Cannabis sativa
cttttcaatggaagaggagataaatcaagattttaaaaatacaagggtaagacattttgtataaaagctattcatggatgagcatgatgataaatattatgtgatttactattttatacgatagtaatatatatttatgatatatatattgacgcggtttttcataaaaatatagaggattgcgatgaattaattttgactaataaaatcgcaataaataaattagacaccaaagatttatagtagttcacctccatatcacaatggtaatgggactgcgtctatttttatttttattgattggacccgacacactagatttatgttctcaagagtatgtggataaaaatacagtaaatgatttttaggtaaaatcttaatcgagacttatgaacacaagactcatgggagactcaacattcataataaatctaataataaactaataaagtataaaaacaaggaatgtgcatcaatggcgtttgaggtcttggtgtcgactgagtatggtggactcaaatgaaaaagatgaaagaataagtatggtgtccttggccaccgtcaagttaggttttaagagaaggtttagaggaaagtaaaaaagaaggtcaaaaagagggtccctatttcagcctcttacttctccttatatacgttgtagggtttgttagtgatcccccacatgtcggggtgtctcactaacaaatctcgtatatcatctttttttaatgaataaaaaattacaagaaaaaaatgtacattacaaaaatgaataaaagctatatttataccttaatggacgttgaggttcaacgttttctcaacacaaatatcggtgtggcgctgggagttatacccaccactattttctaataggttcggttgacactgaaataggaaaaaaaaattgaaagtgtatggatttaggtatcaaaaatagaagatttaaaaaataaataggctcaaatggtgcaaaaataggggagatatatgggctggaataagggtggttggcgaaggtggcgagggtttgggtatgtctctactgttggtgtttggtttcgtgaggaagacgaagtgaagaagacaaagctgatagggtttttatattataccttataacgtcggttattaggaaataaccgatgggatagactattcaaatcaccctcagaaatatctctctcccaaccgactttaaatggtatagtctaat

SEQ ID NO: 146835 - DNA, 558 bp, Cannabis sativa
  modified_base (57)..(69): a, c, t, g, unknown or other
  modified_base (523)..(532): a, c, t, g, unknown or other
aaaagaggtaaaaatgatagattttaaaaaagaaagtaaaaataaaagaggacaatnnnnnnnnnnnnnagagtgtaatttcctcttaaaaataagagtacaataagaaaagaaatgggtcacgtagggctgtgttggtgcttagaaaaccatatatgtatatatgtgctttttcataaataaaaaggaaaatatggaggcgctatagtggagctcgaggaatgtcgagaaaaaaaaaagagtaatttgcggtataaatatttaaatttaatttttagttgcaaataaatacttaaatttaattttttgcgataataatttctaagttatatttttggaactctgtaggttcctaattattaaattttatgtcattatccacgtgttattttcttattaggatatttaaattattttctttaaaaaaaattaaaaatttgataacttgtcccaattagaaattgacacgtgacaatttacttaatatttagagtaatttgcggcaaaaatacctaagttttannnnnnnnnngcggttcagcaggaatgccgagaccg

SEQ ID NO: 146836 - DNA, 561 bp, Cannabis sativa
atagttcatgggcatttttaacgatcttaaaagttcatggagcatgatttggtacatgtcaaagttcaggggacaaaaatcctaattagcctaattaaaattaaactcgccaaaaacattaaccagaaaaaacaataacataaatatgaaccttcagagataagatgtgaaactaactatttaataatgttgaagactatttcctaatttaccagaagactataatttttgtgttctgattagagcgaatataattttacaatgtgacatcaaatttaacgaactccttaaagatgttctagcgtgcaaatccccataaaaacaaataatattgtgcgtgcaagtgtaacatagtttcatagatattattaattattcttcatatttatataagtatcgaccaataaaacacacgaaattaatttatttgaggtagagagttgcatccacgcatatttatataattattgaaatgtaaagataatcttctagttctagtcctcatcatgatctggagatgggtttgggaaaccactaacagtaaatccaccatcaacgtaa

SEQ ID NO: 146837 - DNA, 706 bp, Cannabis sativa
tctaggttgaatactcgcatctgttcttcaagcaattttcttcttgtcattaatattattacatatatttggtgttgtcaaattttactcgacaacaaaacttatattgcgagacacatacctgcctcggagtacacatccaaagaagatatttcattaaaggagtgaatacagccgtacaaattgcaacctcagattaagaatagacagacagctacctcgcaattctaggtaatgaaacttgacgaggcgaactatctgctaacacttagcgtttattccacattataatagacaaggataataactttgaattaagcgagatacaattgtccaaatcagcattaaccatctataaggataagaataaaaagcagttaagcagtaattctgtattatcccacattcgtttaaataaaacgtgggaattgtccacgttttatgatcggttacattttaaataaatcccaacggtaaataactaccaacctatattcctgtatgttgcccctgatttcgcccaatatacgtggaccaatcggacagggacacgtggatcagataatttataaatatttgctaagtctttgtatgccactaggaaatatcctgggcttaggtcccggaggaggtacccggagtacaaggtgctcccggaagctcgcatagcataaagcctcttcgtgaggtgtcaggcttctcctga

SEQ ID NO: 146838 - DNA, 875 bp, Cannabis sativa
  modified_base (455)..(465): a, c, t, g, unknown or other
  modified_base (616)..(623): a, c, t, g, unknown or other
ttttttttttttcatacacgtccaccatctagaagatctaatgttattgatttgattcacactgatgtcgtactatgcaaactagaactcttaaaggtgcactttattttgttatttttatcgatgaccattctaaaaaagtttgggttttttgctttaaaatctaaagaccatgtgctagatgttttcaaagaacttcatgccaaaattgaaagagaaactggaagaaagttgaagtgtgttcgagtagataatggtggtgagtataggggtccatttgagttgtacatccaaagataacaacttagattagtgtttacaagatgaaacaatataaaataagaataactttgactcgggacatcgttggattcttatttaatcgaaattatcctttagttttttctcttagctttttcattttgaattggcttaaatagtatatcattggatgnnnnnnnnnnnaatcatctgcttatgatgtcattctaatttctcttatgaaattgaatggcgatgtgactatatatattcccaaaatatgatataaaattctcgatcttaaaatctcctacttgtatatgcttactagaggcaacttaaacttagagttagnnnnnnnntggtggtccaagctagaataataactcaagaattatttggtataaatttaagtctttgaatttaaattttagactccaaatagaaattttaaatttcaatttcctagaatacattggacaatacagtatgactttgacaagttcaatttccattttctgtcaatggaaccaaactgtatgtttatgtatggaaaatgagttttgtattctgtgatcagtatccacttggactattttaagaactctttattg

SEQ ID NO: 146839 - DNA, 2185 bp, Cannabis sativa
  modified_base (1450)..(1453): a, c, t, g, unknown or other
agcaaccagtcactaagacaacctggtgtttcagtattcaacagattgggtgcagcccatgatctcaaggatgatttgaataaaaagaggggtctgaacgaacaatatgttcaaccggccactcagcttggtatccgcatctaggacccaactctaagagatcttaatgtgacacaggtcagccaagaggctgaagtagttcacccatctgtgcaagcacaattggatgaattgaaaaatatgttccaaggcctggctggccaaaaactcactgatctcgagttggaccgagcacacagatcaccttcactccaaagatcaacgttctggagctacccctcaagttcaaaatgctgacttggaagatgtacatagggaaggaggatcccttgtcacatcttaagtattatgaaatgcaaatggatttggaaggggtacgaggagatgtgcggtgtagagtattccctgctacgcttttagaagccgcacaacagtggtatttcaagttaccaccaggaaggtttaagtcctagaaagccttctcctcagagttccatgcatagttctcttcttctcgccaactcctattacatttagaagacttggtcgaagtgaagcaaagatcaggagagcttctccgagcctatataagcaaattcatgacagaagctacgaaagtagcacggttagctaaagaaaggaggctggccgcaatactggggggcattgaggtacttggagaattgtggaaagacatcaagaaaagtggccccgtagactctatggcggattttctagaccgagcagatgggtttatcaagcttgaagaggcaattcaatgggcaaacgtcgagcctaagccgggccaatcacaggtcccctcggaaggatcatctattcagaatccccattaccttagcagttcaaatccgagcggcaaaagatctaataacaacggtagacaaggcaatggaaagaagggaaagttcgcaggcaaagccgaacaaacccctagagaaaatccttccaagttcattgctttctctgtcttaactgacgacctggagacaatctacatggcaacccagtctgtggtcccgtacaaaaaacctgctcccatgaaaaaggacataagcaagcggaacatgtccaaaattttgccgttttcatggagactatgaccatgacactaatgagtgcaacaacctgaagcgggaaattgaattcttgataaggaaaaataaccagcacgtgtagaagtatgtcaaggtcgaccaaaatcaacaggccgcctaagcagacaacaaccaagatctattaatgcctccaacggtggacggacatttacaagtcatcatcgagggcgcacatattgttgaagatttgggcaaagctcgagagtggtatgcttgaactttacaacaggaacaaaaggaagtagttctggccnnnnaagaaaggaagccaaaaatgccacgggtaggggaaccccttataaccttcacttaagaagatgtatccatgttcgcttcccgcacaacgatccattagtcgtggaagtacagatagaaaacaaaacagtggcccggactatgatagacaatggagcctcaccgaacattttgttcaaaacaccatatgaaaagatggggctccaactcaaaaagctgaccccctgtacccaaccggtgtatggttcctctggccagagtgttgcacctttagggaaaatttgtctacccctcactgttggacaagctccgaggagaataactgtgatggcacaattttggataattaatgttccatcagcctttaatgttatgttaggatgaccagccttatatgacctaaaggctgttacatcaattttccatttgtgcaccaagttcccaacaaagaacggggtagggtgccgaaaaggaaaccaacaagttgcacaaaaatatcacaaccttgccctctccaagaccaaaaaggaagaattctctagccagagtttggacagggggaaaagcattgccaaatagggagtcgcccaaggcggggacgaagatgtggacccccaacttggggaaccgaatacaaatgttgggccattggaagaattggaggagatagaaaccgacccaaatgtccagaccaggaaacttaaaattggaaaaggtttgctgcttgaagtaaa

SEQ ID NO: 146840 - DNA, 1233 bp, Cannabis sativa
  modified_base (703)..(706): a, c, t, g, unknown or other
gacaagatcattctttataaagagtaatatgcctgtatccacttgaaagtaagatcatctatattcgaatatggatgtacattcaggggtggatatgagttgtaacaccctaactaatacaggggtgttagcgtaatttttaatgtactgtgcagctcgttgacaatcaacgagattattgaaaatcgtaaataattaaaattttgcttatttaattaaaaataaaatgcaatacatttataaaatcctgggatctcgtttacaaaatagagttacaaaagtttactattcatatacaaaagatttgttgcctagtgattaaacggcaaaagccctgatgtctcgaggatcgtacgctacaggcttaaccgtcccgacatgtacaatcttcacctgctcactctcacggctcctcaactttagctttgcccttacctacacatagaaatagcactgtgagtcgacagactcagtaaaaaaagcataaacaataacatagcaataacccggattatgatcggatgcccatacccccaatcataatcctatccccgtgacccacacggtactgagtctagaacattcgtatgactgtattattgaccataatatcagtctatactcggtacgctagtcatactccagctgtaccaatgtgatactgtcaagtagtacggtgctatcgaccataatatcagcctannnncggtacgctagtcatactctaggcgtaccgatgtgacactggcagatagtacaaaagccaacatacatatctaatgtaaactaacaggcttactaacatgcacactaaacatgtaaatacatatgcatactgatatactaatcttaccttgtttccaaattcaggtgtgctggccaacctgattggaacaactgctcggcgaattatagattcctaaatcacatcaatcataacatagctaagtgatatgctagatcacttttcggggacttaaatttgaaactgaaagttcccctatcgataaataacatggcaataacctaaatatcacaaaaataggaaaaactagggttcccaaaactgccccaaccagtagaccggttcccaatcggaattccggttcagtgcaggaaagacataaaaatacataactccctcaaatcaaccccaattcaaaccaaaccttccagacctgttctatacatcccaaagaacatattcatggcaataaaacacaactacatgca

SEQ ID NO: 146841 - DNA, 519 bp, Cannabis sativa
  modified_base (149)..(155): a, c, t, g, unknown or other
  modified_base (473)..(494): a, c, t, g, unknown or other
acatatctaatgtaatctaacaggcttaactaacatgcacactaaacatgtatatacatatgcatactgttatactaatcttaacttgttttcgaatttaggtttgccggccaacctgagtggaacaactgctcagcgaattacaggcnnnnnnntcacatcaatcataacataggtaagtgtgctataaaaaaaaaaacatagacaagtgacacgctaaatcacttttcggggacttacttgaaactaaaagttttcctagtgataaacaacatggcaataccctaaacatcacaaaaatgggaaaaaaaaactagggttcccaaaactaccccaactggtagaccgattcctcaaccgaaattccggttctgtggggtttcctggggaccaaccggaattccagctcagtgcagaattcacacaaaaattcataactcactcaaaacaaccccaaatcaaaccaaaccttnnnnnnnnnnnnnnnnnnnnnnaatagacataatccaagcaataaaa

SEQ ID NO: 146842 - DNA, 716 bp, Cannabis sativa
caggtgtttgagagtatccctttgaaataatttgatctctctcaataaagctctcattcttctttgtgtatcattctcaccaatttgatctctctctttctattagttgtaatgttttctatttatagcagtaggttagttaggacacacactaatcgaaataactgccaactgtcaaggtagttagttagttgtttaagtgttctaaaccccacaattttcacatggtttagtacactttaacaacatggtaatccaagccataatagtaaccaatagaactgaatccaatgtccaatgaatgtgaatttcaatatgagactctagtttgagttgatgttgagaaagtcaagacaaagtctaaagttgtctttagtcaaactctttgtaaaagcatcagcagggttatcatgagtattgatcttccttacggagactatttgggattgaatcacatctctaataaagtgcatcttgatgtcaatatgtttagtcctctcatgaaacatgggacttttcatgagatgtagtgcactttaattatcacagtgcacagttacatcctttgagttaatgttgagctcacatgtcaatcccttgagccaaattgcttctttaatgccctctgttgcagctatgcattctgcctctatagaagatagtgcaacaaccttctgtaggttagatttccaactaacacagcccccatagacagt

SEQ ID NO: 146843 - DNA, 548 bp, Cannabis sativa
tcaaaccaccattcacaagggataatacttaccgtcaagaatcacttgtgaggatcgcccataacgacaacgacctttcctttgtttggattgatcgaaagctcctcagtcttggaatccttctttcccaattcaagttgaggtttgaagttcctgggaacgtatagagaagagaggtagttggcaaattttggtgttatgaatttagaggaacaaatttctaaactcagatggggcatcttaacgagagaatgacaattcaatctcaagataaaactaaacaaaaacccaaaattgtgtggaatatagcaagcttaagccaccattttcatactcaaagtctagtgacaagaagtccaaaggttgggaaatataacagttgggggtggggcagaagatgaaaagacggttcataatgaccctcgaaatcatacaacccctagaatcaaaggatgcatttttccaaaggggattatgatgaaaatgccctctgtaattattaaaaaacactttttattaaaaacggactttttaaggggcaattgtta

SEQ ID NO: 146844 - DNA, 807 bp, Cannabis sativa
  modified_base (650)..(652): a, c, t, g, unknown or other
taggggcatgtgttatagtgagaatttctcacctagaaactcaagactaggctcctataaaaatgacatgtggactcactctcctcgaggagggcttagatgtcagcaagagacctcttgagtgaaaacctcgcctgaaccagactcaacaagatgatgtgaccttgacagagtctagtcacgttcgtatagttcacacgaagtaggaccgaagattggttcaagagtcccatataccgagatatatgcgaggactaaaaggatcttcctgcgaggttgtaaagatcaattcttgactctgcaagttggtctggatgacccaacagccttgacaacccgataaggactcacatgtcttaagttgtcgacttattgcaggatgtctgtatatgagactcaaacaggacgcacacatctcatactcgactggtcttccacgcatcttaagcatgcaagcttatgcgagaatatgaacagacaactcatactatagaagtcgcatacgttgttgtatttagtgaattaggtcgaaactgttcttcatttattgtatttacattttttattgatttaaatgttatattcaatgtacaaacgaattgataatgaattcaatctctgtgtaatcaaaggacacttgctttgtatannnaggagtgatccaacatgaaatggataagacagaaaaacacatgcaatagtggactaaatagaccatgatctgactgaaccactatatttcttttgtgctctttatatttccagtacgtctgtgtatccatactttgaatactcaccattctaggt

SEQ ID NO: 146845 - DNA, 861 bp, Cannabis sativa
gcatcttaacattttcctgtgctttttgttcctccacaattattgtttggtcctaacaatcaaagcaattcttgtaaattttaatatttaataaaattatattgtctgtatatacaacaagccatagaaacgatatacctttgaagaatatgaatatactccaaacttaatataatattattaatattattaatattacttattccttaatatatcctatgacagaataaatatatactatagtataaaataaatataccaaaaaacctgaatcataatatacacaaatagtttaaatgttcatttttatacctgcatttcatcaatctcttgtattttttgttcttaaaacaaagaaatcatagtaattttttatacgtaaattaaattgtttgtatatacgataatccattgaaaagatatacctctgagctatataaatataccaaaatcttaatctaatattatagtaccaggagtttattctttatttcctattccttaatatatcataccacagaataaatatattccatagtttaaaataaatataccaaaaacttaaatcataatatacacaaataatttaaatatttatattttatacctgcatttcaacattctcctgtgatttttgttcctccacaattgttgtttgctcctaaaacaaagaaatcatagtaattttttatatgtaataaaattaaattatttgtatatacgataacccattgaaaagatatatctctgagctatataaatatactaaaatcttaatctaatattattctttatttcctatttcttaatatatcctatcacagaataaatatataccatagtgcaaaataaaaataccaa

SEQ ID NO: 146846 - DNA, 514 bp, Cannabis sativa
  modified_base (464)..(489): a, c, t, g, unknown or other
tagtatcaaaataactaaagttaacacaactttattttttatacaaagaggtagggtatctttaagatactaaagattatattcatacatactttattgagatgaaccgattctttaaaaatttaaccacttaagttatgacttcactagttttattgattcacgtaaatcagtatttaattacgtcctttaaaatacaaataagttgtatcataaagagtcttaattgttatttccactatagaagtcagattcatttattgttttgaggatacatctcgtatagtgtattgggtttcttgtgcatgtcctgcgcaaactccaatgtttggtaaagtctcatggttccccctccttgtcggattagttttatcaaggataccatgaggtcagttcccttgatgagtcataagtgcatgttctcttgatgagcgtgttggtttttatgccttaaataaaactcnnnnnnnnnnnnnnnnnnnnnnnnnntaataaagatcagaaatcattttat

SEQ ID NO: 146847 - DNA, 720 bp, Cannabis sativa
aaaagtgtgttctgtaaagttttttcttcatttttattttttgagtttatttaagtcaagtataggttcgaggtcagattcgggtttgagtcagagaccgggtttagtgctagggtcgtgggggagaatttgggtccgactttggtcaaagtccaaaatattgattaagaaaaagaaactgtttaaaaaatattaaaagtatttttttaaaaaaattttgattctcaattaaaaaattgaaaagtgaaaacagatttataaaacatgtttttgaaaaatatttacacttgttcaattttaaaaacagaaaattaattaaaaaaatattaccaaacgccaccttaattaatggacataaattaaaatctcttctgtttttatgttaaagaaagcctccataattgaattcatttgataggaattatagacataaacaatagggtgtacacatatttagtatcttatattttatttaaatattatatatttttaataatacttttttagtatcctgtgttttaaaattatacatattaatacaataaactcaaaatttttttataaaaattttgtcaatacaaaatcatctttaattttacaaattttgaattcaatttttttttttttgatgaatcagagaattcaaatttaattatttgattacatataattgagatctgcttggtcaaattaataaaattatattattatattttactt

SEQ ID NO: 146848 - DNA, 609 bp, Cannabis sativa
  modified_base (28)..(38): a, c, t, g, unknown or other
gtacaataacgggacaaaatcatatccnnnnnnnnnnntatatatatatatttttgttaatacactactcattatccaacttcataagttggtgcatgtcgtgctaacttaatcggtatttatttgtacttttcagaaaacaagtcgtgttgtcacaaaaaaaaaaaaagctcgttttgtattgtgcaaatatttttaaagggtaggcctaacacggcccgtagacctagtagtttcgtgttatgcttagattcgtgcagtactttgcttgtgtcgacccatattttctaaacagatccaacttattttcatattcaatattaaatttgtgttttactttttagattttttttattttttacaattactaaattatatatttcaaagctttaattatatttataaaacttttgaacaatattttacagataatcatataaaaaaaatattaacattgttaaaatttacatatttatttaaaaatatcaaaactattatatcacgccctataaattaattaatatataattttaattttttatattttaatagttttaataatagaaattataatatcaagtattatatttaagttttattattattatt

SEQ ID NO: 146849 - DNA, 714 bp, Cannabis sativa
  modified_base (661)..(666): a, c, t, g, unknown or other
atattttcaactattgatgtcccctttttactatagaatatctaagagaataaggagatcttaaatttataattttataatatttttattattttaatggtttactgttttgttaaattatttttattttagtataatatttgtagagaaatactgtacagtaacatacttagtattaaaattattcaataaaatatttaaaagaacaaatgttagataaagtcaagagtttggttagagtgacgtgtatataaagaaacttatattttatagggtattgggaactgatattttatggagaactagcttcatttataaatacaataaaataatctacaaatgacactaaaaacaataatttaattaaacacgtcattgttatcatcaaagacttacacaaggctcaagaaatttacatagagtgggtaaaaaaagtagcattaattatattatgtataccatgttggaatggtaactcaaaaatttctatgttgatttctaagggttatctcgttttactcaatgtaatcattccaaaatacacatgcctaatctaaacatttccatggtataaatatgatttacatgtgtgattaggtcacccaaatccaaccattataacgtgttcttatagtgaaagagattgtaacaccctaactannnnnngcgtattacgtgattttttaaacgcactgtgcagctcgttgctaatca

SEQ ID NO: 146850 - DNA, 725 bp, Cannabis sativa
gattttggttggtattgagggccgaatttcagtaataaggtaaaagtctaaactttaataatataaatgtatgtattttgtgttttattgaatttgtattatatgtatatatatttttaattgtatatatattgtatgtatatatattgtattattgtatatgtatgtataaaaatattgtaattatatatatcgtatattttttaggggtttttttgaataatatacctaaaattgattttgtttgcaaaaataccttcaaaaaatttatctgcacaaatattgatgtgccacatcagcatatataaatatcacaattcaaaattattaccaaaaatagaaaaaacttgcaaaattctcgcttccagaaattttagtgttttataagttttaaaaaaagtaaccttttggttgcttttgttgtaataatatatcatttagttactttttactccaaaaaaagaaaaagtttcaagataattttttctcatacacatgtagttaattattttgatcaaataactttaaaactatgatttttattttttaatttttaggttatattatatgttattttattatttaggataccttaaggttacttattttttttctgacaattttaaagcatattttaagttgtgggaagcagtacatatattttttctgatataaaaaatgatgaacaagataaaaataaccaatccctttcttttatagattat

SEQ ID NO: 146851 - DNA, 509 bp, Cannabis sativa
aagcgccttggaagtataaaaaaaaaaaaagagatatcccccaagagcttgggagtaagtacccagcacccaagttgacaaaaggcttggtgcggtggcttatccaattctgatgtcattccgaccatctgtttagtttctcataataacaaagatctatgaagtcagagaagtcaaattcacaactttgtatttcttatttctggctcactcaaaaatgaagagttcaaaaatgaagagttttactaacagtatatatatatatatatatattatattttatatataattagagaataaaattgcacgtttcgtgtggcaagaaaaaaataatatgataatattaataatttattattttgataaaattgtaattattttgaatgaaaaaaatgaaaagatattttttttttgtttattttaaaactttataatataaaaatatttaggggtatttttatttttacacttcaaaatagttttttttttgtatttttacagaatttcac

SEQ ID NO: 146852 - DNA, 520 bp, Cannabis sativa
ggacctccaacactcacacacccatctatagccacttgagctagcctcaagtggtttaatcacgatttggtctttaatacctaccaaataatgattatttgatttgataaatacataacaaaaccgaaagtaatatttaaagaaagaaaaagtctaagttttttaaaaatacgcaactttctataaagaaaatttcgtcttttgtatgacaaatttcctaaacaaaaaagaacaacggtaaataaaaattttctaaatggaaaataacaattaatgccacaaaattaatacaaaaaagctattttaattgcataataaattaataatatttaataactaaattatcaaaaaatgacatatatacttggacaaccatgtgttatttttttttcaatggagagccatgtcctttattagccaaaaaaaaaaggacatgaatggtgagccaacttatctttaacatatgggctgggctaagcttttgaatgcaaaaatataaggaaatttacaaaaatactgg

SEQ ID NO: 146853 - DNA, 572 bp, Cannabis sativa
attaattactaaaaaaggtcttgttaaatatttaattaattattttaggaaaatagttaattataattaattaattctaaaaaaaagaatgtctacatattagtaacctcctattacaagtaaaaaaaaaatgtaactatatggttacaataaaaatgtaaccattgaatagtcacctgtttttatatatataatattactattcttattcttacattatcattaccatctcattataccaaaccaaaaaacattttatatatatactattactattcttattcttacattatcattaccatttcattataccaaaccaaaaaccatcatagcttagatatgaaatagagacaatttaagatagagtgaagtaacaaaatcaagcaatattattgtgagtgagaccattgaggaagagtgaagcaaaacgatccatttgatgcttattcaaaactaaaccagcctcaataccaccacttccatctccacattccgccattgaaatggcaccattctctatagaaaccacaacaaattttttaggacgaccccatccaaaatctgtattgtaa

SEQ ID NO: 146854 - DNA, 831 bp, Cannabis sativa
  modified_base (765)..(791): a, c, t, g, unknown or other
gtgttccccataatgtattattttcatatctcgatcattcaaaactataattattattgtatttcacttgttgtctcattgtatctcactattttcatcactgtatctcacccgttgtcatcactgtatctcatcgtttatcattaccgtagttcacttgtagtcgtcactattatattttccaaatttatatcttaattttagatttcatctcgaattttaaatatttttttaatatttttaagacattagagaatattcattagtttgttctgttactattaattagtatgttttaaacaagtgattattattttttaaaatattttaattacaaaaaaagaaaaaaataaaaaaaaattgatattttaattatgagaaatgctaagaggcaactctccttggtatcataccactattagtttaattaagtagcaagtcccatataagcaatcgtagagtgtcacatattaaaggtgttgtacactactggtatacaataacaatgctctttagttataattatgtgatacttgacattaaagttatcatttcaaaaaaagatgtaaagtaggcttttgttaaaaattaattaatatttttgaataaaaaatataaacgtggtaaaaaagaattaaaatattattttaagtatcacgtaccactgattcttctattagtattagtattattgttatattttattttttttataaaaaaagccaaaaacgtaaacattagagttatcatttttatattattatnnnnnnnnnnnnnnnnnnnnnnnnnnntattattattattattaaaaaaagctaaaaatattaaggt

SEQ ID NO: 146855 - DNA, 661 bp, Cannabis sativa
tatatggagcaaccttcctgttgctcaaggggagttagggcaagtttgttgtcttcgcaaatctttacatggattgaactaatatcctcgtgcttggtttggtaaatttagtcaggctgttgagaaatttggtttgttgaaaagtaagtaagatcattttgtgttctataaaagatcaactgccggtatcattttgttagtggtatgttgaaatcgttattattggaaattatactgaatgcatcttatccctcaagtctttcattcatacctaatttcacacaaaagatttaggtttgctcaactatttcttgtgtgttgaagttacttggagtaaacaagatatttttttgtctcaaaggtactatgtacttgatttgttaactgagacaggaaaatcgggagcaaaaccccttgtaatgatccaatgaatctagttgtgcatcttacatgtgatggggaaccatttgaagatcttgagaaatatcgcaaattggttggaaagttgaattatttaactgtggtttggctagatattgcattcctagatagtgtcgttagtcagtttatgtcttctccaacaatttatcattaggcagcattagaacaaattatatgttacttgaaaggagcaccaatcatggacatacccaaattgagt

SEQ ID NO: 146856 - DNA, 509 bp, Cannabis sativa
acagtatgctatgggtcgaagtggctccgatcggcttctgcaagtgccgataatcacagtgctccggtaggggttgagccgagaaggggtggggttgttgatattcctgaaattcggggtaatcaacaggtttcatttcctaatattatgggtcaaggattgatggatggctttatggattcggtagctgtcaacaagggatttgtgggaataaatgaaatggatactagtgggagtagtggaggagataatataggcagtaaaggacaaagtcacgtggcaactgatttggagttagatgaggaagcgatgctttttcttgatactaaacgaaaaaggctgggaaaggatgtggctagtgggccgattgggcctaaggagcaaaataatgtgagtttgggtccggaaagaggtgctcaatcaaaaaacaattcaatggcaggctcgttagatcgggttcgccaatcattatgagcattttgagctggaattttcatgggcttgggaac

SEQ ID NO: 146857 - DNA, 1062 bp, Cannabis sativa
ctcgacctctgcatagacctcattctccacatcagaagatcccatttcctgcagccgagacctcattccatacctcaggaaatttctcgatactagagagaggttggcacaaaggtcttcttgtgcaagcttgggtcttggttggttgggttgtttagtagaatccgaaaccacgctaactttcctcctggattccttgtcaccccgaggaggacctctaagatcgctcgcaaaatctatgtccattcctgtggaaacagaaataaaagatcaatggagcaacaaaaaataataatatgtataatccagttcaaaccaccattcacaagggataatagttaccctcgaaaatcacttgtgaggatcccccgtaacgatcaatgggaatgtacaaagaagaaaggtagttggcgaattttggtattatgaatttagaggaacaaatttttgaagtcagatggggcatcttgacgagagaaggacaatccaatctcaagatgaagccaaacagaaaagcaaaagtgtatggaatatggcaagcttaagccaccattttatactcaaagtctagttaaaagaagcccaaaggttgggaaatctaacagttgggagtggggcagaaaatgaaaagacggttcataatgacccttaaaaccgtataaccgctagaatcaaaggacgcgtttctccaaaaaggattatgacgaaagggccatctgtaattattaaaaagcactttttatgaaaaggaacttttttaggggcaattattatacccgaaatttggctaccatctcagtggagggcacgtgtcaagataacaagaatatggatcgatgaaatcacttttaatgaaataactcattaattgcgtaagtaacagagtatacttgcaactcgctgactataaggtctttcgcgagaaatagatatacaaactgttgtttagtgtattaacgagaaaccatgcgtcattggatgtataaagtgacacatcgacttcgttacatctggaaagacaaaagcgacgcatatcgactgtgataacacttagtgtaaaat

SEQ ID NO: 146858 - DNA, 814 bp, Cannabis sativa
  modified_base (38)..(57): a, c, t, g, unknown or other
  modified_base (296)..(296): a, c, t, g, unknown or other
aataatctttgaactgcatatccaccaaatatttctcnnnnnnnnnnnnnnnnnnnnatctttaaccacttaccttaatgtgtttgcaagattgctagaaattcatgaaatttctcaaacatttcaaatttcgttgcataaggtaaaatcttgagtgatcgttttaagagtttaacgataactcatatccactcctgaatgtacatccatattcgaatatagatgatcatactgtcaagtggatataggcatgttttctctttgtagataataatcttgtcaaaaccactatgaanaagatgcaaatgccatagatatcttaaaatgtggttgtggtcttttgatgaaattggtctagttacaacaaagagttcttagaatagtccaagtgggttctggtcacaaaatacaaaactcaaaatccatacataacatacagttcgaatccattgatagaaaattaatattagaactgtgaaagttgtactgtaatgttcaatgtattctagaaactgaaatttaaaatttctatttggaatctaaatttaaagttaaagactcaaatttataccaaatttatttcttgagtaatattctttcttgtaccaccactactaatctaactctacgtttaggttaccttaagtaagcatatacaagtaggagatttctaagaacgaggatttatatcttcatggcagtacactataatggaccattctctactcacaactttgccactttatttcaactacttattattttttttaataataccttatttaccaactcaatcctataaatgcaaaaacta

SEQ ID NO: 146859 - DNA, 747 bp, Cannabis sativa
ttcgaccttttggttagtaaataaaatacatgctcttctttaaagtagttctttgaaaaatcataattgttgacagtaaaaaatgatgtatgtatataattctctttttgcatctccataattaccttttcataaagaagtttgaagataaaggtattaatctcgaaatcttagttggtagcttataacctcctacaatattttctagatatatagctctgtgataggtgtttaattaaccatcttaaaaaattaaatcttatggaaaataaaaaaaaaaaacaattgaaatttgaaggaaacatataaaaaaaaggtgagaagagggaaattgaaaaaagctttgataatttggattgagggctttaaagaacaaaacaattgaaggaaacatatagaaaaagagaacagagaggaactaaggaagagagatgtggtctctcttgatgacagctattgagctttttcaaggaattcgcctttcccatttttcacaaaactttgtacaaatctatttgcatatttccttttagaattgattataaatggtcattggaattgattttcatatatctattagcatatttactttaagtcctatatcctttctaggtaaatgatgagcaacgttttattttctttttttgttgtctggagttttaattttttttttttttgcgggaacataactggaatgcattgtattttttgtgtatttatttataaataatgtcttctatttttgtt

SEQ ID NO: 146860 - DNA, 555 bp, Cannabis sativa
tcccatgttcttctcatttcatcttttagatccacaagcttcctccaataccaactactatggatggaagccttgtggttccaacaatcatcattcttcagataaacactatggatccatttgaaccataagttatctttcttggcagctagtgtccatatgttcttcattaaagcagccttattccaagtattgatatttaagaaacctattccaccttcagctttggagaggcataccttattccaggctacggctccagctcctaacatattgttagagcctttccatagaaaactcctgcatattctttcaatttcagcaaccactttctttggtaagactaggatctgactccagtatgtgtgaatggttagcaggacagagttgatgaggacagccctacctgcaaatgagatgtgtctagtactccaaattttgatgcgagccaacattttgtctaccaggatattgcattcagcctgagagattctttttgagcaaattggaatcccaagatacttaaaaggaactgagcttctagtaaaaccagaa

SEQ ID NO: 146861 - DNA, 700 bp, Cannabis sativa
acccaaatcctaacctagacctggacctggacccaacctcgtccctgacctagaacctagacccagacctaaactcggacccgacccgaacccggctctggccccgaccccgaattaaataaaatcaacaaatgaaaataaaatttacagaacacacttttgtttttcgtttttaaaattggaaaacaaaagtggttacataacacatttttgttttttaaaatcaaaaaatttatttttaattttgtaattaaaaaatttaaaaataaaagtattaccaaacgccaccaatatatagttttttaaaactttacaaaagaactattatagctacatataataaatattgttagaaaaaaaaattagcggcataaatacctaaatttaattctcacttgcaaataaatacctaagtttaatttttgacggtaataatacctaagtcatatttttagaactctgtaacctgactgttaaatgttaagttattatctatgtgtcattttcttattggtatatttaaactatttttttaaaataaaaaattaataatttggaccaattaagaattgctacatggcaatttacttaacaattaacagccatgtgcttacaaaagtttcagaattataacttaggtattattagcgccaaaaaataaacttaagtatttattaactgagagttttttttttttttt

SEQ ID NO: 146862 - DNA, 624 bp, Cannabis sativa
gcccacaggtggaacttgtgaccggggattggacggctgaccatttagagtttgagaggtgttcacaacgggatctttatctgtctcgcccaggggaatgacggttgcaggctgttgattggtagtctgataggctttttgtatcaacacgaaggcctgtctggttcggtcgtcaatggctacttggtgagccctcaacgtttccatctctttatccctccattcagtgaacatgcgcctttactcttcaaatgtgagattcaccgcaacacggagttcctcctgatcatgatgcagggtgttggtatgaccttgcatgattcccagagcagcacggaggttctggatctctgtgtcatctccaatggctgttcgaacatttgttacgcgcagaatgacagtgttgggaatgccttgattggctgctaaactggtatttctagtctgttacacactaggctagattccactcacgggagtcatcacaccgtgacccatagttgatggttgttcgggatgtgtggttggtggaacccttgcgttctctagattctgcagtgcaggatccactacctgtggatttgccggatcaaccatgcgtctacgagtctgtaccaccattgt

SEQ ID NO: 146863 - DNA, 1541 bp, Cannabis sativa
  modified_base (137)..(138): a, c, t, g, unknown or other
  modified_base (664)..(665): a, c, t, g, unknown or other
tggactagtaacaatctgaaagaattgttgaagccacgtacaaaaaccttgtgtgttttttacttttctggactgtttgtttttctggttttttctggagttagaaagttattttctgtaactacggaaaaactgtnntcagtaccagtttcattattctgcgtttaattaaataataaaattgtgaatattaaaatacggaatttcaattggtatcaaagcaggtcactaaattcttagtgagatcttaagattattttttttaatttgttttgtgtgagatgtctttgttcgcagaaggaagctctatctctcgaccacctctgttaaatgagtcgaattatccttattggaagatcaggatgagggcattcatcaaatcacaagatgagaaagcatggagagctatacttacagtatggtcataacctactgaaagtgatgatgaagataatactaaggtaaaccctgaactcaattggactattgaagatgaaaattatctggttataataataaggctttgcatgctatttttaattgttttggtgaaggctttagtaaattaatttcatcttgtgaatcttcaaaggaagcgtgtgaaatcctttaaactcagtttgaaggtaccgctgatgtgaaaagatcacgttttaccatgttnnaaattagatttgatgaattgagaatgtcagaaactgaaactttgtctgatttttgtgaaatactatcttatatttcaatgagttttttgctcttggagaaaaattagatgaatttgtcttagttcgaaaaattatgggttgaagaactcatgggttctttaagaacttttgagaaaaagagtaagcaaagttacttaaatgagaaaagcaaaggtattgctttcaatgtttctgaacatgttgtttctgatgatgataatgataatgaaatggccttgttgacgaaaaatttccaaaaatacatgaaatctgttggaaataaaaagaagtgttcaaaaactccaaaaggtaacattttaggtaacaattggtatctgaatgttacttggagtgatgattctgaaagtagtgaagatgaaaaagaaaaggttactctaacaagtgttttgtcaagaaatgtccaggaaaaaggaaaaatcattttcatgaataataccttgattgttgacaacaaggaagaagctggattcgaatgagatgagtctggaattgatgagaactctatggcagaatcttacaaggtaatgtttggtaagtggttggaagtatgtactgaaaatcgttccatggttaaagataataaagacttgtgtaacaacattaatgagcttgaagaaaaattaaatgttgtgaatctgaactgtctttaaaagaatctgaaactatttctttgactaaggaacttgaaaacattaaaaagaatgtctaaattttaaatccaggttccaacatttttgaaaagattcaaaaatctggccaaactaatcatgctggtctaggttatggttctactcaatctgatttcaataccacttt

SEQ ID NO: 146864 - DNA, 801 bp, Cannabis sativa
aagtcctagttccagtgccggtcaacttccggttttggttccaattttgggcacaaggtacgggttcgggtccatttttgggtttgggactgggtttaggtccttgtgtgggttacggtccttctcagcgttcggctcttggtctggtccccaacccagacaccgactacgagttttgtccaggccttgggtccagatctttttcccaatctcgggtcccagtctggttcgatttcttgtgccgagtcacgagctgggtcctaggttcaagttaaggtctgggtcgggtactaggtccaagtcctagttttgtttcaaaagtccctatcaagattctaggtccaggtcctggtcattgtttgggtttgggttccggtctaagttcgggttcgagtcctagtctcggttctggtttaggtctctgtctaggttttgatctgggttcgggtttgggattcggtccttttcctggtcctagtcctagttcggctctagttccatttgcgattcagagtttgagtttgggtttgagttcgggtcggagttctagtcctgggtcttggtgtaggttaggtccaagtcccaagttccaatcacgatcttagtctggattcagttctgggtctaagttcttggttctgatcctggtctagtttcgagtttgggtccgggtccggggctagctttatgtctgattctaggtgttggtgtgtgagttcgggtatgagtgtgtgtccgggtttgtgtccaggtctcgaccccgatctgggtcaaggttcgtgtccaggtccaagttcgggt

SEQ ID NO: 146865 - DNA, 600 bp, Cannabis sativa
tattaatcatataaaaaatcagattaatattaaatattcaatccccacagaagacaaatcacttcttgctaaaaagaccatttttccctttaacaccaaaaatcactaaaagccactaaggggtaacttgggaaactctaaaatcctgactactcacgacattcccaatgtctaactatatcgccccgctatactaaaaaatactaaaatgtgattctaatagccaaacaccgcgttccaatgttgctgggcactaaacatgcaaaattatgaaatttctatatatgacatataaaatacattctgaattcgaataaatcatcataaattaataatttagatttaatagctaattttcataattaaaccctaattatctgctaatttccaaagttaagctaagcggtctttacaaaaagcgtgaaaatcacagctatacgattttcaaagcataaaccctatttacactacgtgatatgtaatcaaatcccacaatttaagagataattgctgtaaacatatttcaataaaccttgtaattaattttccactatgtaattataaatagtgataaacaagagtaaaaaggggacgaaaaaa

SEQ ID NO: 146866 - DNA, 1039 bp, Cannabis sativa
aagtttaattaatatactatttatcctatcaaaaaaaattaatatactatttatggagataaccgtcaagtagggaacacaataagagttctagttaatagtcattactttttctggttgtcccatgtggatcaaaccaagtaccacaagtttggttactcctagctatcacaagtttggttactcctagttgctaatatttgttataggaagttttccctttaatcttgatacgatactctgttgtgatctaacaactgtagttttcttatttgtgtgttggaatataaaaggaaatcagaagggccttctgggaacgcacggttttatatctccggtctcgtggtactggacatgtctttcaagtacaaattattgaaggcggaaggctttatgagtgcagaatcaagatatgttcatggaaggacatatccaggtgggattggcccacttctcctttgctgagggtcccactaataggtttgcgatgctgacctagaatctacgtgtccaataccaaaaacacgaataacagttacaatttggttcgcacgtcatcaaagccaaaatttgggataccaattatattgtgcaattattatattttattgtataaaaaaattataattttttttttaaaaaaaagtgtataagagtttcccataataataagtttaattaatatactattataaaattttaaaatagtttactttgtcaatatatatatactaattaagtatatatatatcgattctttaatataaccacccaacaagtttctctatcaaatttttttttatattattttaaatttttttaattaaaattattatttatacccaataaaaaattgacacgtggtattttatttaggtttaacggatcagttatcttagggaccaacgaactcacaaaaaaatgtgaccttggtgactattaccgccaattttcgaggttgtggactaatctgcatcaaccctaactttatggggacttttaccgcaattatcccttattatattattggttgtattga

SEQ ID NO: 146867 - DNA, 506 bp, Cannabis sativa
aactgatatattttagggggtatttttaactacacttataaattaaggggcatcatagtatagtgtcataagtacagggactaaaaaagctaattattctattataaataaccatctaatccaattgtcttatttgactttagaaaggtgtttgtttattctttaagtgggtaatccgtcgtccgatatcgagagattccataattattagaatttacaatattttttttttatttttgataactagaattaatttataatatcttgtttgtttggtgatatagacttgtattgtagtcatcatccataattttatattcttttaatgaaaagtcattaggtaatattacatgcatgaggagtgctaagggaactctctattccactctcttttggactctctctttagtgtgatgacaaatgtcatatattcagcaatagttatttttacttaataattagttatgttattctaatgttattacaattgtgccattattactttt

SEQ ID NO: 146868 - DNA, 504 bp, Cannabis sativa
attcctctcctttgagccttgtgtgagagttaggggccattagtagtgggtatgacatactgaacccacccctccctcacatgaacaacactaattttcaaggcccatttgtcttatttaaataattgtattaggctaattatactagtttaacttaattaaaattgaattagcaacacaattgattttgaaatgaatttttcattggattattttaaaattaatttagaaaaaacatacttagtttaaagaaaagattctagatagtgatttctagtaactatttaatattttctaatatttaatgaagtagaaaaatatatttaagttgaaaatttatttattaattaattttaaaccaacttaattaagatatttttcttagaacttaaataatattaataattaagatcattttattaaagatacttaattatttgtttctatttcatgaaatttaattaaatttgaaaataaatttaagttgaaaattaattttattta

SEQ ID NO: 146869 - DNA, 606 bp, Cannabis sativa
agacgtagagcattgcacaagacttgaactcgttaaacttggtgttatttttctctattttactcctttaatccgttatttagttcttgcaattctttgatattattgttcttgattatatatttgttggttcagtttaattccattacaagtcattgattaaatttcaaaacccaatatactaatatattataatatcaaccgtttgtatatcatttatctaataaatatttatcgaacaatataaaatatagatgattattattataacgactaagaaaattaacatccaaaaaaaagttataataaaacaaattatatattgagttaatactattttggataatgtgttttgcaaaagttatttatcaaactttttattttcttaaatgataaattagactctctattttcaaaaaaaaaaaaaaaatcaaaaaattaccttgagcttaatttttaactaatttgttctttttagtataatcaacttgaagagaatttcttatatgaacaaatgttgaaattgtaacgagttttagtataacaactttatatcgaatattaataagttttttttttttttttttttatttttgaaaaaaaaaa

SEQ ID NO: 146870 - DNA, 631 bp, Cannabis sativa
gcagagcaaaaattacaaaaataacatatttcatatataagacaaataatacccctagagtttaataaaatctctggaattgagaattataactctaatgcctatctctaatattggggtccacaaataattaaattcataaataattataaaaataacagaaattagtgttaattgcctttactaatgcaaattactaaagcggtcattacacatatccacttggggaagatcatcaagtgttcttagctgcaaggtataagagatgaagatcttcacattacttattaaattagctattctatttggattctagttcttatctgaaaaaacttggattctagtatgtgaaatgaaacaatcgaaagtaaataccatttcagaaatagctcgtacacggaaatctttcacatccttcccgcatggtgttttcaggctgtcccaaatgaatgccttactcgccaacatgcctatgtcacacatgaaccagtgcggagttttagttttgcatatgatcgggacacacctacatatgaaaggggcagaaattagttattaccataaaattattataattaactaaatgattaaaaaaaactgaagggtcattactgttgggattttatgccct

SEQ ID NO: 146871 - DNA, 693 bp, Cannabis sativa
tggccttatccactactgaagctgttagcaactacaaaggcaataaagaggctatatggattaaaggacttatgaaggatctaaacttattggacagaaatcctatagtctattcagacagtcaaatatgcatacatctttgtaaaaaccctatgttccatgacaaaacaaaacatatagaaatcaagtaccacttcatcagagacaaagtgatacaagaagaaatcaaaattgagaaagtaccaacagaggaaaacccagctgacattggcactaaaatcctaaacctgggaaaattcaagcaccgcatggatttgctaggtatgggtaatggtgattaaccattgccacatgagttagcaccctcagaaaagacacaaaatacattcacctatggttagaaaagtcctagttggattgaggtggaatttgttggaattaaatccaactaaaactttcctaaccataaattggttacaaagaaaagcaacttgcacaactacaacaacctcaatacagttacaatcagaaagatcctaactgaaataatagaaaacagaagacatatacctgccaactcaccaatccgagtctacttacccttctcctttcccagcagtataaaagactactactggtttcattttttgtccagatctgaagacataaagagagagtacaacctgtaattgc

SEQ ID NO: 146872 - DNA, 659 bp, Cannabis sativa
taccacatttgctttaccagggtggtagagaatctcgcagtcataatctttgaccagttctaaccatcgtcgttgcctcatattgaagtccttctgagtaaaaaagtacttgaggcttttgtgattagtataaatctcacacttctcaccatacagatagtgacgccaaactttcaatgtaaaaacaacagctgccaattcaatatcatgggtaggataccgctgttcatactctttcaatttcctggatgcataagaaatcactttccctgactgcataagaacacagcctaaccccctgtttggatgcatcacaataaatcacaaacttttcatcacttacttgtaaggttaatacaggagcagtaatcaaactttgcttcagttcctgaaaactaccttcacacttatcagtccaaacaaacttgcagttctttcgtgtcaattctattaagggcgtagaaatttttgcaaagccctcaacaaaccttctataataccctgccactcccaggttacttctaacttcaattgttgacttaggttgtggccagtcgcgtaccacttcactttactggatccattagaataccatctttacttaccacatgccccaagaaactcacctgaggtaaccagaattcacatttcttgaactt

SEQ ID NO: 146873 - DNA, 815 bp, Cannabis sativa
aaacataatcctagttactgctaatcatatcgctaaatatgtcgctaatatatcgctactatatcgctaactacaaacaggacgataaaaaacaagattcctaggtacgattgttatatatcgctaacagaatcgcctataatcgcaaacatgtcgcgaaacacatataagtcgataaattcatgaaacctacgtactaaacactatatatcgcgaagtgtgtcgttaatgtatcgccaacacgtcgataaaaagacggttctaataaatcctcgactttttcaagacgatgttgcgctatgtcgttaacatagtcgcgatacgtcgcaaattgtcaaaaaaccagaacacagaccggcgtcaatgaaattcaaacgaaatcaaaaaaatttaacataaagtaaatacatttctttacagtgaagcacaaacaattaaaaactaatcaaaacaataaaaaagtttaaacaaatacctttttttactgtttcggatctgggttttgtttggggctgtcgcgagtttggggtttcacgatatcgtctccggtggtctggtgttcgtctgtttgggtttcacgatgcaaatggggctttcacgatttcgtcttcaaatgtttcgcgatgtcgcgatgtcgtctggaggtggtgggttttgcgatttcgcgatttcgtctggaggtggtggttttgttggggtcgggtggggtttcgtagctggcatggtggggtgttgttggtggtcctgtgagttgaggtggtggtctggttaggggagggtgtcgtttggtcgtttgggttgcgtgagagagagag

SEQ ID NO: 146874 - DNA, 588 bp, Cannabis sativa
  modified_base (556)..(557): a, c, t, g, unknown or other
gtgacacatctgagtaattaatggcttcgagagaagaatcctcttctattatacatgaccccttctactatgatataccgttccttctcataattcgaacttcatttcagttatctgggagttccccagagttgaggtaggttgctgcttgcgtcatccagtttggggatgtgtcaatcattttgatttcttccatgccattgatgctaggctcttcaaggaactggatagggagcaagtttgccttgtcacttacattgctgcttgccaattgttaggctatttttagcctatattttggatcaactttatgtttgcttttcgttgttttaggacggaattatgcttgttttctatgtttttaggttcctcggagtaatggaggcctcgggatgcaaaagtgcaataaaaggcaagcgaagccaagaaaaacgccattttttcagtttgacgcatttctggccgcggctatagagtccagacaaagtgcaccatcgtcgatgctccagtcaccgcagcgagatacaccctcgccgcggccatatggtccactacnnagagtggtttttagaggtttatctggccgcg

SEQ ID NO: 146875 - DNA, 709 bp, Cannabis sativa
tttatgtggtattatctctttggagagatgaatataccatagatgttgtatcaataataaaacacaaacacatacaaacattataaaaatataaatataatcgttactgacatacacaagataaaaaaaaagtaaagatcaattcataaatgcaattcattagtaaaagagaaaactctattataatattctaaaaaaaatgaattgtctgcaataatatgaaaaagagggaataaaattcgaacccaataattgaaatcaaattgttcatagattaaaacaattaattaaaaaattataaaagaagatttcgagcttcatcttcaatcttggacaatctccacccttctgtccaaccatccaactcaactcgctaggatagcaatccaagtttaagtagctggagctgaaataagaagaaaaacaaacatggttagtagatccagaattaataacccaaagggataataattctctaaaacacatgagtttatagcatagaaataaataccttttctctttgctagaaacttagggcattggggtttccagtggcccttttaattgcaatagaagcattttccttttgtcttttcaaagcttgaataggcttcttgctattcttcaaatttttcttgttgttgggtttcgaagtagaggcaatgtttgcctcagccttagccgcaccattagcagtcccagaattagg

SEQ ID NO: 146876 - DNA, 980 bp, Cannabis sativa
  modified_base (522)..(526): a, c, t, g, unknown or other
gcaaatgagaaaaatagtgcttgttttttcagcttggtttagggtagcgctcgatgataaaaattatcaattttcctccatttgtggagtgccttggtctgtgtgttaaaaatgctaacttcaaatgttattcttgtctaagtgctggcctatgaggaatgctttcaacaattgtgtgcttgttttatcccaccatcctttgagtttctagaatagctaacaccttgagaaagtttaagcatctagaattggttagtgtaatccttgaggcaaaatcctagcgagctttataacttggaaatgatttaggccattcttggacgattgagcctttctagccaacccgagagtatttaattgtcaatagtcaccccgaattgagccaaaagcctattttttttttttttttgacacccatcaaagttactatatccacacattcacacaaaatgttatccgtcacaacccgaacctaatcgttgaaacttatcaaggacaaactaaacattatttgggataggnnnnngaggatagatctttgcaagatgtgaaaaaaaaaaaacaagttcttactagaaacatgatgggatgtgagtcggggtggtgagagtgtgattcacattacataaaagtctctcttttgctatatatagatatgtaaaaaaaaaacagaaaagaaaaaaaagtttttaaacatatatgaacaatcatagtgttaaataagataagagaaaaaaaaaaagggcaagtttaaggctaagtttggggtgcaccatccctaaccaaaaaaaaaagttgttttttttttcttctctttatctagtttatttgaaaagaaaaaatacatatatatagtacatacatatagcaagagagtgggaacaagatagagtgaacattttgggttgaaaatgaatttttgggtgagagcttgaaagaaaaagaaaaagtccttgataaattgaggtaattagatcatg

SEQ ID NO: 146877 - DNA, 768 bp, Cannabis sativa
  modified_base (539)..(540): a, c, t, g, unknown or other
acgggttcgggtccacttttgggtttgggactgggttcaggtccgggtgtgggtttgggtccttgtcagggttcaggtcaagggctggttcctaaatccaagcaccgactacgggttgtttccaagccctaggtctagattcggatcctactttcgggtctgtagtctagttccatttctggtgccgagtcacgagctgggtcctatgttcaagtttgggtctgggtcggctactaggtcccggtcctagttctgtgtccctggtccgtatcctgattctgggtccaggtcccagtttttgtgtgggtttgggtcccggtctaggtttgggttcgagtcctagtctcggttcgggtttaggtctctatctggatttttatctgggttcgagtttttgtttaggtcctgttccttgtcctagttctagttcggttctagttccatttgcgattttgagttcgagtttggctttgagtttgggtcggagttcaagtcctgctttgagtttgtgttcgagtctagatttcagtctaggtccnnatcaggcttcgggtgtgggttcgcttcctgggtcttagtctaggttgggtccgagttccaagttccaatcctcatctgagtttggagttagttctgggtctaagtccttggttctgatccttgtctgggttccagttagagtccgggtcctggtctatctttgggtttgattctaggtgcgggtgtttgagttcgggtccgagtatgtgtccgggtttgtgtccaggt

SEQ ID NO: 146878 - DNA, 1124 bp, Cannabis sativa
  modified_base (1094)..(1096): a, c, t, g, unknown or other
cttgttttcaacaaattcatttcttttcgggcttcctcttttcgaacgaacacctgagccctttcgttgaactcagtgatgtttctcactggaagaccttgtaagtcgtcccactgctcgcccccagtggttcatgaatcagtagagattcccgcctaaaggactgtaagttgtgtactatcatccaaatttctaacccttgcagcagccgtgctaaaacgacttaagtatgccctaagtgtctcgctgggctgttgctttatattggttagcgaggccacttcgggtcgtctatcccttgcagcctggaactatttcttgaaatccctggacagttgttcccaggaagttattgaatggtgattaaacttgttgaagcagttgcttgctgctctaactagcgaggtgggaaacaagatacagcgtaaattgtttgtcacattactagctcgcattattgtgttgaagttgttcaaatgcgagaccagatcggtggttccatcatacgatgagacatgtgggtttttaaatcccaagggaaaaatggtattcatgatatttggatggtacgactcaagctcctcgtttgagtcatatccagattgtctccctaattcccccacttgatatttcttgaacttgtcctccaactcgtctatccgcagttggataggatcctcttgctctggaccgagttgttggcgaagatcaggtttcttccgattcaagtgctctcatagaaccggttgggagtaattactggcagacctcattttactcacaaaatgtgtcctactcacggacctcgtcttgctcatagacctcgtcctcgagtgatcgcagatttactggttcccatactttctcgatcattagctcgtcgagtactttctcctcttcgagttgatcgactgtgggtccttgaatgctctgaggtcacacttgcttcttcacgctctgttctttccccatgagtgtggtttgtcgtatttcccccatcagggtctgtacaagccctctctctatgagtgtggattgtacatagtcatgtttactttccaatgtgttgataacacaataaacaggatcaagtnnntgaaaagggttttagatgaatttataaa

SEQ ID NO: 146879 - DNA, 664 bp, Cannabis sativa
  modified_base (582)..(584): a, c, t, g, unknown or other
tgttcccctttaggattcataaatgaataaagagattttattctgtccggtaaagatttatataaatacatatacaacttcttatgttaagtcttactgaatagttaaggaataattgttgcagataaaggagatatgtctcttataattaaggcgtccaacgaaacagtactacttgcagaaataaaaagcattctatcacttaagattaaaaatatccgccacgaagaggataagattcttagagctctacgagaggtcatcataattaacgaagaaatcaaaagagtagtagaggtgagggatgctttgtcacatgtccctgaacttctctactatatcaatgacgtctgacactgtgtctcagatcttagtgatgcaattcgatacacagcattcatatgtgaactaacgcttgacttccacaacttcattttcgaaaagaattatattgtggaaacaaacggcatggaagaagaacgtgtcaagaacgtacgataaaagttaagtgacggcagtatggaggacataaaagaatctgtaaacataataaagaaacgagatttggaagaatcagaaatnnnagactattttgaagtgacagcagaaatgttggaacttgaactaaaaagcccacctcaaatagaagcagagaaaatagtag

SEQ ID NO: 146880 - DNA, 525 bp, Cannabis sativa
tcaaagcttggttaaactaatcaacaaccaccaaaaccagctcaaaccaacataactaaacataatttaactacagagaacacaataaaacactagcaacaagaacagaaactaaaatcccaaaaacatgcataattcatttcttcaaaaacaagaaatcaaagagggagctacaagagactttacctttgcttggatacactagaaactagcgagaaaccacttagaattgctgaagaaaactcaaaccctagctagtctaggggttcgaatgagagagagcttgaaagagagagagatgagcttcctttcacaattttgaaataaaagaaataatgattttggttttaaaagttaactcagctcattactaataaaacctgatttaaaataaattaaaaatcacacaaaaggacaacttacaaactggaaaaaagaccagaatgcccttcccacacaaaagccataaaaagaacactaaggggtattttgggaaattctaaatcctgactattcccgacattc

SEQ ID NO: 146881 - DNA, 571 bp, Cannabis sativa
ttaaggactgctacttatatcttgccagaatttttatggggtgaggcattaatgactgctacttatatcttgaatcaagtacctagcaaatttgtcacaaagacaccatacgagttatggtcaggcaagaaactgagtttgcgttattttcatgtttggggatgtaaagctaaagtaaggccctataacccacaatcaaaaaatcttgatccgaagactatcaatggctattttgtaggctacactattggttcgagggggttatagattctattgtccttctcacaccaccagggtgatagaatcagatagagttgtctattttgaagatgaatttggttcaagtcaagggtcaagagaaattatattcagggaagaacgtatgtatgtccctgtacttgttgcttccgcttccgctcctactattgatcccgtgattaaacaaattccaacaaaagctcatgatgaacctcagaatcacatgcaagatgaaaatcctaatattgagggtggtgaagttgtgttgagaagatcagagagagctcgcaaacctactattcatgatgactac

SEQ ID NO: 146882 - DNA, 603 bp, Cannabis sativa
caaaaaccttgacaaaaggagtcatgcctgaccaatgggagaaactcaatgtgaaacgcgttgcaggggagcaaaatcctctaatggcatctcggaagaccggggaaattagggttcgtatcgtaggacctctaggagaaactcaacatgaagaagaagcaactagacaaagaaatggaggacctacgcatgagaatagcatcagccacatccgaggagtgtaattgggataatgacgagtttgatacagagtcaccattctccagagaaatccaaaccgaaccgcccccatccaacttcaaagaatcaaatgtattgccatacgataagacgacggactcaaaataccacctcgacgctttcaatgagttaatgaaaatacaaaagggtatctaggaaggcgagatgccaatgcttgacaataacattgaagggtgcaacctacaagtggttcaaacgcttgtgaccatatatatactagggcaaatagtgccactataaataggaccctcgtccatggaaaaaaagggttgaaaaatcattcattataatccatattcaaaaatgaatataacagtagcacttcatcatcttttctaagtt

SEQ ID NO: 146883 - DNA, 685 bp, Cannabis sativa
  modified_base (361)..(364): a, c, t, g, unknown or other
atgtattttttttttttttcaaatcaactagataaagagagagagaaaaaaaaacaacctttttctttggttaggggtggtacaccccaaacatggccttaaacttgcctctttttttttctctcttattttatttaatactatggctgtacatatatgtatacatattttttttctttttctattttttttttcgtttttttacatatctatatataataagagaaggaatctagtgttatgtgaattgcaattctcaccaccccgtctcacatcccatcatgtctctagtatgaacttgtttttccacatcttgcaaagatctatcctcacttccctatcccaaataatgtttagtttnnnnttgataaatttcagcgattaggttcgggttgtgacggataacattgtgtgaatgtgtggatatagtaactttgatgggtgtcaagaaaaaaaataggcttttggctcaattcggggtgactattgacaattaaatactctcgggttggcttgaaaggctcaatcgtcgaaaaatggcctaaatctttccaagttataaagctctctaggatttcgcctcaaggatatcactaaccaattctagatgcttaaactctctcaaggtgttagctatcctaaaaactcaaagtatggtgggataacacaaacacacaattgttga

SEQ ID NO: 146884 - DNA, 1355 bp, Cannabis sativa
  modified_base (469)..(471): a, c, t, g, unknown or other
atgaagcccttgaactgtagtcagacttatcctatgaagagcagcctgttcagatctttgataggaaggaaaaagttcttcgcaacaagattatcaccttggtcaaagtactttggagaaacagcaaggtggaggaagccacttgggaattagagtctgacatgaggactcaatatccagagctattgaggcaagatttcgaggacgaaatccttttgacagggggataattgtaatgaccgcattagtaatttggattagaaaaggcaatttgcactaatttctaatatttttgtaattatttgtgggtcccattgttagaaatgagcattagagttataatttcttaattttcgagattttattaaactctacaagtattatttgacttatatgtgaatatgcaatttttgtaatttttgctcggtgaatatgcgatggattgttagtttgatcacatgggtaagtnnngaaccttatttcttagtgggatatattttggagaaaataaaatatcggagttgagcgaggttatagaatttgaccattttacccctagtctttaaaataccttagttttaagttaaagggcattttagtaagtagccaatgtgtgccttggtggctaaactagaatgtgacacctggctattccttttttagcaagaattaatcaattcaatccttaatgcatttgaagaaaaacaaggaaatgaccaaaattgagaaaaacaatctcttcccttccctctctcttcgaaccagcctagaacaaggggaaattttcgcggattcttagtgttttcagcaagaaattcatagataatcaagccaaggtaagccctagcatcactatttcttagttcttgaattttaaggtttggttgagtatatgatttttaaaattagtggctattagggtttcatttttgtgtagttcgaattatagggtttatttgagttagatttagctcatagcagctgattttggtgtatgggattggatttgtgcaagtttgagcttagaaacctaaacttgggtctttaatggcatatttgaatttagtggctttttctggtattttctggtgggattatgttgtgtatacattgtttaggtactctggaaagtttggtggcacttgcatgatttttgagcaagaaatgaattgttggggaaaacctggtgcaaaccggctaactggttagccagggcctgtaaaactggttagacggttttggcagattccctgagcaactcattttctcaattctcgatcatttcagtgccttagttgggtgtttccctatttcctgggttagtataatccctagtgattatagcagagcctaga

SEQ ID NO: 146885 - DNA, 882 bp, Cannabis sativa
gtatggatgtcaataaccaaagcggtgtgccctggctatttattaccgtgtaatggcaccaagaagtgggtggcatttaagtatgatgaacttccatttatgtgctttcgatgtggatggattggtcatagtcaaaaagattgttctcttgacattaaggaaatcacaggggagaatggtacgacggcaatggcgtataggacatggctgaaagttgaaaatggggttaaagatggattccatggggtaaagggtggcaatacagaagaagtaatttcacaaaaacagagcccacaaggtgtgactaggccgactttaaacctatgtattggcaactcctttgacccagaggggtatgagaatgtgcaattgagaagcgaagcaacaaaagggaaaggccaacaccacggtacaaaggagataaacacgctgcaaacttcaattacagagaggtctcagtaggaggaaaccgggttggaggaaaatgctatgttgcaagatgggcttgggaaacgaattggtggaggatcgagaagtagtgtgggctggtaaacttcaaaggacagcaaacaatccaattgtgatgaatgaaagccaaactctaattgatgtaccgattagtttctcaatggacataccagggttgaaggaaagtctcccctttgcctttggctcaggtcagaactctatccccaaagagcaaagaagaaaagtggctgtgaagaaagatgcaaggaaaagaaagggcgggaaagatgacaaaccgattgaagtttctcaaaatagagattcgacaattgctcaaaatttggaagaggcgaaccacgcgtgtaaagcccgcttagttaatttggaaattagcagttgtttatgattaattat

SEQ ID NO: 146886 - DNA, 713 bp, Cannabis sativa
atttttttttcacatttctaaaacaaatatgggatatatcagtacaacctttttaaaagtatacattataaaagcaccctaattatttttatatagaaattaataatttattaagggtgtgtctggaagtaactgtgtaattactatgtagggtaattactagggtggtagttacacagtttattaattacactatattttaaaatataaggtgtgtttggatatgaggtgtggtaattatatatgaattcttaatatcttgtttggcaaactagttagtaattacatgagaaaataatattttttaatacctaatgtttaatatggaaagtttttagtaattacacagtgtgattacattcaattctcatgggggttatgagaattgaagagtgtaattagaacccctcaattacttccaattacacaattacagtgtatttacatggtcagacaaacatgtcaaattgtgtaattacctctaattacacacaaatccaattacattgtggctttctaaacgcaccttaaaaaaaacatctatctttaacactatgtttgataggaaggcgaatgggtgaatggaaatgagtgcagagagagttgaaaggaaatgaagaatcacttatttggtaaaagaaataaaggagaggagagatggaggtaaaaaatcattccttctattttaggaagaattaaaaaaaaaaaaaaaa

SEQ ID NO: 146887 - DNA, 635 bp, Cannabis sativa
attacctttagatcaatctcagtcatcagatcaaataactccctcatctaacggctgccgtacatcacggaatacatttcgtaaaaatatttatattctatgggggcaaaacgttactatatgttattttcctttcaatagtataattttatggattaaagttaatagaaaaaagtatttaattataaggaaaaaataattaaataacattccataaaatgaaaaagaaaccaacacaacactcacattttaattataatatataatactatttaattttatttgatatctttactattactattgatcttgttattttcaagcaaaaataacatataataaaattaaaatattattaatagggatatgattttgttctgtaattgtactttcacggaatgtattctgtgatgtacgacaaccatggaatatatagtagcgttttgccctcataaaattatcaatctcagtcctcagatcaaatatttattttctatggtaaatgaacaagataattaatctattttgtgctcataaattctacttcgagggttttttcacttttaacatataagtattcaagtctttttatttaactaggtgattgttacgtgccaagtcacgtagtgttagtt

SEQ ID NO: 146888 - DNA, 1041 bp, Cannabis sativa
agttgcatctccaccgccaacaccatgaaattagctggccaaatcggcaatcaaaccgtcactgtactaatcgatagcggagcaacccacaactttgttttaatggaagttgttgcggcagtaggcctgcccatatcggccaccacttgttatgggatacttctgggcaccggtcgcaaggtgagaactgagggaatttgttcttaagtggagctcgatttgggagcaattcgggtcatcacagatttctttccattggagttggggggcgcagatgttatttttggaattaaatggctggaaacattgggaaatatgcaagtcaattggaaaacgatggtgatgaaattcgaaatggcgggaacatgggtgacattacaaggggacccgagcttatgtaagtcacccatctctttgaaggctatgatgttaacagtcgaaaaaaagggctgaggcatatatgattcatgtcgtggcgttgtccgtggccgaggatcaacaccactcaccgatccctgctcctattagtcagcttctcgagcaatacaaatatgtttttgagctaccaccagggctacctccacaacacttacgggaccataccatcaccttaaagccaaacacagggcccatatcggtgcgtccttaccgctacgcccagattcaaaaaggtgagattgagaagatggttcaagagatgcttcgtattggcattgctcagcctagcactagtccgttctccagcccggttttattggtgaaaaagaaagatggcagttggcaattttgtgtggattaccgagctttaaattgagcaaccgtggcagacaaatttcccattcctgttcttgacgagcttcatggtgccaccgttttttccaaactggatttgaagcctgggtatcatcgaattcgtatggcaccaggagatgtggaaaagacggcttttcggactcatgaggggcattacgagtttctagtcatgcctttcggcctcaccaatgcccctgccacctttcaagctctcatgaatgaggtatt

SEQ ID NO: 146889 - DNA, 871 bp, Cannabis sativa
aatcacaattaactgataatttccaaattaactaaacgggcttcacaataaacgtgcaaagaaatcgagaacttactcaaggatcaaacatctagattcaggttacacaaagctaaacgagcattttttgtgaaaacacttcaggaaacttgaagatcaaaacctctcttttcgctttgaacttacttagcaaagaaggttggtgaaaatgagtttgtgaacaaatgctcaatggtatttataggcaaacaacgaaaaaggggtaatcatttcaaaaaaaacctcagacgcctccgttccccccaaaagtgattatgggaaatcaaaaccaatcaagtgcaatcgtcagacttggtgagagaaaattggatttcgaagcattaattgcgttagagaatttattagccaaaaatcaaagggacgccaagtcagcctcacatcgagtcgcgaacagacgcgctagacacgtgtaacccatccaaacacaaagacagctcgaatgaagtctacacgcaacattagaagtcccgtacagactcggggggcaaatgttatcccaatttctacactctgacgtggcatcactcaatggtgacacgtggaatcgactccaggtatctgctcgcaagacacagctcgaacaggaaacttcgtacatttgctcggacgaagtgctctagaccgagcagtggacaatctgcacagaacgccaacacttatcaaatttagctttctatcgtgagtcatcaaggaaatccctataactttgggattagattacaaagatatggcaaactgtccaaaacccatgatcagtgtattctgtatttactatgcaatctttcttcttatatcaattgtaacgagaagg

SEQ ID NO: 146890 - DNA, 857 bp, Cannabis sativa
gccctaggggaaaaatggtcatttgaccatatttgagtttcatttaattaaaagttattttgagggaaatagatgaaatttgctggttatttctccctctcatccgaaccctctttctgtccctaaccctctctatattttctagctaaattgtgtgaattgcttaactctttaagcttggaattggaaggattttaagattggaattgaggtattttctagctgagattatttggaaatttctgttgtaatccttgctggtattaattgttgaaaaagcatgtttgattttgtgaattgcattttcttgatgatgatgataggttgcatgatagtggtttctttgattaggttgagcatgttatgcttagatttttgatgctatgcttggttgagctctacatagaattttcgggcaattctcttgtgtttaattctggttatttctagtgtttgattgctcgaaattaattgacgagcttggctttgcagttcttgagtatgagcttgagtattgctagtttgaagcatgagtttatgtgcgtcatccaatctgaaatcttgagtttattgcttgaaattggtgttctaaacatgatttttaaatccctagtgattcctagtaactttgatttatgatttagaagttttggttaggagttggagtgagtttgattggagtttcttgctgaaaattcgaagtttgcttgctggtttctgggttctgcacccagatgccgcggcatgctctggagcatgccgaggcctgcccctcttggtggaacctgggttttgacctaggtgccgcggcatggtttgggcatgccgcggcccgccctcgtgatttttgggcagtt

SEQ ID NO: 146891 - DNA, 645 bp, Cannabis sativa
actaaattttttttctagatgccgaaataagtagagagtgcatcagtacatcctttttaagggggtgcattgtagaatcaccctataagattatatgtagagaatagtttaaaaacactacgaacacatctcactttttcagtattatatttttagggacacgattttgtcccgtgatgtactttcacgaaatgtatcttgtagtacattagatgggtctcagggtacattagatgagtgtcaaggtacgttactattttttaaccttaaagatcaatctcagccctcagatcaaataactctctcatctaacggctgtcgtacatcacgaaatacattccgtgaaagtacaatcacgggacaaaatcatgtccttatatttttattggtgaaattaaatattaggtctaaaataacttaagaaaataatttttcaaaaatatcgctaaccaatcataaaacaccacatatagaaaatactaaacaccaccacctatgaaaaaaataatagtcactacatgtacccaatatgaatgcttttatattttagaggaaattacactttgggattttaaaagttcttatgataaatgttgcccctgatttcacccaatatacgtggaccaaccaaacagggacacgtgg

SEQ ID NO: 146892 - DNA, 637 bp, Cannabis sativa
cggaccccgaccccaacctggacctagaccctgactcgaaaccaaacccggtcccagaattagaactgaaactgtgactaggactaggacctgagaccagaaccgcacccaaacctagaggagacctacaccgagaccttgactaggactgggacctgagacctggggcccaaacttgtaccgtgacctggacctgacctggtcctatacactcaccgggacctagaccaggttttggaccctgatagggaccagaactcaaacctagaccaagactgtgaccaagacctggacccaaacccaaaccgagacctggactcaaactaagactcgagacccaaacagaaacttggaccctttcctggacttaggaactggacatagatggggggacccagaccagggacccaaacccgaacgaggacctgacctggacccgggaatctgaagtcggacccagacccgaacccaaaacctgccccgaacaaaaactaggataggaacctagacacaaacaaggacaaaacctgaacccagatttgaacccaaaatcggacctgaactcgggacccgaactcagacccagacctagaataagacccaaacatagacctggacctaaacctgaactcgaaca

SEQ ID NO: 146893 - DNA, 698 bp, Cannabis sativa
actttaggcaaggcacctttaactactactgttatgcaagacttcttggttgtcgacctgccctcggcttataacatattgttgggtcgtccatcactgataggactagggacagtcagttcgatcaagcacctacctttaaaatttcaaacactagatggcgtgggagtggtgcgtggcgatcagatgttggctcgcgattgctattgcatagagttgcaacatagaaaagccgatcatcagttaatgatggtcttggcaggagaaaacgagaagaaagagaaagatctggatccctgagttcaagatgaaagaaatatgcttaaaccaattgaagaattggaagaggttattctcgacccaggaaatcccaccaaatgtgtgtacattgggaagaacctggacgagcagctcaaatagaaattaataagctatttgaagatgaaccaggatcaattcgccggatgtcatggggatatgatagggatcgaccctaagattatttgccatcacttaaatgttgatccaaactacccggcaaagagacaaaaaatgaggcccctggattctgagaggcaagcactaaaacatgaagttaaaaagttgatagtcaacgattttatacgcgaggtgttttatccctcatggatagccaatcctgttctcgtcccaaaacctaacggaacttggagaacttg

SEQ ID NO: 146894 - DNA, 657 bp, Cannabis sativa
  modified_base (615)..(618): a, c, t, g, unknown or other
ctccctcatctgacggctgccgtacatcacggattataatccgtgaaagtacaataacgggacaaaatcatatccctaaaaaatttatatataaagagaaatgccattaaaaaaatttaaaattgtatttttttttctttcttttttataaaatagaatactagaataaaaaattatgccaaatgaagtttttttttttttttttttatagagaaattgaagtaatattaaaataatattattaagacaataaattaataaaccaattaattctatataatcaaaaactaatttcttaaccgaaaaaaacaatcactaaataccaaaacatataaattttacatgcttttagaagctctaaaacttgaccaccaatgtaacgccgtaatgctaaggcacgctacagtgctttttcagttacagtgtgctaatcaaagatttatcttgaaaaacgtgtcaaattaaaacttttgtaataaatattaaactttataatttataaaactatttacaggtgccgggatcctgttttcaaacttttataaacaacattccaaaatacataatattcaggtcgcacaacgactacaaaatataaccccagatgtcccgagnnnnaacactccaggtcgcgctgcctcgacatgtacaacctca

SEQ ID NO: 146895 - DNA, 505 bp, Cannabis sativa
taataaccctaacttacatactaaataatcactcatataacatattacagtatgctcaaaataacatctattgagggtaataaccctaaatcatgtcttaactggattaacgatattaccatacatcatcgctttcctaccttcataatattctagagtaataaccctagatcgcatttaattaaactcaaggtactagtttaccgagtccagcttaattatgccttaggcgcataattctttattccaacatattaagcatggcatcacactcaaaatcttttacttactagggtaataaccctagaccatataaccgctcattttagagtaataactctaaacccagtttctagttactcatatatatcatattccatataggtgtcattgcgcatatatttacgcgctaattactgtcttacctgatgtcccacaaacatggaaattccaaatccccaggtgctcctaaccaagtgttggtaatcctagtcacaatcccggg

SEQ ID NO: 146896 - DNA, 847 bp, Cannabis sativa
  modified_base (27)..(31): a, c, t, g, unknown or other
gttaaaccaagaaatgccgttagatannnnnttttaatatataaagatattaagtaaattgacaagtggtaatcgttcaagtcattaaattttaattttttataaaaaaataatttaaatgtaccaataacaaaataacacgtagataataatctgatatttaacgaccatgtaccaataaaattccaaaagtataatttaaatattattaacaccaaaaataaaatttaagtattgcaaccgagatttaaacttaaatatttatgtcacaaattatttttaaaataatatatttcttcaaaaaaaaaactaatatattttaattatttaattaaacaaatattaatagattgctaacaaaaaaattattcttcgcaaataaaattaattaattaattagtaatctattaatttatatttgttcaactccagtttttaatttagtttattgtataaaattagcaaacatgattttattttatcaatttatttgatgtacaaaatattcagaactttgaaaaatgggactatatattttcttcttttttgaaatgaaaaattggactatttcagaaatacctaaaaaataataaatactttatatatatatataaatatatatatagggcaagactatggtagaacctagtaaaagttccctaccggtacgtggggaactttttttaaccattgattttagatcatgtggttattatgatgtaaggtgtatactattacgatagaactgctggtatacgattaaaactttatacatattataataatatttaataatatttatcttttaaaaaaaatttattaataattaaaaaaatttattaatttt

SEQ ID NO: 146897 - DNA, 575 bp, Cannabis sativa
  modified_base (547)..(549): a, c, t, g, unknown or other
ttctcatcaatgtaagtaatttttcatgattatctatgaaatttttagataattttgaatttttgagaatcttgtaaacgattggtatgtttttgctattgttttgcatattgttgtggaaatactgtatgtgattgaaagagtgagttatttttgattgtgtattcaccagggatagagaaaatttaaggggaagtgctagcgaaatttttcttgagtgttaagagaattgagtgcgaatgggacccaaaagatcaagagtgagtgaaagaggtgcctcttcatccaacccaccaaggtcattggggcaatcttatgtagatagggcaaggtttgtaagtgctgaagcacaagaacactatctagaattgaagaataggccattcattgatgataggggtattgaaattggtgaccttagaaatccaagaatcgacattcatcctatatttgtgccaataagagaacaagtgataaactagggatggtcgaaatttgtgtttgttaatgaaagggtcaacaaaacctttgttgggttttatgcccnnnataaaactctttacaatctgattagt

SEQ ID NO: 146898 - DNA, 825 bp, Cannabis sativa
tgagttctgcttggagccatccttatatagagcttttgaaacaggtttggctccaggtgccaaatcaataacaaagtttatttctcgttgtggctgaaatcccagtaacttcacaagaaatacgtcgagaaaatctttaacaacgttgattacctcaggcccaaatgtttcgggtctgctggattcaatcacaaccgctaaaaatcctacacatccactgtgtagtagatccctagcccttaatacataaataattgggatccgagacccctgaaccccaacatgaatggtcttcaccttctagctgaaaagtcgccattttccgcttgcaatctatactggccaaatacttggacagaaaatctatcccaagtataatgtcaaactctgttaattcaaactctataacttcagcactcaactccctatcttcaatcctaactgcatagacctaatgcgcctattggagataaccaactccccactaggcattagggttccaaaccctctttcaagaaaatcataaggcctacccaaaagatcaattacccgtgtagccacatatgagtgtgtagctcccaaatcaaataacacagtataaaaggagttgttgacaggaaacaaacctgtcaccacagtaggattggctgtagcatcagcttgagtgatgacaaacactcgagcaggtacgggttttgcatctggcgtatgctcttctttctttgcccaagggcaatctttcttgaaatggcccaccatgacgcactgaaagcatgtcttccggttggactctctaagataatgtttcttacaatgtgggcactc

SEQ ID NO: 146899 - DNA, 626 bp, Cannabis sativa
tctcaatacttttattttgcttgcacttaacttccaaaacttcaattttggtggcactcaatactcgtgttctattaacagtttaacacttccatttaattttggttgttaactgccatgctggactgtccatgtgtatatctacgtgaacgtaagtgtaacactgtccacaattttattggtcaacgtaaaaaatatttaaaaattaaaataaaattaaaaaatagtaaataaaaaaaactttttttttctttttagttttttttttcatttaaaaaaattaaaataaaaaatcattaaaaaaacaatatttttctttttcttttcgggataattacggtaaaagttttcaaaaacttaaggttgatgcagattagtctccaatctcaaaaattggcgataatagtcctgaggtcaccatttttgttagtcagttggtcctttctaattgatctgttaaaccaaaataaaatatcacgtgtcaattttttattggtccaaataataattttaaataaaaaatttaaaatgaaataaaaaacaaataaattattttaaaattaattaattaatttatttttattttttcacaaaaccgacccttacttttctctttccccttcgtc

SEQ ID NO: 146900 - DNA, 612 bp, Cannabis sativa
gagattgaaaatgatttaatttttgtgttttgaaaaagaaaaaaatttaatctcctataatatatatacattaatatttatttttctgtacaaattaaattatggtgtacataattaatccaacaacaagaacacaatacaacacgattaataataattcaaaaaaattataggatgtctctacaataatgtgtcttttataagaagaatatcgatgtactttttatttattttaacattcagaaaaaaaatttagtcttattttttttcataatcgtgtacgttataataataaaacgttataattattgagaaattcgaaataatttatgatatagaaagcaatattcgagatatttcacttgtatataaaataaaagagtcacgcatgtaataaactgtttaaacactattttttggcgtcttgaatttttctaaatttttcaaaattttgcaagatgtcttaaataactataatatacacgactaaattttttttagatgacgatatagataaaggtatattaatgcacccaatgtgcattgtaaatttttttcaaaattatatatattaaacttggcctataagaagaagaaaacaaataaacaaag

SEQ ID NO: 146901 - DNA, 735 bp, Cannabis sativa
  modified_base (417)..(417): a, c, t, g, unknown or other
aaagcctatgttaagaagtgcgacaaatgcaagagattttaaaagatacctagagctccacctaacaagttaactcagatgcaaagtgtgtcgcccattgccatttggggaattgacatgatcggacaattacccaagggcaaaggaggagtgaaatacgcagtggtagcggttgattacttcactaagtggacagaagtcgaaccactcgcaaccattacatcaaagaaagttcaagacattattgtgaataacataatctgccggttcggattgccgtacaagatagtttcagataatggcaaacagttcaatagccaatcattcactgacttttgtgcgaaccatggtatcatcaaaagtttctcagtagtggctcatcgttaagagaatagtcaagttgaagcagtcaacaanaccttgaaggatacactaaagagaaaactcgaagatgccaaaggaaatcgaccagaagagcttcctaaagttctatggtcatatcggacaactgagaaaatggcaaccggacacacaccattcgctatggcatacggatatgaagctatgctgcctctagaactcaagccaccttctcacagaagagtacaatcaagataccaatcacatactcttagcagaatcactcgatgaattcgaagaaagacgagccactgcaaacttgaagttgatggcccatcaacaaaaagtagctcgatatttcaataaacaagtgaa

SEQ ID NO: 146902 - DNA, 758 bp, Cannabis sativa
taggaatggctattaagttaatagagatatttgtgctgaaatttcttaatcttaatgtatataattgttacatatatgattataataaaaaaaaatagttaaagtattttattttacgattttgttacgaatgtattattttttagacattaagtgtcaacttagaaatacatgacaacatattataagattatgtattaaataagttaaaaaaaaatatgttgctacatgtttttgagtaagcacttaacggatttaattgacatttaacaatcaaaaaaggtacgacaacaataaaattgtaaactaaaatacttctactgttattttttttaattagaatcatatgtataacaattacaaatattaaaaaagtgttgctccaaatatctcaagttaataaaccttgaaaagttgaccccttttcttttattttttctaaatttaaattttagagtgcgtgcataggcattcgaaaacaactttctaaattgttagaaaaaacaattatctaataattaaactcttagtaatattcattaaagaacaaaaaaattcataattcatatgtgttattatataaaaaaatttatatgaagaatacaaattgacaatttatttataaaaatatatttagaaagtgtgggtaatatatcattttaagggttaattttacaaatgcacaaaaacaacaaaaaatacggtttcatagaattttaaatatttttacatttttttgattttatttatataaaata

SEQ ID NO: 146903 - DNA, 511 bp, Cannabis sativa
aaccaagaattctgttatatagacacactttatatagaatagatatataacaacacaaaaaagattatatgtaggtttgttatttattaatatgaaaataagaagaaactaaaaaaaataagcaaacaaaattcaaaaaaaaaaatacaagagaaaaaatacataaaaatagaagaattttttttttttaaaaaaaaggggtgatatatatactgttgacctcagatttggcctaccaacaggcgagtcgaatttagtactgatgatttgccacgtattactcaattataactgaaaagtaaatagacacataatttgatagaggttcgaccccctttcgttatcgagtaacgacctacttcccttttacttgtactgataccaaatataataccacttagatcactatagtaatgggatctaaagtagctctcttaagattagaaactgagaaccatagttggcaaatctcaagtgagaatagagcagtgggcgtgagagagagagagag

SEQ ID NO: 146904 - DNA, 1313 bp, Cannabis sativa
tttttgttgttgtttcgatgttatttttatctagttttcttattgtttttgtgttgtttctatagaaaactgtaaaaatgtaaaaaaaaatcttttaacttaaaatgtaattttttttacaaaaatggtgccaaatgtaattatctctaaaaaagatcaacaaagtattaaatttttactaaatgatataaaaattctattaaataaataaataaaatgtaaaaaataattaattacattagtaagtgacaaagagtaaataaaaagtaatgtttattatggtattaaatttagcacatgctatattttgtgctaaatttgacacatcttttagcatgtgctaaatttggaccaccattagagttcacttttataaatatgacttgaaatatgcatatatgcggcatttttagctctttattaaagatgctcttaatatgtacatatccttaatcactttaattataattttttttttcaattatacataattttttaagttttttttacttgttatgcaccgcttaagtgaagttttcttataatccttgtttttatatattttctcaaactaaataagattatcatagtaatttgtatttttttgtcatgtttggagttgtgcgtcatgttttgtttgtaccaattgttaatgattttattattttttttaaaacctcaattttttttttccctttttctcaaaattttttactctattttcgtttttaaaatattttttaagtcttttttatattttttttatcatctttttttctcctgtttttttcttcaattttattattttttttttctatttttcttctaacttatttaatagtaaatatataatagtgttgaagactatatgatcagggccgaccctgagttgaaatgggtatggatcttgtgcaaaaaaatttttttggactcttactataaagatatatagtttttttaaaatttattaaaaaacatatattttttaaaagatatatttttttatttggacccctaaaatgagtgggtcctaggcgcgggtctagcccgcttatggctaaggccgaccctacatatgatattaattattttgagaaaattgtattgtatacccactttattttatttatgttttaatttttacatatattttcatattctttaagatatacccacttttataaatgatatccctattatacccattgttgcccctaatttttctcaatatacgtggaccaaccaaacaaggacacgtggatcaagcaatgtacaatccaaaatatttgctaagtctttgtgctgtaaggtgg

SEQ ID NO: 146905 - DNA, 1264 bp, Cannabis sativa
taatcattctcataaagaaatatgagaagaaaagtgaagaaaaattttgctatagtttctttactctaaaaattacactaaaagattgctaaagaggttttcttttaagaggtctcatctcttccctatttataacgaaagtgagtgaattaaaataattaataaattaattattttaatattttctagaaatttctagcataaatgaggtaggtgagatattaaaagggtagaatggtaaaatatacaatgtgcaatttattggctgagataaataaaaaaatgagccaaatgaatataaaattataatgtattttgaaattgcatttcaagacaatttgaaaatagcggattgaaggaggagacgacacttggcgcacatggggaggctgctggagctcggattgaacgagaggcagacaagtggcgagcatgtgaggctactagagagagaaggttgctggcgggtcccacgcgtggctgactctggcatgctgggcaggaagagatcagccgcttcacgcgccctgtttgggccttggatttgcgcacagacggcccggattgaggagctgggctacgcgcgagtgggcctctccaaggtctgaattctgatcctttcctttattattatttttttaaaatattatttttactccatttcttcacttcaaaataccataataatttcaattcctacaaaaaaaaaaaagataataaattaaatttaaattaaatattttcaacataaaaatatatcttattaatttcattaaaatattaatttatttttaatttattttaaactttaggcttattaaatgtatatttttcaccattaatcaccttgcagactggacaatcatgtccttcaagtcattacacttagttattataatgtatattatacgctaagtaatctaataactatttcacctcgtcagcacttctttacatacagcgaggtagatgcctcactatacgttgtctatgtctcccttgggattttgccttctaatgcaaaacagtttctcgtcaatacgtgaatcaatagtttgtacattttgatctcgcttaagactgcgtagtcagcaagttataaatatactctattaattttgcatttaatgagttattctattttttatttaattatataattactattatatttattctctgagactgacacgtgtcaccttttaaagtacaaccgaatttcgggtataacaataaccaaaaagatattttcaatatcattttc

SEQ ID NO: 146906 - DNA, 638 bp, Cannabis sativa
ttcacatgcttctgatggttgaaagggactgggccctcattcaaacggtgggcccgaaggccataaaaatcgtctttaaatttatgccccttcttggggataggaacaagttcataaaaatacaatatttcagccgaactgggtgaaccctagcttcgggcagcataaaaaataaataagtctaaaagcaggcggtaagcttgagggattagttggtacggcataaggccaacaaaaacgagaaagtttataaaatagtcttggagagggagcatagccccggacatcaagtgggcctggctccaagctccgaagcccccataattgtggttgggtgtctcctcgtcccgaggcagctgctgttaggtcctggagaccgaagttttgatgcctgccaccaccacaatcttttcaagctggtgagcgcaggtcagtgtggagtggagctcagccacctcccatccgttggcgcgggacttgtaattctcctgggccacaggaccctgcatgacctcctccagggtggccagacgaacttctcctttcctggaagatttggaaccaaatgcagaagcagacattttggttctgaaaaaatcgagaaaatccagcagttaggccccaaagcaaaccctaat

SEQ ID NO: 146907 - DNA, 514 bp, Cannabis sativa
gtgagatttattgcctgagaaatttagctcacagtggagaccctttttgagtgaatgacttgatttgagccttgttcttcttggctgtcttggtgagacttatagaaggtgccgactttgatttaaagaacaattataagttgtgttgtgtggtttgactggttcagtcagctcaatgaattggaaatgtggtgagagaactgagaatcatacaatacaagatttctttagtgaccaaccatgagaatcaagatttgattagtaagttaatgttggtttcaagatgttctgttatgttctttttcttctagaaattcaggttggttggtagtactaagcttaaaatttaaaacagatttttattggtccaacctgaatacagtctttctcatcggaaaacaacatttatatgtttaatttgcttgtgaaaatgattggatagtattttgatactgtatattgttcgtcaattttgatgcaaattatttacaaatttatgacgcttgctagtatt

SEQ ID NO: 146908 - DNA, 643 bp, Cannabis sativa
gattaacacttctttgccggcacgtgagagagccttcgcatcccaaccttgaagctttttcctaactctgtctttcagaaatcccaacacagcggacttgtttcttcccattgtactggggaggcccagatacatactcctttcgtctgcttgtggcatttgtaacagagtattgatatcctcccgaacatgatttgctgtattagtgctatagaagattgaagacttccccaagttaactttctgacctgaagcacattcaaattgacgaagaagatctttgatgcgattggcttcttgaagcgtggctttgcaatacagataactgtcgtcagcgaagagcatatgagacactttaggagccccattcgccactttacatccatggataaaacccaatgcctcatatctacttatcaaagcagatagaccttccgcacacaggataaagatatatggcgataaaggatctccctggcgtataccacgagatggaaggatcggccccataggcgagtgatccgaaggagaagtttcaaggttgagtaggcgagcttgcgtaaaagtttggagccaagaagttgaaacaagggcccgatccaatctaacttctatccatcgagacgttccccttcctttttcc

SEQ ID NO: 146909 - DNA, 561 bp, Cannabis sativa
taagctcaaggtcctatttttactattttgaaaaatacagggtccattttgtcatttaacaaaacacagggtccaattggtaacttttacaaaaatacagagtccaaaatagtatttacccttaatttatcaatgacttctcgtttacccactccaagagcccactccagtcggttaccttgagtagaaattacactatatatgggaaaattataagagtttacttttttatggcataaataaataatgttaagggattataagttttttctatttttttacatttatatgagctttttttatgccatatttttgtaaaaaaaaaagatggaaatctcatatttgtaaacaataataagttttgccagaaaagtcgtcggcgccggaaaagtcagcggcgccagaaaaatcaccgaaaaagtcgttgaaaaagttagtgtcacgaaaaagtcactgtcaaaatccactactacaaaaaggggtattttcgtcgttttataagtgacacataaagattttgcgtcggtctacagaaccgacgtgtaatccgtagacgtaaat

SEQ ID NO: 146910 - DNA, 635 bp, Cannabis sativa
ttgtaaagtcattttttagcaaaaaaggtgtcaaaatattttttttatttaatatgtatttttcttgtgcaattaaactatttttattatagtgatttcgcgcctctaattactattttcttttaaggaaagattcattctcagcttgtctcattttgtttaggaaatttcttataagagaagaaattttcttatggaaagttgtctagttttaggaaactttgacttttatttttttttaatgattttggttttgccttgataagatcagatcatataaactatatttggcaggtttgaagtccaaattcgtgatcttggtcaaatttggaaagtttcctttctagtcctgatcttttgttgtagagttcgattatgttgctgtaaatcaggaaattttttaaggaatttttgtacagttgtaaaattaatttttgtgattgtctctagggttactatgttctacaaatagaacatagagagtagccaaacgatttacgtcttttagttttcatttttgcgtattttcttatttgtcaggagagagttctttttgtgagaacctagttgttcaactatattttagtgtttatgttattgttcttatactgctcttaggatcggttgaacaactt

SEQ ID NO: 146911 - DNA, 661 bp, Cannabis sativa
gtgttctttttgtagagttgttcgattgaaatatcaagaattaagatgccattggtgtggcacgcatgccatgtctttagtgaatccgaatacgcgcgtgtagggggcgcatttgcttggaactggtgaggtaaggcttggggtgttccttaaaattcctcttacccattgaggattgacacaagtttttctgatgtttctttaggagattttttacaactggagaagaagactttgatcgagtaatagccataaataatgaacaagcaaagtatttatatgagaaactaataaataaatggggaaaatgtagagagaaaattataatttaaaaacaacaacaaaaaaaaactgcataaatttgatttaagtaaccaccaaaaactgcccctaagacaataattggatgtgaacacaagaagaagatgatgaatagtacttaaatgagatagtgggtataaactaccaaaccgtggtgtgaaagagagaacaattgtattgaaatgatgatcacattgaattaaaagaaaaaaaaaaaaagacggccacaaatgtgacaatacacagttacatcaaactttttaacacttaaaatacaaaaaaaaaaaataaataaataaataaacacatgcaaaactctaggctcacacctgtaaaaaaa

SEQ ID NO: 146912 - DNA, 575 bp, Cannabis sativa
ttttaatactcacaaggccacaaggaagtaactctttaactttaaaaggatttttccatcttgaaataacgttacttgtcaaagatttgaattttgaatgaatcactaacacttgttgtcctattgaaaactcttcctttaatttctttttatctcgaggtttttttgtcttttctttatgattagtctctcgattatcttcattgaagttacaagactcaaccatattgcatgtattctcaatattggcttgattagaagacttataaatatcaaacttgatttcttcatcattagcactcaaggttaagtggcatcttcgaacatctataagtgcatcaccagttgctaagaaaggacgcccaaggatcaatggcatattcttgtcttcttccatgtctagtactacaaaattagctagaaatactaacttacccactttaattagaacatcttctattactccccttggataagaatgatcgatccgccaattgtaacaaaattgttgtgggctttacttcaccaatacccaacttttagaataccgaaagtgacattaaatttatactagc

SEQ ID NO: 146913 - DNA, 1148 bp, Cannabis sativa
  modified_base (286)..(287): a, c, t, g, unknown or other
  modified_base (960)..(973): a, c, t, g, unknown or other
  modified_base (1101)..(1104): a, c, t, g, unknown or other
gaacctacgacattgggttttggacctctcactatttatcctaatgaattctttccttggcctttatcttttatagaatatttgagactttttcttagataaataaaatctatatctagaagtcgagaagcttctatagatttccattagaaaatgcacaagcatcttactaaagtaagttgcttgcattagagtatgtaaattaccaggtataccataagtcataggtttagataaactcaaatatttaatactaggaatatgaagttttgttaagtccattgannagacttattttcaaaatttcctttttttttccttgtaattgaaaatttttggttattccatatgaatgggtgtaaccatagttctcttggctttgcttactagttccttattctgactatccattacttgtttaagctaataatggatttttatcacaagtgtctttcaagtcataacagggtgagttccttgaaaccgtcccattataacaagctactatgactatctgtctaagaacataagttgtattgacctcatcatctgtatcaagataacagaggcactgggaccatcttatatcgaataagatgctacaacagtttggaataaagaaaaattatctcctctacttttctactttattttctgatttagtcatattcttaaaaaaaatagtatttattgaaacaaacactttcttatctgaatgaccaaaggatggtccactgctaatcactttagaatagctatcaatcatgcaaaccttggttaaccgttctatcttttcttaagttcacgatcaaaacacccatcaataagtaatggtttacactaagtaaataaccattccatcattctaaaaatttattgtcactagggtatttccctagaagggcttaggcaactactagtaactatagaccttttattatcatcaatatgcaaattgannnnnnnnnnnnnnaagtttgaatataattcaaaaaattcaacttaattatctttgaactgcatatcaaccacatattttcccactcctatcagtttccaagatcgccaaccacttaacttaatgtttttcaacattgctannnnttcatgaaatttttcaaacatttccaatttctttgcataaggta

SEQ ID NO: 146914 - DNA, 827 bp, Cannabis sativa
  modified_base (767)..(775): a, c, t, g, unknown or other
tctttaaaaataaaatacattcaaaatcttaaaaagaccaaaatcttaaataaaactagcaatacgtggctcgacacgtacattcacctagtatatttatgtatatgtcaccatattatatatcaacacctataaaattaagagtcgtgtattgtatttttaaaaataattgccgacagttttaaactattcagttatttagagcttctccaaggaatcagtattttatataaatgccgttcctttttgttccaaggaagcactattcaacacagcattttgaggttaatgctacagtgcacggcatatatgctgtgcactgtatacacggtatatgtttttttttttttaaacaataaaattttgagaaattctatcatacacctttttaaatgtaatgtattatttgggcacctcacaaattttttttagtctaatatttttatagtcgtgcatattataattatttaagatattttgtaaaattttgaaaaattcaaaaaaatttaacacgctaaaaataatgtatctttttaaaagtggtgcactgatatactcctacctattttagcattcaagagacttttttaacctattattatttcatagtcgtgtacattattgttattaaatatagcctgcaaaattttgaaaaataagagaaatttaacatgccgaaaataaaattcaaactgtctcttgtatgtattactttttcatttagaggagtacattgttgtgattttagttaattaatatgatattannnnnnnnnattttattaaaaaaataatataataataaggaatatttttttagtgtaattt

SEQ ID NO: 146915 - DNA, 565 bp, Cannabis sativa
  modified_base (386)..(386): a, c, t, g, unknown or other
aatgcaggtttggctaacataaatgacaaggtcgatgaagaaagccagaccatcatcctgttgagatcacttccaatcgcatatctggaagtcaaggtagccatatatcaagtatggcagagatgttattgcattgaaagatgttcttgccgcacttaagtcaaaagatttcgagttacaattggaaaaggaatccaagaaagaagaagtgtatttggcaagaggaagatcacctaagaaagtgaattcaatgagtaaacaccatcactctcaatcaagatcgaagtcaagagagaaggacacagggaagtattacttctatggaaggtctgaacacttgcaaagattttgcaagaagtacaaagaacaacaaggcttcaacaaanctcacaatggagataggaaggagtattggcaccaccatcatggtaagactctgctgcaatcgctgaagatagtgacgactgctccacaaacggagagttgttctctatgtcagagtcttcaataacagggagtggattctcgattctgaatgcatttattgttgggaatattttaccag

SEQ ID NO: 146916 - DNA, 903 bp, Cannabis sativa
  modified_base (740)..(742): a, c, t, g, unknown or other
atttaaaatgatgtttggttgatttggatgtgttcatgttggtttatgtgcttaattgatgattggatgttaattccatttttttttatgaaaaatatttttattttaattctagaagtattttttttggaaagttggtgaaaaattaatcaattaggcttttatggatctcaatttggatttaaattgaattagttataatttttttgaagtttgaaaaaatttctaggctagcattttaacatgcgtgcgcggatggagggacacgacttgatgctcactcagacaaaaggccttcagacatggccttgtttgaagtttcatcccgcctgaccgagttttcacgcaaatggaagctctgtgcaacttcaattcttagccaaaccccgagtttgcccatttttctttctttttttttttttttttcattttttcaacatttataaatatttttcaatgaaatgaaattcaaattttgaaagaatttttttgtagaatcttatttttcaattaaaaaaataattatcatattaaaattaatttttattaattttatcattaatttaaattgattttagatattagtaggctttaaatttaaaaaattgatttctcaacaaacttgctatttcggttattttaaaatttgactattttttttattttatttattaattttaattataagatcacatatttatatatataattaataaaatatgaaatgatcttattttgannntaaaatattaataaaatttaaaaataatctagataaatttcaaattgctaaccacatcagttttcaaaaatttgttaatttttaaatatattttttattaatttaaattataagattagataaatgttaattatttgatatttttttttttgatcaagaag

SEQ ID NO: 146917 - DNA, 531 bp, Cannabis sativa
atactagtgtttaccagtcaccatgtctcgtctcctaatgcgtagtgaggttgatgtctcaccttgtacatttaaagtcgtatggtttctcgttaatgtacgactcaacagttggtgtatcttcatcttgcgtaaaacctttcaatcgacaagttgtaaatatactctgtcaattctgcattaatgagttattcctttttcaaatataattaccattacattcattgactcgtattcttcccaatttgacacgtgtcctcctttgaaatgatagctgaattttgggtataacaattacccattaaaaagtattttttttaataaaaagtgctttttaaatgatcacatagggtatattcatcataatccctttttaaaattttgaatgcctttgattttggcagcttcattgcttcgagggtcattattagcattaattttactcgagtgatgatctgtcttacgcctcattacttcgtttagttcaacatctagggttcatatattttttttattaggcatattttatgt

SEQ ID NO: 146918 - DNA, 516 bp, Cannabis sativa
gtcctttcgaactgtccatcagtcagagaatggaaagttgtactaaatttcagtttggtacccatagtcgctgaagattctgccaaaacttagaggtaaacttcgaatctctatccgaaattatagactttgaaacaccatgcaacctcactatctccttaatttacaaatctgcatactgatccactgtaaatgttgcttttaccggtagaaaatgtgcagattttgtgaatcgatctaccacgacccaaattgaatcaaataaacccgtggttctaggtaatccaaccacaaagtccatggtgacatcctcccaattccactcaggaagtgtcaaaggctataacaaacctgccggtctttgatgttcaactttgatctgttgacatgttaggcaccgagatacaaattctaccacatccttcttcttcccgctccaccagaagtaggatttaaggtcttggtacatcttggtagtgccgagatgcaacaaatagggagtgatatgagcttctt

SEQ ID NO: 146919 - DNA, 597 bp, Cannabis sativa
  modified_base (417)..(417): a, c, t, g, unknown or other
attaaaaaaattaataaaattaattttattctgaccattagatttttaattgaaaaattcagattctacacaattctaccaaaattttactttttgtttcaatgaaaaacgatttttcaatcaaaaaatatgaacaaaacaagattggtgcataggggtatgcaatgcatactcctgcgtgcagcctgtgttggtcgagggagctcggcacaagcaggccttcagacagggccatgtccgagaatcctcggtcagcccgtgtctgaaggcgcgtgctgtctgagtgaaaacttaaccccgcacgcgcacacatgcatcctatttcagatattttcatccaaattcaaaaaatcataaccaattcataaaaaatcaaaattaggttttgtaaaagcctaaattcattaattttttgtntactttccagtaaaaatatttccatatcgaaataaaaaatagttttacaacatatacagtgatttccaaataatcatcatacaagcacataaaccatcatgaaactatccaaatcaacacaaaacattgttttaattcatatttcaagaaagtaaattattaccatggctctaaggccag

SEQ ID NO: 146920 - DNA, 1046 bp, Cannabis sativa
  modified_base (42)..(48): a, c, t, g, unknown or other
taaatgcggtgtatgattttaaaaatcgtatagctgtgattnnnnnnnttttactgggtcaaaaatatcgtgtattaaacatgtctttaatttctgaatttggatcgacataaaacttgattatagtgatcccaatggcgacctggaaccattcttctttctgaggtcgacaatgtatgtcttacgtcgatcgcgggtataaagaaatctcctgacttgcgaggattatgagcctcactcctgttagttggatgaagctattggaagtcttctcatagcgagatggtcatctcgcatacttgttcttcgagccgatccgacttttacccttagtttgcttattgcaagctaatgtatgcgtcactcttcttcggtgtctcgctattcacctttaacgacatatggcttctcgctaatacactaagtgccagtttgtacattgattcctcacctaagaccttacagtcatcgggttacaaatatactctgatacttacgtaattaatgagttattccataaaaagctattccaccgattcacattccccttatcttgacacgtgtcctccagccgaatttcgagtataacaaaatgaatttcttcataaaaaataaataattttttacatcgcttaattaatttgaaaattttaatttcgtttttaattctcttaatcattcaaaatgattttttttagatctaaattaattttttaagattcattaaaaaaaatgttaaatcttttttatttttattttgaaggggtacgatttgatagttgtcaaaatttaggaggcaaaattgctaattaacgaagatacgtcaacatttaaataaaataatgagacagaacctaataaaaggactattcttaataaactgtatattttaaggggcaaaattagtattgttgaaaattcacatagtaaaattgctaattattctaatttttttagctagatgtattttctaattaatttgtaaagggataattgcggcaaaagtctccaaaaacttgaggttgatgccgattagtcctcaacct

SEQ ID NO: 146921 - DNA, 843 bp, Cannabis sativa
  modified_base (332)..(332): a, c, t, g, unknown or other
tttcgaagaggtaaaaagccaacctttaagcttgtatttccaaatctaatctttaaggttttatcctctcagaaaaatgtggcacaatctcatgaaactcctgagccttcgatcactggacccacattccaaccctcggagtattttgatggtgtgtttcaaaagaggcctaaagctggtgctgctgctgctgcagaaatccaggaagtcaagaatgaggttcagcttgtcaacaatagtcttgctgccatggaggaacttcagcaagagatgtccaagcagtttacttccttggtcgagctttacagagactaagtttttatctttttctntctttgcttttgattggacatattactatattttcttattttatctttggcccttagataaacaaaaaaggggagtaatattttttttttaacagtttgtttggaccaactttggaccctttttccaggaggagttgtgtttagtacttgtgaactattttgatttaaaagttagcttgtttctttcgttattgttgatttttgattgtgttactcaaggggtgtagttacttgttatggctaacttgactttgcaggtactgtgtgttaaaaaatattttgttcatctaaagagccaaaggaggagattgtaaagtctttttttggcaagttagttgacaaaatattttttcgtttacggtaagattcttgtgcaatcataaccgatttcttactttgtttatgcggtttatagttactattttccttgttaggaaagttgcacttttcagctgaaatttcctttgtttggaatcttcttaaaagagaagcaattctcttttggaaagtt

SEQ ID NO: 146922 - DNA, 932 bp, Cannabis sativa
tacacagtataaaacatacacagtatttttgaaaaaaaattctgccccacagtacaaaagtaaaaaatttaaaaatttctgtaaactaattttaaggagtcctttcataagttgtagctaaaataattttaattttaaataaatcacatattattcccaccgtattttgaaagaaaatagagtaatttgcggcgaaaataaaattaataacaaatttattattttcttatattttaataaaaatattacatttatatcatgttttgtaattatatattagggtacaatattaaaagttgatgtaaatatattataatttttttttccaaatatgagttatggttagtgattattattgtaataattgaatggtatttcttttcaatattgttttaagattgctaatagtgttgcacattttttagcaaaattatcactttatgagattatcatgtttggtggtttggtcacttgattgtattagtactaggggtgtttattagaccacttccaatatttgtaggtctattcagcttcgatccaattatatattaaatgttaggttttatcatctgatccgatccaattaatttcagtcataaaattgatccaacatccatttgatgttagattagatcaattctatcaattggatgtatttcatatatatttattggtttaatttagatttatccaaaattttagacctaatatttttttgatcagaccggatccatataatattttaggttaagtatatattagattggattagattcatcaaatccgaaaaaaaaaaaaaaagtaaacttttaatattaattatcatatatacaagtttatattttacgtataataatataaaatttaattactcatccaaacgaaatgaaaataataattagttcaattggatgttggatgtattagat

SEQ ID NO: 146923 - DNA, 529 bp, Cannabis sativa
acttttctaagtctcatttcgagaagaagtgagcacatatatctttaggagaataatcaaagtctcatttcagaaggaaagcgagcacacatcaacggctgaagggatgtgtttcagaaattagcaaggatggattacaaaaggttgtgtcgacaaaggtatagagggattcaaactttgtataagtcaattgcttttgtaatctttgatactttactaattgattttatttttttgggcgtgactccatgaactaataatatttgaaagaatataccacgtataattctcttgtgtgaatttttactttctacaatcgtttgttgctgcaagtattgtttctatgtgagcaagtaaccaacttgttactacatgtttttatagtaaggttttaatactcgttattgtatagataaatttatttttgcaaaacaccgaatttcactttaattcgacatctcctaaatacaaaactgtatcacaaacacaaatgtgtattatatatattttttaattttttaattaaatt

SEQ ID NO: 146924 - DNA, 559 bp, Cannabis sativa
aataacccttaactaaaagaaaactactcagaattagacattataatgataatcataataaatagtaagagtttctctctctaatttgtagctttttctagacttctcccattcgtagtgtaagaggtcttatttataataataggaaaatagatttgaatcttattagaactaggattcaatttatagtggacagataaatccccttagaattaggattctatttataatagtatcaggaaatatctcactaaaagaaaagataactcatctgttgaaaaaaagataaaaaatcgcaactgtacttgaaaagctatctttatttttgctatcttttttccagaaatttcctattgcaacgactgatagtattttggtcataactctcttgatattactcggaatcggacgattgaagatgttctgaaaagctaagaacgagatctaaaactttcatgttgagctccaagtccaattctgcctctaagtttgtccaaattggaaattaagttccgccttgtacaattgagctcgccgacttccactattttctaccaaa

SEQ ID NO: 146925 - DNA, 882 bp, Cannabis sativa
agggtttaggtagtttaggtagtttagccaccaaaatttcggccaccaaaatttcggtttccaaaatttcggttttcaaaatttcggtttttatggtttcggtttttatggttaatttttatggttaagtgttacaaaccgtaaagttcaggtggtttagccgccaatatcccttatatttataatatcaagcatgtaaatattttataaatttagaatgatttacagtatcgaatatagattctcatattctaatttactacacttattcaaatatttaaatatattttttaacactgtaaactattcagaatagtacaattataagagtgatgttgtgaatataacgaacactacaataaaaaaaaataaaaaaagcaaaatattacaacatgtgttttggaagttgagaaagaaattgtaataagatattgtaattatctgaaaaattgagattttgcaaatgtcaataatatatacgaaaatataaaacacgtttgcacaagcataatgtaattctgatactgtagaaaccagttttgcagcgacaaaacagaacagacagaatataaaaataattgcagaaaattaaatcagttgacacaaaagatttgtacgtggtatcagtgttctttcaaacactcctagtccacgggaccacgcccagagaatgaaattaattaataaagtatcaacaattacaaagacaattgacttatacaagtttactccctctaaattattgccgcaatcctttgtaatgcactctatgaatctaacttctgaaatacctccaaacagcgaactcccttcgtctttgaagtgtgaatgcttacttcctcccgaagtaaggcttgaaaagtcttctcccgaagaccactc

SEQ ID NO: 146926 - DNA, 526 bp, Cannabis sativa
atatcttgtttggttggacaatttcctattacgtctttggaatgtttagtttcattgtttaataggttgttggatattatttttttaagttcaatctaaaacactcattttccatcttgcaccactgacacattgcccaaaacataatggaatttgatcagggacggacccacaagtaacaatgtgagggctatagtccccactaacaaaaatattgcttttaaaaaaattaaatgtaatttttttaatttgataattatagaccaaaataatagaaaaactccccataaaattaaataaaactagtaaaaatgattataatatatgtataaatattttttaatgataaataagcccccacaaagtaaaaattttgggtccgtcactgaatttgatgataatgatgattagagaagggactatgctaataatcttcgtgacttgctccaccgttgttttcaggtggctttggctttgtagttgttccgggcgatgcggccgctaccggttttaatgatgaagactc

SEQ ID NO: 146927 - DNA, 530 bp, Cannabis sativa
aagctcaaaagtaaagtaaaatgcaagtgactgcccgcacagagacccagaagtccatcatcacctgacattgatcttgtctcagacgtgacagcgttcccttttctagagcagggggagatggccgaataggtgaaatgggctcccttatacgaatcgcatgttcaataagcctgggcgtggccgagagttccttcttcctcttcaatggggtcacctgctcgtcctcggcttcatctttaggattcaaaggctcctgagcatactgcttggccctgacacctcttttcaacttaccctcgcgcttaagttaaatcagctcattcttcttatgagctcgttcaagccggccagcatcagacttcctcttcttccctgccacggacttaggagaaaactcctcagggtaaagcccgtacttcaccagattatcaccagaggtcaactggataatatccctgttttcctccggaaactgggcaagtttctgagctctatccctaagcgcaagagtgaggggaggacggtga

SEQ ID NO: 146928 - DNA, 545 bp, Cannabis sativa
attagcaatgggtaagaaaaatttcaaaaaaaaatcccccatagccctacatcttctatagcttccaaagggaaattagttgttaattctctaaaaaagagaaaatcaaaacgttcgaaaccgatcattgaagattaaaactctgatttcgaacttgatgataaagattttgagatacccaaagtgctgaaggtgtttatgttatttttcagttatttaaggattttttttcttttttgttatagatgttctgcgttctttttctttgatctacactacaagaataatgagttttactaacgccattattactaacgctaaaaagtcttcattaaaaatgataatatcaataacgacacttcaatgtcgttgggagtttgcattcatttaattttttttgtcagaatctcaatcaataatgacattataggtgccaacgacattatcgttatttataaacacatcaacaacgacaatgtcgtttggaattgaaattccatagtttaatattcccactttaattatttaattaagatcggaagagc

SEQ ID NO: 146929 - DNA, 585 bp, Cannabis sativa
  modified_base (341)..(348): a, c, t, g, unknown or other
  modified_base (535)..(535): a, c, t, g, unknown or other
cacttatggcttattttttatttttatcaattttttaatgccaaataacttaaacctaaacctagttggattcttataaattgatagtgattgcctcaaattaaaagatgatgaataaacttgccttcagtcaaaaattttgagccatctattctaccttattcgaacccttcctctctctttctctcttcataatttcgaatcctatagtgatagagtaagttcccacacacatcaagtggtacacaatcatagtgtgtaaggctgtgaataatccaagtacaagagaagaagaatcgggcttagatcttggtgatactctgctacagaaatgatacaannnnnnnngatctgagcggaaggagacatttaattctgctgcacccaatgtaaggtttttcaaactttatatgtgtttaaattatattttttaagaaattcatatttaggatgttaaataacatacatgttactaaatctagatcttggtaaaacacataatccgacaaatggcctcagagccatggtaatgatntactttcatgaaatatggatttaacaagatgtttgtgttgatttggatgg

SEQ ID NO: 146930 - DNA, 1007 bp, Cannabis sativa
  modified_base (36)..(61): a, c, t, g, unknown or other
ttttagaaagtttatatttagggtgttaaacaacannnnnnnnnnnnnnnnnnnnnnnnnngtaaaataatttccaacagaggtagcatccatctaccacatttgcttgaagttcccaacaaggcacagggtaggatgtttaaggtgagaccaacagtctgcctgtcattgttacaacttagttttgtccaaagccaagaaagagaagatgccagccaagagctctaataaagagcctggcagagggtaatgaagtccagcccaaagtggggaggcagacatagatcctcgctttggagatcctgcagacagctttagacatgtagaagaactggaagaagtggaggttgatccaacattttatagccagaaaactaaagattgggaaaggtttagtgccaaaataaaatcactattgataaaatttccaagagcaaaccttgacctttttacatggtcacatggatacatggtcggaagagactcttccgtgatgacccatgcactaaaaattgatcttaacttctgacctgtgaaacaaaaaaggaggttgttggataaagagcgcgtccaagcgctaagagaggaagttgaaaggttgagggcccatgactttatcaccgaagcattctattaactttggttatccaacattgtgttggtacccaaaccaaacaacaaatggaaggtgtgcatagatttcaccaacctgaataaagcatgtcataaggactaatttttgcttccaaggatcgactagctggtaggtgctactgcttgccatgagaacctgagtttcatagatgcttattcaggttataaccaaatcaagatttagccacgagatcaagcacacacaagcttcatgacgtgcctaggcctatactgctacaaggtcatgccctttgggcaaaaaatataggggccatctattagagatttgtgaacaaaatgttcaaaaatgtcattggccgctatgtgtaggtgttggaatatcttttaccagg

SEQ ID NO: 146931 - DNA, 821 bp, Cannabis sativa
tctgggaacgagggttgaagacgtgccataaccctagtgatctttcttgcacgaaaaacaacgtgcatgcgacagtcttggtgaattttcatgaaccaatctttggcttccgcgatggaaggctaaagttgcataaaaattcaagcttagacttttcttgaaaagatcaaaaggggaaagcatcacggggagtaaggcagacttcaagcagttcttccattccgggaagaagggttgaagtcgtgccataaccccagtgatctttcttgcatgaaaaacaatttccacgcgagagtcctgttgaatttttatgaagaaagctttggtttttgcgagggaaggttgaagttgcataaaaattcaagtttagacttcgcttgaaaagatcaaaaggggaaatcctcactaggagtaaggcaaacttcaagcagtccttccattccaggaaggagggttgaagacgtgtcatacccccagtgatctttcttgcaccaaaaacaacgtgcacgcgagagtcatgttgaatttttatgaagaaagctttggtttctgcgagggaaggctaaagttgcataaaaattcatgtttagacttcgcttgaaaagatcaaaaggggaaagcatcatgaggagtaaggcaaacttcaaacagtccttccattctaggaaggagggttgaagacgtctcatacccccagtgatctttcttgcaccaaaacaacgtgcacgcgagagtcatgttgaattttatgaagcaagcttcggctttcgcgagggaaggccaaagttgcataaaaattcaagcttagaattcgcttgaaa

SEQ ID NO: 146932 - DNA, 584 bp, Cannabis sativa
cacaattttattaattgaattttttgagttctatttgcactatttctcgtaatggatttcaattatgtgttgcttacatggaacgagggctttacgttttgagaccaaaaatacaaattgtgtttaataacgaacttttcaatgttgctaaacctagaaaccatcaaagaaaagagatcaataataatgatgaaacatatctatggcatttaagattaggtcatataggctatgacaaacttcacaagttaactaaagatggtccatcgaaaaatgtcgtcttgggtgaattaccaatttgtgaatcttgcctagaaggaaaaatgactaagtgctctttctctgcaaagggagagcgtgccaaagaacctctaggattagtgcattcagacgtctctggacctctaaatgtcaaagccagaggaggttatgagtattttgtcactttcattgacgatttctctagatatagttttatttacctgatgtaaaagaaatatgaaacgtttgaaaattttcaggaatttcatgctttggctcaaaaccaattaggtaagacactaaagatcttgcgaactgatagg

SEQ ID NO: 146933 - DNA, 800 bp, Cannabis sativa
  modified_base (58)..(63): a, c, t, g, unknown or other
ggcgacaacgaaaaatgcgatggatggctagtctaatcacatgggtaagtttagaacnnnnnntcttagtgggaaatattttagaaaaaaatttaatattgggattaagcgggattatggaatttgaccattttacccctagctttagaaatacctaagctttaacctaaagggcattttagacatttggttaagtggtgtgttaggtggctacatagccttgtcacaccggcaagctttattcagcaagggaatagttaggaaacccttttctcatttgaagaaaaatcaaaaaaataaggaaaaagacttttcctcttgaagctctctccctccctctttcagctgggacaaagccagagggaatcaccctcaaagcttggtgttttgctggtttggagctaaggaaacaagcactcttgaagctaaggtaaccctagacactcttagctaagttttctcaatgttttagttgatttcatattgtgattttaagaattagtggctgttagggtttgggatgtttaggattcgaatgttagggttcatttgagttggtttcaagttcttccagctggttttagtgtgttgtgttggatttatgcaagtttgagctttgagttcaaatctttgatctctaatggcataatttgattcattgagttttagtgtgaaatatactggttggaaaatattgttgcattgtttaggtactctggaaagtttggtggcatttagtggaaaattgtgttggaatttattttacaaggatcttacatctactcacaagtatgttgttt

SEQ ID NO: 146934 - DNA, 708 bp, Cannabis sativa
  modified_base (463)..(469): a, c, t, g, unknown or other
ttaaacaattaatatatagcctagtttcactgcaaccagcaatagtgtgtgtgtgtgtgtgagttaatttatttgtacttattttatttcttcttcttcgatcgcatcagatattgtggtgtgtacgcaacgtccacgcttgccttaatattattgcagattatggttctatcatatattcactaccacaaaagcaccaattgcatttactctttatttctttcgtttcttacatttttataaaagctacttcttaattgggtaacttaattgggtaaatttacaactttcagactttcaatctttctctgaactaatatttaatattaagaatttctttttgtttgtatcaattctgatccgttaaaagagaatggtgaagtggaacatatatatatatatatataaatattaattagtctgctgaggtagctagcatttacaaaaataataataataatannnnnnntaataataataataagttgaagttacatatacatacaagaaaacagtttgaagaaaacagtttgaaataatcaaccgtttgaaaagggaaatttgattttttatgcttacattaggttaaatttttttttctaataaaataataactaatatttgtaagatatgacaacttttatgatatccctaaaatactcccatttacatcaccccatttacaccatcggaccaccccatcgggcc

SEQ ID NO: 146935 - DNA, 698 bp, Cannabis sativa
agaaaaaagaaaaaaaaaaaacttcgtcttttaatcgtataaacaattgggaatatatttaaaaaataattaaaaaaattagaagatagatatttggagaaagatcctttttggcatatattacttttttttttaagtgtatttatgtataaatatttttcaagtgaaaaatttaaaaaaaaaataacaaaaaattaaataaaagtatttggagtaatttgagagcgtgttaccgccttatatttttttatatattatatatatatattgatttatggtttttatgcaaatttatgagaaactttaaataactacatatatatatcgccccatcaaaacatattcaatctttcaattaaactactttatatatatatatacatatactaggttgatgttacgtgcattgcacgtataattagtttttttttaatcaaattttattaggttgatttatttagtttttttaattaaataatatatattttttaatttttaaaatgagatttgagattttcatttttgaattttttttttaactattgcaacaacattagtagatatatgcctcctatcaattaaattgttgatggctaataatttctctacaattttttggagaaacaagtaatatttctacaaaattaatttataatattatttttaatttcttttttcaaaatctagatattattgtt

SEQ ID NO: 146936 - DNA, 1003 bp, Cannabis sativa
taaatacaagtcggtaatatattaggtgttatatgcttttcttactgagtctgttgactcacagtttctactctcatgtgtaggtaaaggaaaggcgaaggctgaaccatagtgagctctgagcttggatggtgattgtacatgtcgggacgtgagttcggtctcaggacatcttgggtagtattttgtagtcgctgtgtggcatgtttgtaaaagtattttgataacagttgtacaaagtttaaatacgaaatctcgacttatgtaaactatacatatgtttataaagtttaataatttaaatcaaaaattttaattgggcacgatttttgaggaaaaccttttgattagcaaaggaggcacgttaattagaaaatcactataaagcgcctaagtatcagggcgttacaattttggcatcagagtcgccagatttgtctactgaaaatcgtcaagacatgtacaatcattgttagtgaaaagcttggctcacggtttagtaagcctttacttgtttagtaatgtatgtgattaataaagcatgttaggaagcataatagtttatagttatttattttaatgcattgacttaaaattaatgagtgcggtatattgagtttatgtgatcgctttctggcctacctgacttatggggtcgcaaggttaagtcctattaaatggatgcccagcgaaatacaaggagtcagggtagcatggtcgagactggaggcggtcagggaaatcaaaattccccaaatccttgtggatgcggcagaggccgttaaggctgagcatcgttcggtttggtccgtttttttatataaaaatctaaaattcagttttcggtctggattggtgcattctgaaaattgaccgaccaatcaaaaacttatcttaaaattgagcattttgaacctctgtttggtcggtttaaaccgcccaaaccgaacttatttttttttaaaaaaatatgatccactttattctataagtacattattct

SEQ ID NO: 146937 - DNA, 1397 bp, Cannabis sativa
  modified_base (85)..(95): a, c, t, g, unknown or other
  modified_base (629)..(636): a, c, t, g, unknown or other
  modified_base (736)..(745): a, c, t, g, unknown or other
tttatttttgttttttaagaatatgaaaagaatatgaattggaaaaaaaaaggttaaaaaaatttagtacaattaaagatataannnnnnnnnnnaataaaaattattaaaataggtgcctttaaaaaattttgggatgtaaataaaatttcccaagaaaaaacataataataagggtataagtataaagttttaagtttgtaagtggcataaactcaaattttttttagcaacataagtatttaatatttgtaaaactgtaattttctttcaatttcggcaatacaggctccattttaaattaattaaaagaacatttagaagtaattgatattacatgtttctatctaaaccaaataatctataatttgtgctttatatgtaccctgtttaagaaaataagacgaaattaaagaaaaattatagttttacaaacattaggtacttatgccgctaaaaataaacattgagttaataccacttacaaacttgaaactttgggtacttatatataccgctatttaccctatataattatattcttcttaaattgaaagggggttttatttacaccccataaaataataagtatactctattatttaaaaaataaacttaaataatttttnnnnnnnnctcttaatattttttaaaaaaaaattccaaacattattaagcccttgcttagtgaaaattcataaataagacagtctaatttagaattctaattgattannnnnnnnnnattaactgagtctacaagacaatattatctcaactagtgtcaggaccatgtgcctatataatcaagctcccaataagtagttctaaaacttaccgagtctctatcttattaattcctcctgacttcactatagatttagaattgcactccttattatatagaacgctctatatgtttcaaatatagatatgctataaattatccattgtttcaatctaaataatcaatgatcctctactgataatctacatcgagtaggggcaaatttaccgttctacctttcaatgtattttatccttaaaacaattagctacttgtaaatgatatttcataaaactaatataattactgaaatgagtactccaccatttaatctcatttagtcaagctcgaaggaaataatcgtttcacttttatatatagaagctatagattttgtatctatgattagtgctcccactcaattgtactatcgtgttcccaatatgtaagtattgggtcgatccaattggtcagctttaatgaacaagtcaaggaacactaataatacacttaaaccaaaacctaactatctcagaattaagatcattaatctaagatcaattaagtgatatttacttagaaaagatattacagtaagtttatgatatct

SEQ ID NO: 146938 - DNA, 630 bp, Cannabis sativa
  modified_base (587)..(587): a, c, t, g, unknown or other
cattgtctcttgaatcttaacactccaatcactatcacaatagccatctaatttcacttcagaacttctctcaaatctgttccgtgacttattactccctatatgtatcttcactattttttcaacaccaaaatgcttttcacttgggactattcatgaatcgtgagaacaaacttgcagcaacataataaagagtctctcatttactttattttccatcttctttcaccaattttccattacaaactagacgagttggcactgttttgcactcaaacattctaaattcttttaagattttgtctgcatattttttccaagatacaaatacaccagcttcatccagataaatctccatgccaaaaaaaggattaagcagccccatatcactcattccatacttcttcatcatctcctttttaaattcttcaatcatatgactattgttaacaataaacaccatataatccgcatataaactcgtttggtaacacttttgttttctaattttataattacaaagtaaaaacaaaaattttgcttttgaaaaataaaaatgcgttctgtaaccacttttatttttcaantttaaaaacagaaaacaaaagtatgttctgtaaagttcatttt

SEQ ID NO: 146939 - DNA, 726 bp, Cannabis sativa
ttgtaatctttttttggaaccctggactcctccactacctctacttcctcattagatactattgtcattcccatgtttgtcaaagttgccattgttatgccaagagaacttgctcaatttagattcccctttatcaactccatcatttcttctatcaatctttgtaggcagtttatgttactgttctgcctcactaacacattcttttcctctttcttcatgccacaattcatcccctcgattcaccatgatgttacatcatgccacaaaacttttattttacatagaatatcttccatttcttcactgacttctttctcttcgacccctcccaactcttccatatcatcactggctgagctacttactgacatttcttccccctgataactttaattgcaatcctttttttttcttttgtggtttcaatgattttttcaccaagtttgtccaagtttgtgaatcctccttcctttttcaaccagatttttgcattgtaatttttaatccactaatcctccctttgaatctctttcctcaggtataataatcgttgtcattttgtttattttacgaactacgaagtccccctttctttactagctactccatgttctgctgaaattcttccatcgttccatataactaagttgctgcatcaatgattatggtgatctcgtagccgatcaatctagtactttcacatattgtgatcaatcatccatg

SEQ ID NO: 146940 - DNA, 669 bp, Cannabis sativa
  modified_base (344)..(347): a, c, t, g, unknown or other
atgaataaaatagtcagcaatatattaaagttatggaatctttaattaatggttgctagtacggttcactaatgctcgttcttcagtgcaagtaatctccttgtttggattacggatgtcgtgagacatcaaagtgaaggtactatatataatagagattatatatgacaatgaccgatatgaataaagctatctttattaacatgttatagatcataaggacctaaatcatattataacaatgatcaacagtagattggcctaaatcttgagttatcatgagctcttgttcatgttattagtttttttgattcactcattaaagtttctcagagaagatgatnnnnacaacttctattttgggaatctaataatatggatggttgggaacatgatgtacagttatggaatcctgactttcctaacagatcggatgttgattccttttaagtgttaattctcgaattggaatgttgtgcacaaattcaaatgggatattgaactatacttccactagtaaattaatgaaactaaaggtaaaaaggtaattagaaaagtaaaacggtattttgaccaaaactaattatgaaccaacacattgagagctaatcactggaattgattatattaatggacactgtagttaaagtcagtaaatataattctata

SEQ ID NO: 146941 - DNA, 677 bp, Cannabis sativa
tagaaagctacctcaagcttccaaatgaaatcaagcttcaattccctcccaaatccaagctcaacaaagcaattcctcaatgatttcaacaaaatgaaaagatggacaaagagagagagagaggggtcggttttgggataagagaaacaactagaaaattcatatcctttttactcaaaatttcatgttgttacaaatagtccaaataagctaaattacaacaatgcccctagggcaatataacactcatttaggcattcaagggcaattatgtcattatcacataacacaccatttaattaatttttagattaataacacatctataaaatgccaataaataatctagaaaatgaatttcggccccgaacccagttcggcccgaaattcctaattgtgactatactgtgccgacttgtcagaaaacacatgaaaaaggacacaatgagtatactatataataatatagtccataagcacgcatttaaattaaattcacaattttacccttcttgggttaaaattacgaaaatgcccctagctcaccaacgaggtcttaacatataatttatcaaattaattcacataaaataaattatataataatataattccatattaatacacatttaactagttagggtttgctaatccattttcttaatcttagggtatta

SEQ ID NO: 146942 - DNA, 578 bp, Cannabis sativa
ttatatagatatagatatatatatatttttttataatagttattaatttgaaaaatgtgaaactaaatattgaaatgaactaataactataatgaaattaatttaacagaagttttccaactgcattttagcatgtcctttgaattagaccttcctaccttttgtaatagtgtagttacttttgttatcttagttaaccttcttcaatttaccctcacaaaaacaaaaattactaatttaaaattttgtaaggttaaataattatatctccatattatatcacaattcacaaacaaacaaatatattatatcaaaaggattgtgttaaaagtgcgctctaatcttgtaaaatatcacaaatgagcggattaaaaagagatttttattagtcatgttaaacggtctgctaacaaagccgcgcattgtatgacacgtggtgcttgttattggtcaggttgtctttttgctgacagtgatgttctccttgctcttcagttcattgtattagcgaatgtttctgtctaataaaaattattttcattcaaaaaaaaaaaaatataattaactaataaatttat

SEQ ID NO: 146943 - DNA, 729 bp, Cannabis sativa
ttcttcaaagcagggatccgtacagagactctattctaggaacgagttgtagcaagaaggagcctccaaccttcaaggcttccagaaaagggtccaaaaatgcatcaacttagaagaggcccaaatagtggcttatgggggatactacccgaccggaatagcagggtatgtactcggagcctagctcccgagaactttaccagcagctactacaccaatgagcggcatacaattttccgctaccccaggatataatcagaatcatgcattggctcctgcatcttctcattatgggaatccttctgggataagtggacaagtcccgtctcactctgctcctactgcaagcttagcaggtccttctcaaggctctcggagcaagaggtcctcaaaaggtagtagccgaacggaggacaagcggcagaaaagggggtatactccccaatatacccagtacacagagttgacagaatcccaggaacgtgtgtacttcgccactagggagaatgcacactatcggagatcgcctcctctatacagagatagctcccgaagggatcccaacaaacgatgcgagtatcataacgacattggacacagcaccaacgatgcaaaaaccttaaagataagatcgaaaacttaattcgattgggccatctttatgagtggattaaaaaccggttgcctcacctcaacccggttcaggcagcaggacctttgccccacgga

SEQ ID NO: 146944 - DNA, 924 bp, Cannabis sativa
gccccatggattcaggattgtatgttatgtcgaactaacccaattcaatcgaaaagaatctagttttgataaaacttgtctcaagggctgatcggttaacacttttatggggtgagcctggaagtatggccatagtttgcgagacgcatggactaggcataacacgagattttctagaggaagatacctggatttttctagaggaagatacctggatttttctagaggaagatacctggattctgcccctagtgatacctggattctgcccctagtaatacctggattctgcccctagtaaccttttacttacgtagtaaataggttgatatttctttccctcttctcgcagtatagctacactaattgcatcttccgagatggctaaataaagaaataccgtctctctggttattggtttcgccaaaactagaggcattgcgagattcctttttatgctctgaaaggcctcttcgcattattttgtccacacaaactttttgttgcctcgcaaaatattgaagagcggtacacacttaccagttgacttcaaaatgaatctcttaagtgccgccattcttcctatcagggccagtacttccttaggctttgtcggggatggcatgtctattaacgccttgatttttttaggatttgcctcaatacctctcgcgttaactatgaatcccaaaacctttgctgaggagactccaaaggaacatttttttgggtttagcttcatgttatacttttttaatattttaacgcatttcgtgaggtctgaggtatgatccttgctctttatcgatttccccaacatatcatcaatgtaaacctccatgttttgccctatttgatttgcaaacattttgtttactagtcgctgatacgttgccccaacgttcttcagtccgaacagcatga

SEQ ID NO: 146945 - DNA, 736 bp, Cannabis sativa
ttgttattaaagtttaaattcttctctaattttattagtaatcccggttaggggattagggcttcataagtgttttgggtagcgtgactaattatttagggcgttacagctaccgagcacaattttaaaaaacgaaaaattcacatatatatagcataattaatttatatctaacttaaataaatatccacaatatatatatatatatatattataaataacaattaaatctcatgagtgaaccctaattatctgataatccaatatatcaacataggcggtctttacatttacagttgttttgtcatgattatttatttgacgttgatttcaccttttttttctcaatctcatcagaattaatggttgttttccgattgttctggtgttcttgtggtggttctgtccgtgggtaagatggaggcctttttttttttttttaagtaattacagtataaaagaaaaaaaaaattggtcaagacagtataaaagtaatttctgccgtgtggcattatttttgtaaagattgggccaaaagtcaatatttttgtaaatttctcttatataatgctattaacttgtattaaaatattgtatacataagttatgcatgtataaattaataccactgagaataatttacataaaaatgtaatgtacaacatcatttatacaatataataatacagtttgatagtacatctgtaaagaccgcttagtttaatttgggaattag

SEQ ID NO: 146946 - DNA, 926 bp, Cannabis sativa
cattttaaagtgtcactagtaattgtgttaggctttataatagtgtttatattctaataattaacgctcttcaacaagtgaaaaattcctaattaaatgaatacaattggttgagattaatttcttaccacaaaactaacatttctcttaaattgttaggcattagttttcttctttcttttccaacaattcagtcaacaaagacagctacaagaggatcttaaaaaaatagaacaaaaaaaaaaaactatagaaaaagtgatatatatataaataaataatctcatagatatatagctagcatagcctcttgctctaaaataacataaatgcttagttgtattcaatcaaagtttgtccatatataacaagtgtttctctcttgctttaaaacactagaccaaaaaatcattctatagtcattcaagcagcctacacataaaaagtactctttcatgtcctttttatattagacattatattagtgccaacccaaattaaaaaatgacaaatatatcatgctttagggagattagttaaagcttcaaccactatagtttatcgatcggacaataattatttttttttttcaaatgtttgagttttaaaaattttagaccatctaacctttaaatattctttatgcacaaaaattattgtacaaaatatcttatgcacctacataaaaaatttcgtccaattaatttcaagacatgtgaaaaagatatcattatgtagaagttcattcaaaataaataaaatgtgtaccctaacatatttttagagaatttactagaaattttacgataatatatataagtattaaaaatattgaagggtaccataatctttaacactttaattataagctataatattattattagtctaatttaatattgagtcttatttattttaatttaata

SEQ ID NO: 146947 - DNA, 825 bp, Cannabis sativa
ttttggtcattgcaactcccgccgaaagttaaaatttttgcttggaaagctgtccatgatgctcttcctgttgcaactctgctggtcaaaaggaaagtgattaccgactctacttgctcggtttgtaaacaagcttgggagtcagttggacatgcacttttccattgtcggtatgctcgagctgtttggcgtaattctagtctgagttttgattggcgtcttgctgctacaatgcagaaaggtgattatatttttcacctttcatcaatactttcaaaggctgagatggagcaacttttctgtacactttggacgatatggaatgagcgcaatcgtgttgttcatggtcaacaagcacggcctgctgctggtttggcttcttatgctgcaacttacctatccaattatcgaaatgcacaacagagacacagtacagctgcaacaactgctgcaactgcacatcagcaagcacaccagaccacggctacagcagcatcacctcctagctcgaatcctcggccctcattgcaggcagttcctgcagcacagctttggcgaccacctgatttcaatctttttaagttaaatgttgatgctgcagtagattccagcagaggtgtaatcggagtgggtgctattatacgggattcaaatggtgttgttgttgctgctctttcaaagcagctgattggcaattttcgctctcatgaaatggaagcttctgctctctttcatagcttaaattgggcgattcaacaacaactacccttctcgattgctgaatctgatgctttaatggtggttaatgcccttcgagctcccttc

SEQ ID NO: 146948 - DNA, 853 bp, Cannabis sativa
gatgaagttcaagatgagaagacaggaattaggaagacctcacatagtatcagcttacaagagataaagccagaagagtccctaaacctaaccagaagtacaactacaatgtgtgggatgagagtattacttatgcctgcatgtgcaaacttgaagttgagatctatgagcctcaatcttatgaagaagcacttaaagacaaaaattacaaggcctggttgaaagcaatgaaagaaaaatgtactctctcataaagaataagacatggagagttgtacttagaccagatggcaagagtgtgatatcttgcaaatggcttttcaaggtcaagaaagggaggactaaggatgaacctataaggtttaaagctagattagtggcaaaggggtttacacagaaagaaggggtagacttcacagaaatattctcactagtggtgaaatataagactataagattgatgctatccctagctactcagtttgacatggagattgaccaaatggatgtgaccacaacttttctacatggggatctagaagaagacatctatatggagcaaccaaaaggatttgtggttaaaggtaaggaagaccatgtttgtaagcttgacaagtctttatatggactgaaacagtccccaagacaatggaacaaaaggtttgacacctttatgaccaaacaggggttcaatgaaagctattataaccactgtttgtactttaaaggttcagaaatagctaaagtcatttacttgctactctatgtggacgatatgctaataattagtaagcagaggtcaaatatcaacaaggtcaaggaattgctcaaatcagaatttgaaatgaaggat

SEQ ID NO: 146949 - DNA, 629 bp, Cannabis sativa
cccaggaaacgcaagggttccgccggctgttaatcttgaacagccggcgaacgtgggtcatggtgtgacgactcctgtatttaaaatcgcccctcgtgtgcaagagactgggaataacagttcagcactcaaccagggcattcataacacagccgttttggctactaccaacactcaaacgaccattggagatgatactaagatccgaaacctctgtgctgctcttggactcaggcacggtcataccaataccctacctcatgatcaggaagaactccgcattgcggtaaatctcgcgttccaggaacaaagacgtatgtttaccgagtggagagacaaagagatggaaccgttaagggctcatcatactgagattgaaaattgtagtcagcaagctactgtgctgatacgaaaagcctaccaaactgtcagatagcaacctccgagtgtcattcccctgggtgagacggacgaagatctagtgatgaatacttcccagactataaatggtcagccgccaaatccccagtcacaaattctgctagtgggcctagcggtaggcgggcagaccttgtctagtaattcatcaggagaggtcatacctcatagttccaaccatgttaacggtg

SEQ ID NO: 146950 - DNA, 519 bp, Cannabis sativa
aaaatagtatatggggtaatcccctaaaatatatacatataatttataaatttatttatgtaaaattaataattttattccaaattataatacacgtataaaacaatatttagttaaaaataattttattatgatatagtattaaagattattttttgtcattgttattctattgaaatttttagtgttttgattttttatttttttttttaaagtgtaactctatttagttataacttctcaattagaatataatttgcttggtcttaagtttattcttagattgagagtaggggtgttcgcggtacgggttgtaacgtttttttcaaaccaaaccgcatatgcggtttttgtaatttcttaaaccacaaccgcactgcgagattttaaacctacaaaaataacaccacgaaaatacactgtggtgcagtgcaatttaagcattttacactattattattatcaaacattataattaaaaattttaaaattaatctaataaaattttaacaatataaa

SEQ ID NO: 146951 - DNA, 723 bp, Cannabis sativa
ggtcaattttgacccggatagagattgaagaaacagccaaacgacgtgtcattttcctcttgtggaaaacgacgtgtcattttttaggtttaaagcagccgtcgtttttcgtcttgtgaggcagccctttggtgaataaaacgacgtgtcgttatttcccttgtggaaaacgacgtgttgttttgccctttgcaaaaatgacatgtcgtttatggcagtgtctttttcaaaaaaaaaaaaaatagaggggggggggaggaatctgaattttctatattttttttatttatttagaatattaattattttcatattttgtgttaaattagtcaataaattgcatttagttaattttccttttttatttactacatatatttagtataaattgaaagtagaaatttgtttaatttggtaacttattacatgatttatttagacatgtaataattgtgctagtttgtataattgtgaatttaattatatgttaccaaatttatgtaatttattgtctaaattaataaattttgaaaaaatctgtcattaattatatatttagaaatttacatttaattaattatcatacattaattatatcaatttatatttatttggcaaatttatttttattacaattaatttagatttgtatgatttaaatgttatacataaaaaaattttatagtgctagatatatttagaaatattcaaacattaagatag

SEQ ID NO: 146952 - DNA, 519 bp, Cannabis sativa
aatgctaatgtgtcgttgtaaattagcaactttgtttcctaaactttgacaacaatcaaattgtatcccctcaaaataaaaatgagaaagattcaacatttttttggtaaatcttaaaaaagatatcattttgaatgattaaaaaaattaagaataaaaatcaaaattttaaaactaattaagcgatttaaaaattagttattttttattaaaaatcaatttagatataaaaaaaagtatattaaaatttcaatttttgtaaaagctaaattttacgggaacaagtttgactttatttttttttcctcaaaatatatagatttgtttaagtaaacataatattttttagtttaatttctatttatttaaaataaattatatttttattgaatttctaaatattttatttattttttgaatatatgtgtgtaaatataaataagcttaattttctcttcacataatcttaatttgtttaaattattaattggatttttaataattttgattcaattttta

SEQ ID NO: 146953 - DNA, 643 bp, Cannabis sativa
  modified_base (425)..(426): a, c, t, g, unknown or other
  modified_base (577)..(581): a, c, t, g, unknown or other
tgattagtattataagatttacagtcaaaagtcagtaaataatatcacatattacacttaagttagtaagtggttttttattagaaaattatagcaaatgaccttaaatcataacattacgtaaataaatatcttcattttaaaatttgtagagaaatgattcttttatactatttattatttatattgtcttttgctacataaaaaaaaaatcaataatttttttgttaactttttttttagaattagaaacaaattacttaaagactatagtatatttatagttttgttaaaatcttttttattttaaagttatgttgatttttttaaaaaaaaattatgggttgttgtgggttaatggcattttagattttattgtacactatatttcttttttgttgtatgatatattattattcttagannatatttattttttattttgctatgcataataatgatatataattttgttagcataatacaaatattttaatgtatgtttataatattattggcatgttatatatattttttatcttatggtatataattttattttagatcatgcatgttnnnnntttattttattatatataaagatatataattttataaatatggtataattattttatggttg

SEQ ID NO: 146954 - DNA, 937 bp, Cannabis sativa
ggaggttggtcgttggagtggtggtgatggtgggttttcttttgtgcttgagtttgaagagagagaaaggatagatagatagatatatatatatagagagggaaacgatgtgatgctactatatataatttaaatttttctttttaatatatatatatatatatatattatattatatttaatttatttattatatatatactcggtttgacagagtcaaactgagtcttcacagtgactatgtgcgatcatagtatatttaaaattgtattctaatattggtctgtgccaccctgtgcaaccatagtatatttaaaactttatcctgatattgatctatgcgaccatgtgcgactatatgcgaccatagtatatttcaaaatatatttaaataatagtctatgcgaccctgtgcgaccatatgcgaccataatatattttaaaatttatcctaatatttgtctaagcgaccctgtgcgaccatgtgcaactatgtacgaccatagtatatttcaaaatatatcctaatattggtctatgcgactatgtgcgaccatagtacatttcaatataataatttaatacattatatatatcacaataaattatttaactatattttttaagttatttcattaagtatgtatgtgtataatcatttcgtataatttataaattataattaaagtatattatataattgtataagtctatgtgattatttaattacattatatatatatgagatccaatatataaattaaattattttataaattatgtatgtataaccatttaaatataatatatagattacaaataaagtatattttataattgtatagtgattcacccactatttgattgccctacattcgaagatggaggctccacatgtggtgcgacacactgtttacgtaaaatgacatcacccact

SEQ ID NO: 146955 - DNA, 655 bp, Cannabis sativa
accggccctcttgttcaaataaagtcccatcaacattaactttaatcttgtttaacacaggtgcaatccaacgctcacaattctgccccccatcattcaagggagacaaccaaaaggtccttcctttcctgagcaattttgtattgatcaagcatgtttctagctgatgtaacaatatttgaagcaagctaactcttcttttgccaaacaaagtcattctgcgcatgccaaattgcccaactcaccatcgccgcttccaccatttcaactttgtgtcccttggtgaaaatccctaacaaccagctactgaacgttgcagccccagccccgacgtccactatgctgcgatgccaagcagcctttacaaacgagcagtccaccaacgcatgttgaatagtttcagtactagagttgcacaaagggcagtcgacattgacaagaacatgactcttttggagttgaaaacaagttggaagtacacccgaagcagctcgccataagaaattactgatcttaggaggaatttttaatgaacaaatccgcttccaaaaatcagtattagcatcaggaccccaaacacccttagattcttgcaagaatttatatgcacttctaaccgaataattcccacaagtctcaagtcgccaactccaac

SEQ ID NO: 146956 - DNA, 530 bp, Cannabis sativa
ttttgtggtttgacataagaaagcatgaacttgggacaaacgctcatatctggaacggtttttaatgatcttcggacgaccacattaggagcacaaatctcagtaattgtctattgttttaataacgaaattacttttaggtagagcccaatacttaatgtctaagtgaaaatataattttaaataattaggaagtagccacaacatccttattatataaaattatatattaactgaaatttaccttaatggacataacttataattaattatgtggatataataattttatcccacagggaatttattgtgtttaaataattaagataatatgttacattaaattctcttaatttaccccacagggaattatgaaatttaatttaatagtgttgtcacaaatttaattaagatatataataaagtcatttttcttaaactaaggtagcgtttagtaataatttttttaatcagttttctgcttttaaaattagaaaagtgaaaatattttttcaaaaacatgttctata

SEQ ID NO: 146957 - DNA, 672 bp, Cannabis sativa
aaatggcgagtctgtattgatttcacaaacctcaacaaagcatgctctaatgactgttttccacttccaaggaatcgatcatctcgtaaaagcaacagcagggcatgaaatactaagcttcatggacacttactcaggctacaatcaaatcaaaatgcatccaccagactaagaacatacaagtttctgaacagatattggtctatattgctacaaagtaatgtcgtttggtctggaaaacgctggagctacataccaaagattgttaaacaaaatgtttaaagatcaaatcgggaaaaatatggatgatatgctcgtcaaatccaagagaagaaaatacaactgcaaatgcgttagctcgattggcaagcagcaaagtaagtgacatagcaaagttggttcctatctaattccttgaagagcctaacatcacaggcacagaagaaatcaaaatgattgatacatccccatactggatgacaccaatagcagcctacctcgactctaggaaactcccagataacaaatacgaagctcggaaaatgaggaggaaagctacacagtatatcattgtagagggaattatgtacaaaagaggaatctcgatgccattgctcaaatgtgtcactcaagacgaagctgcacgactcttatctgaagttcacgacggat

SEQ ID NO: 146958 - DNA, 692 bp, Cannabis sativa
  modified_base (148)..(148): a, c, t, g, unknown or other
tttggagtcatccaaggtgcaaaattacctctctttgtaccctcttggtgaaggggtgaaggtagtcccagcaaagaaaggtcaaaaagccgactctcccccagaggattcctgtgcttggacaaaataccacatcgaggctggagcnaccttgccactccatgattacttttgagatgtggcgaactactttgatgtttccccggtccaaattgctcctcatgggtacctggccttatctgctttgttcataagatatcattagaagggatggggaaggccttctactcacgaaattcactacctcctttccttccggacttgcccatctatgaaccattcagaatacttcgactttatgaaccgagaacggggtcagccgtatgtttctggtatttgtagcacaaaccgcagcgacaagcatcggtcgtcctactttcttacaacccccatggacactacccaccgggctttcaaccatacaggtacatattccagactagtcccaaccgaggagatgatacaacatgcggcagccttgactgctatgctagaagctgaaaaatatgccccaacgattgtaactgtggagatgctcaagttagtgggattgtaccctcccgagcataactcaactgccgcaagcacaattgatggacctgatgctcctgttattcccattgaccgggaga

SEQ ID NO: 146959 - DNA, 570 bp, Cannabis sativa
tattaattataattattaaatcaaacaattgatgtattcgaagcaagctgggtttgttagtctcttagaaacaaaggttcagaataagaatatgggaactttatataccggcgtcttccaaggttggtgtttttcaaacaataatccttggttagacaaaggaagaataattatagcttggcaaccaaatgtctattctatagatattaaatattgctctagccaaataatgcactgttatgtgcaatcacagcaacaagaagggaagttctttgtgtcactgatttatgcttttaataatgagaaaaagagagaagaattatgggcagatctagaggagttggcaaagaaaataagtgagacatggattctaatgggagacttcaacgagataatgaatggagatgaaagaataggaagaagggctcaatgcaatccatctcagagacttcaagattgtatggagaattgtaatatggctgatctgaagtattcagggtccttctacacatggaacaacaagcaaaagcctgaagagagaattttttccaaaatagatagagcaatggt

SEQ ID NO: 146960 - DNA, 853 bp, Cannabis sativa
aacctaggacccagacccaagacccgaacttggacccgaacactaacttggacccagactgggatccaaaaaactggcacccggactcgaactatgaatcagacctcgaccccaacctagacccagatccgaacccacaaccaaactcagacccaaaattagcactggaactatgactaggactcgaacctaagaccagaaccgaacccaaaccataaccctaactcagaccagaacctggactgagaccttgactaggactgggacctgagaccttggacccaaacataaaccgggactggtacctgacttggtcctaaaccctcactgagacctgagacccgcgacccagaccaggatccagaccctgatgaggacctgcacctgaacccgaaccaagactgcgatcgagacttggacccaaatccagactgggacatggactaaaacatagactcaagacccaaacccgaacctggaccccgaccaagacctaggaacgggacatggatatgggacctagaccccgaaacccagacccagatctgaatctaggactagaacccgaactaggacctgacctggacccaggaatccaaagtttgacccagaaccagacccgaaaccttccctggacccaaaccaagacaggaacctagacacgcacccacaccaggacaaaacctaaactcggacccgaacccaaaatcgaacccaaaccggggaaccgaactcagacccaggcccagaatcagacccaaacctagacctgcacccgaactcgaagtcgaacataaactgggatcggaacccatgacttagaatcgaaaataaatgtgaactcagatcgaga

SEQ ID NO: 146961 - DNA, 574 bp, Cannabis sativa
  modified_base (61)..(63): a, c, t, g, unknown or other
taagatcctggtaaaataaataaatttccaacaggaactacattgtatattgagtattatnnngtatttattttattttattgttatatattattaataatataaagtttattcaaataataataataataataatggttaacaaacaatttataattaattttacaaaattatattaattttttaagttaattacttttctctttctaaatgattttatatataaatgtaacttatttgtttttataaaaatcaaaacattaaaacttgacaaataaaatacatatacacaattctattagaaaaacgttatagtaacaaaattgaaaaactctccatttaataatattttatgagagtaactaaaaactaattaaatgagagtaattattattaatcttttttagagataaattaaataaaattctaataaaataagagaaaagaaagaagaaagattaggacataaaataatagcatcataatcataatattatatatatttaaatatagatagatagataaaagtaacaactatatcataaaaaacaattctaaacacttttacttaatt

SEQ ID NO: 146962 - DNA, 880 bp, Cannabis sativa
  modified_base (526)..(529): a, c, t, g, unknown or other
gggatgtaggcgtgtggaaggatgttagaaagacaactaccacgtgcaattgtggagaggcgcaatggaatgtttaaaactcgttggcataggacaaggttgattgggtagtctatactgtatgcttggtacattaggccaagtttgcctgagtgacatcgtaagtcgcaggaggcacttttattgaaaaggaagcttgttggcaggggtgtggaagtattgcaggggccgtcagattcttgttagtcacgacaatggtcgagagttgatgaccgagatggttcaaattgggatagagatggaatgcttaagttgctacgtgtgtgtgccaagagggacgcacatggagaccaagggggcaaaggccgtaatcatcagaggatggttgtacttggaggtgctcacatgtgacttttatttgatccatatggaagcgtcgagacggttgagtgggattggcttgttaaagcgctagtgggcgtaagtcacacaaagacatcgatagagatgcacagttgtggaatgnnnncatcaaagaagccagcagggctaagaatatcgagcgcaagcattgagatggcgctagagtttgagtggaggccagagggctgtgctagtgagacttagtagttatatgagcctgcgaaggtcaaggagggtgctagagtttccatgaaggccagagggttgaatcattggaacttagtacatcatgcaagccggtagagcgtgatgttagtgtggatcagttggatggttgagttgataatgcacgcatatggaaatcggcaggggagctaatgagatagttgactcgagagtcacatcctgcgggatgcacttttagatggcatggtgtgcatgaagagttgggcagtca

SEQ ID NO: 146963 - DNA, 711 bp, Cannabis sativa
acctagaccaagacccggaccaagacatagactgaaacccggactcagacccaaacccagacctagaccatgacccaaacctggactactactataacttgtactcgaaccttggactgggacccggactgagattaggactgggacccaaacctgcactaggaccgagacccgaacctggactaggactagaactcagactgggaccaggactgggacctaggacccgatactcagacctgggaccagagaaccgaaccgtgacttagacccagaccaggccaagacccgagacaaggaccattactgaacacagaccgagttctacacgcagactgggaccctaaccaagaccgggaactaccactttgacttgaatcggggaccaagacccctgacgacctcactaccaggacgcaaccccaaactcggacccaaactaaaacttaggactctgtccgggacccgggacccgaactagaacaagactgagatccaagaccaggatccgaatctgaacttgaggcttcaacatgacccataatcagtgtttgaatccaggacccagacccatacccgaaccggtatccagacccaatcttcgacccagaatcagaatcaaaccaggactgggacgagaacccagacctgggactgtaacaggatccaaacctaaacccaaactccacctgaacccataccgagacttgg

SEQ ID NO: 146964 - DNA, 533 bp, Cannabis sativa
aaaatattgttttgtttgtacaaatacaaaatatgatatgattttctaaaactttaattctccatgaaagctagaagttgttcatctttattcactactccaaaaattgtgcaccatatagttgtcatttcatgaacactgcaaaaagaaaaaaaaatggcaacaatataattttttttattacaatatccatattatcattggatgaagtgaaaaaaaattatatatgtataacatagaatttagtatttttatatgtatattattaaaattttataatttagtatcatagtcttcaatgtcgtaataaaaatatgatgaagagagcttaccagtgaacgagctttgtttgattttctgcaagataaaacaaaaaaaatgttttcttatgttaatggtggcacaattcaaatttgattcatcattataaaaactcaaaataaatatttacacaaatagagagtaaatatacatatataatggttcaaacctatctttagagcataaattgtacgaaccaataccaatattga

SEQ ID NO: 146965 - DNA, 562 bp, Cannabis sativa
ttgcatctataaacaccctggaatcatttgcagtgccctcccaaccagcagatacaaaagtaaagaacatgtcgaagttacaagcacataaaacattttgtgttactgcattcctccgacctctgtaactgacttgcttatctacagggacacatgcactcacatgtgttccatcaattgcacctatacaattctgattaaaaaaaagttaattgaaaaaatatacactaataatgtgtgaaagtaatatttattttacactagatgtagttaaatacctaaaaccatggatagtatttcgaagaattgacaatacgagaaggtaatggagactgagttggacgaatgatatattgtcctaatttacatattgccttcaatgttcgacgaaaataactatcaatggtttcaatcgaatattaaaatcggtctgctataagtcttcttctcatatttcgaccaacaatcataagaaaaatagcaaccgactctttaagtttaacctctcgggtgtccttaatgtattctttttgttttaaacaagtacaaagctcaacaaata

SEQ ID NO: 146966 - DNA, 517 bp, Cannabis sativa
ggtgagaggtgcttcactagatggctggcctgtcaaagggtgactaatggtgattgttggtgagtctgagatcccaagctagcaccccagacaactggttgtcgagatctggctattgttgacattagacttttgttgcaaggcctaccctcttttgggtaaggaaaagtatgttctggttcctaaagaacctaattggacagtttgtcgaagaccctccctgatctgtcgactagtcttccttagggaggatctctgatcagatcttggcctcttccaactgttctttcattgaacagccttattaggttgctgacttctcatttgtggttatccagctctaccttatgagatcataggatgtactcttggtcatccatccatctcatgaattcgcatctctactgagcgattacatcgcaattagcagcgcgtggctctatagtttggatggcttggcagatggcctctttaataactcgagatcttatcccaagtcaacatggggctcaccaat

SEQ ID NO: 146967 - DNA, 951 bp, Cannabis sativa
  modified_base (899)..(905): a, c, t, g, unknown or other
aattcgtagatttggataaattcgtagaattaaaaattgttttactaaaacaatcacatctagagttctagagctcgaatttaggtgattctagtggcattagaaagataattaaaaaatctataaaattttgtagaaatagtcatatcataattcggaagtttcctaggtcaaaactgagccaaaagttacgaggtagaggtcttattacttttaaaattcaaaagttagatatttgttgatttaatgatgttttagcattttatttttattattagttaacctaaacctattacaatacgatagttcataatcttgatttttatcaaaccctaaactatcatagtttttttatttttctctgcaaaccagtagtcaaagcctcattcttcatcatggttgctcatctcaacccttcaatacttcttcttatttttctaccttcattcttaaacttttggatttctaatcaaggcttgtgggcttcagacatcacattgaaagttataaagaggtaggaaatattttcttgctcaataatgctagatgtaatttagggttcaaacatattatgttttttcgttttcagaaaaacaagtttcagtaaagttctcatatctctctcgatattgatccgtttttagcgatttttgtattgttggaaagcggatgtactacttgaagtctgtttgggatattcatctccgtccaggtgcaaataatattggatacatatcacttgaatatgttgccacgtcatagtgtaaaaaatgggataacatatatatattgttttatttttttctaaaaaaaatcaaataatttttttattttaatttatttgtcatagtatttaaaatacaatttaattttctttgataggtatattttttaagaannnnnnntggaagaaaaaagttaaaaaacttaatacaattaaagatataaatt

SEQ ID NO: 146968 - DNA, 628 bp, Cannabis sativa
  modified_base (136)..(137): a, c, t, g, unknown or other
tttccccctgtcactccggcagtggtatccgagggaatcatccagctcaccactaatcagtgtactgcgattcaggaccaactgcgtgcactacaggcagaagtggatggacagaaccgggcccgacgcccccctnnagtccctactactcgcacggacaaccctcaggtaacaacttctagacgtcgtacaaaccgtgtacgtagggaacgaagaaccaaccctgaaggcttggacctgaaccatccaacatcgagggaccaatccgtgaggtatcctaaccagggcacgcagactaatgaagaccctgagcgacgcaatcctcacagtcgacaaccaagagacaatgacgcagaatcagcctctttgtcatcgcatggtcgtacatcgagtagatatacaaggtctggctctgtagaaatgcagcaggggggacactatcaggtacaccgaggtgatctgcgtgatcacctcaacgcagtttttagagcacgctctcgcgcccctcataacgaggaaacactccgtccgtgatccccatgtggacaatcagggtgtcaacactcacaataacccgcctaccgcaccgattgcgactactggaatcaccgtcccagcgaacctcgcc

SEQ ID NO: 146969 - DNA, 567 bp, Cannabis sativa
  modified_base (42)..(45): a, c, t, g, unknown or other
  modified_base (261)..(265): a, c, t, g, unknown or other
  modified_base (490)..(493): a, c, t, g, unknown or other
tttatcatcatcttcaatattatacaattttgaaattaaggnnnngattggagaaaagttaaggagtttgggtgattttggtgcttggagcttaaaattttgtggtaaaacttcttgatcctttttgtttatgattaaattctggtatgttaatattctttgagtttaggtttgatgttcttgatgttcatttgagatttgatgcatgttggtgaaactagtggtgatattggtaattttttatgtgtttgagctattgannnnntatggattgcaacttgaatgttgtgtgaggtatttagggtttgtttcggtgtttctattatgttatgcagctctgaattttattttgtgcttgaggtagtgtttgattttaaagatttaaggtctgagcttgaattagtgggaaatttagctcaatgtttggagcttaacttttatattgattacatctgattttggttgaggattatgttgggttttatgcccnnnntaaaactcatttcaatataatctggttcacttattaatatagatcagaaataacatttaatgttccatggttca

SEQ ID NO: 146970 - DNA, 1583 bp, Cannabis sativa
  modified_base (964)..(964): a, c, t, g, unknown or other
aaataatttccaacatttccctaccatgaactcaattcctgcactaaccatttccgaggctagttgaggagctatcataaccgtagtacataagaagaaattgatgagttattccataagaagaaatatactctgatacttatgtaattaatgagttattccataagaagaaattgcatcgattttcattccctttatcttgacacgtgtcctccagccaaatttaggtataataattgccccttaaaaagttcttttttagtaaaaagagctttttaataattacagaaggcattttcatcaagatttcttcttggaaaaaatgcatcctttgattctagcggttgtacagtttcgagggtcaatatgaattgtctcttcatattctacccttctcccaaccgttggatttctcaatacttagctttcttgtcactagactttgtgtataaaagggcggctcaagcttgtcatttttcataaacctctagttttttagtgagattcatttttagaatggatcatctctttcctgtcaaaatgtcccttctgagttcacaagttcatcctcccaaactcataatacctagacgcaccaaccaatttcaaattcccaaggacttcaaacctcaatcagagccgaaaatgatggattccaaggttgaggagcttccgaccaatccaaactagaggaaccccgtagcccaccatggcttataaagaattccagagggaagttggcatggtttcaaatatatctgggaaggaggttagcatggtttctattagagaacccagccaaccgaaaaaccaaacctgtgccagaagatctttgtgccaacctctttctggtatcgaggaatttcttgagggtgggaaagagatctcgactttaggaaatgggatcttctgatgatgaggaaaatgaggtctgtactgatatcaaggctctctacatgtagcnggtctttctaaagctatgtgtagtcggtctttctacgagctatgtgcatacggtctttctctctcatcctttgtttaggaagatgatttaatggtttgcccctagtggcatttttgtaaagaaaagtttgtaacccgttttaggttttttcttatcttaaatgacttgtactattttcatttgaacttaatacaattgtgtttgcttgcattttgattcacaatgtaaacaactatattttgatcaaatgtacaatacttttgggtttttccattgctcataatcaacctgtttaagtagttagtaatctaccaaacttttttattttcgagcagttgttaattttgcctcgctataacagttacaatctgccttaagcaaacttcaatatactttaatggttttatcacattgtatattttttaatttgctcgtatgaatagttatattatctatccattttctaggttcaagtacttttatcaaggcccgtgatgcctcgttttgtactttcctagctcgtgagaaccattattattcagttttatacgttagttataacttttgatttttctttcccttcggataggttttaaatcaaaaattatagttgtttgat

SEQ ID NO: 146971 - DNA, 977 bp, Cannabis sativa
  modified_base (64)..(66): a, c, t, g, unknown or other
  modified_base (173)..(173): a, c, t, g, unknown or other
  modified_base (349)..(354): a, c, t, g, unknown or other
gatttatgttactattttttaatattttattaaagcataaatttacaaattaatattttactannnttttaataaattttctataaaatatctatcttaaatttattattttttaaaaattgcataataataaatataaattaaatttataatattaaattaaataattattnaattatttatatatatgtattcataactatatatatgtgtgaaatttttattttactttgcagaatataagaaaagtgttttttttagaaaaaatttattatgaattgaacaaaaaaaaacaggagtgaaattatgtagaagaagaaacacgtgtgagattatgaatcaaattttnnnnnnatgcattatttttatattccaatcatataaattaagttgatgtcatcattgtagttcctattgatatcctcaaatttctaaacttaacactcaatttatcgttctgttagttgatcaataaagtaccacatgtaaatcctatatattttctaacccaatctaaagttcgggttgctaaaatttaagtgcaactcgcccaatttaaaaaaaaaaaattgtaaaccgactaactgtttgggcagttgggtcgagttaacctgcccaaacttttttttttgggggtttcaaagtcaataaaaattaaaaggataaattaaaaagatcaaatttcactaaaagcacaacacaatatatatgactttgaaactaacaattaagtatataactttatagtattatatatttaatcatttatgctatatataataaagactaaaaagcaaaaaaaaaaaaaataaagtcgaattggtcgggttattcggtttaattgggtagattggacctattttcaacccgcccaattagcagattggacaatttgtaatttttttgaattatttcggtttgtaattttttatcggtttttttagtttggtttgggctgttagacttttatttgggct

SEQ ID NO: 146972 - DNA, 539 bp, Cannabis sativa
agaagtgttaaatctaaaattatatacactgccaaaaaaaaataaattatttttaccataattttttagtcacaacataaattttttataattaaatatgatttttaatcacaataaaatattatttgtgactataatataatatttagatataaattgtcactaatttagttttagtcataataaatattatgactaaaaatacatttagtcacaataaattatattttctttttaactaatacatttaactaaaaaatttttagtcacaatataaaaatactgatttataattagtcagaacttttttacatttaattacaaattttattgtgactaaatgtaaatttttttataataataataataataataataataatatgtctacaaattgttagtaattttctataatatagttattagtttaaaatatgtaggattctataacaattataaagatatttatatatactagaagaaagttacgtgcaaggcacgtatatttagttttatattaggtgttctataatttaatt

SEQ ID NO: 146973 - DNA, 729 bp, Cannabis sativa
aaatattatctaaaaataataatatatcatacaacaaaacaaaaatttactgtacaacaaaatctatataccaacaacccacaacagctcataaaatattttcaaaaaaatcgacataattttcaaataaaaaaaaattaacaaaactaatatagatatgacataatctttaagtaagttgcttctaattctaaaaaaaaaatattgatttttttatgtggcaaaagacaatataaataataaatagtctaaaagggtcatttttccataagttttaaaataaagacatttattaacataatcctataatttagaatcatttactataattgtcctatcaaaaacaaacacacttgtataggtaggcccaaaaccatgctctaccaagaattctaagaaaccttataaactttaccagttctcgttatttaaaaaattatttactataatcctattttttaacaattaataaaaaagatatctgagaatttcaatagttgatttaagagtttttaggagactattcattaacaatttttaaaataaattttgggttgtttgttactcttgtggttgatttgtttttacaaaaagataaatgttaataggtatcaatggtctataatataactatcaagtattatattattagggtatgcttttaatgggtattacccatgtatggatattttattcttgaccattggatcaaatatctaatggttgata

SEQ ID NO: 146974 - DNA, 535 bp, Cannabis sativa
aattcaataactacaaaaaagatacggtactaagtataaatattttgtattataaaattttaaaataaacaataaaaaatagaaatttttacatcaaaaatccaatttacacaatttattacaaaaaaatccctacacgcctatatcaacttttttacttaccatgttgttttattacaaaaataccacttagtcatcattccatgcacagacacgtgtgccatccccatcactcatcaatcaaatccaactctcttccctctcttttttccttttctttcaatttcatttttcgatttttccttttgtttctaagttgtttggaagatcaagtaacctccattgataagcttaaccacccattattgatcacgttttttccctctcgttttttgttcatccacaaaatttcaactcccactaaacccacattttctcaactgtttttccctctcagtttcatcttttttcaaatttatttataagatggcaatcactcgttcaccatcaccaccttctccagttctcaaacaaa

SEQ ID NO: 146975 - DNA, 795 bp, Cannabis sativa
  modified_base (737)..(761): a, c, t, g, unknown or other
ctcagattttgcagcaaacctagacactagaaggagcctaacagggtttgtgttcactgctcttgggggctgcatcagttggaaatctatcctacagaaagtagtagtcttgtcatctacagaagctgaatacatggctgctacagaagtcatcaaggaggctatatggcttaaggggttgacaagggagttaggtttcagatatgaggatatcacagtttattgtgacaatcaaagtgctttacatctcatgaaaaatctaatgtttcatgagaggtcaaagcacattgatatcaagttacacttcataagggatattgtgtcatccaagaaggtgcaagtgaaggaaatagcgcacatgataaccctgtagatattttcactaaaagtgtaactagagacaagtactttaggcactgtctaaacgtgttgagcattcatgacatttaatgtcctcacttatttctttcggatcacagattaagtgagtctaatcaggtggaattattggaattaaactcacttaacctgtcaagtccagtatgtccatctatttactcatcagatgaatctgaagaagctgctactatttataacagttggctttaacgccaacttaaaagggacccgccaacgactatatatagggtttcctctattcttgaaagggttctgagttcagagttctaatctctaaaatatcatactttaaattcagttgagagagagagagagannnnnnnnnnnnnnnnnnnnnnnnntccaagatcatagtgagtgtgtgtggagggatgt

SEQ ID NO: 146976 - DNA, 602 bp, Cannabis sativa
  modified_base (40)..(58): a, c, t, g, unknown or other
  modified_base (341)..(345): a, c, t, g, unknown or other
  modified_base (539)..(550): a, c, t, g, unknown or other
aatgatctttgaactacatatccaaatatttctccacccnnnnnnnnnnnnnnnnnnnttaaccacttaccttaatgtttttaacataactagaaattcataaaatttcttaaacatttcaaatttatttgcactaaggtaaaatctagagtgatcatcttaagaatataacgaaaactcatataaatgtacatccatattcgaatatagatgatcttactttcaagtggatatagacatattttctttttgcaaagaatcatcttgtcaaaaccactatgaacaagatgtaaataccatagacacattaaactatggttgtggtctttgatgacttaggnnnnnttacaataaagagttcttagaataatccaagtggatcctgatcacagaatactaaactcattattccatacataaacatacagtttgaatcccttgatagaaaatggatattaacaacttgtgaaagttatactggatgttcaatgtattatggaaactgaaatataatatttttatttggaatctaaaatttnnnnnnnnnnnnttaaatttataccaaatatacaagagtgattattctagcttagaccaccact

SEQ ID NO: 146977 - DNA, 891 bp, Cannabis sativa
catggcaataccctaaacatcacaaaaatgggaaaaactagggttctcaaaacttccccaaccggtaaaccggttcccaaccgaaattccagttatgcggggttttctggggaccaatcggaattccagttcctacaggtcctcctgaacaaagaaatcttcaaagtttcataactcaaccaaaacaaccccaaatcaaatgaaaccttccagacctgttctaaacatcccaataaacattttccaagcaataaaacacttctacaagcttagaaacaaaatccacgattaaagctccaagtttgagttttaaactcaaaacttggttaaatctaccgacatccaacaattcaagcttaaatcaacataatctaacataatttaacttctaaaaacaacatctaacaactacagcaacaatagtagctaaatcaccatttcatgcaaaaatccatttcttaaaattcaagaaaataagagtagaagtttaaaagactatgccttggcttgagatcactaagaactagctgagaatgacttgaattactgggaaaaattctaaccctaagagccctaggaatttttgagagagagagagttgaaagagagaaagtgcttcctttaccaagttttcttatttttttttaataaatgagataaagcttagtttttttaaaatatctcagccaaaataacataaaaaaaatcagattaagatatatcttaattaacctcactaaagacaaaaagcttatggggcaaaatgatcatttttccattcacacactaaaagggttaaaaaggcacttaggggtaatttaggaaattctaaaatcccgactaatcccgacattcccaatgtctaactataccgtcccgctatactaaaat

SEQ ID NO: 146978 - DNA, 720 bp, Cannabis sativa
  modified_base (51)..(79): a, c, t, g, unknown or other
ctagtgtttatttaatataactgagatgtaaatattatagaatttgtatcnnnnnnnnnnnnnnnnnnnnnnnnnnnnntataaatataatgtggtaattgtgatttaagatacagtgaatgaagcttaatctcataaattgcaattatttgtaatagaaaataagatattattaataagaaaaaaaaactgtattgcaacattatgagaaaaacagggataaaaatcccaaactaaaaattcgaaatccaattgtttttaaactaaaacaattaattcaaaaatagataaataaatgagcttcatcttcatcttggacaatcttcacccttttgtccggctttccgaaccaactcactgagttcaagtagcttggcctataataagaagaagaacaaataaaaaaagttagtccagaatcaaaaatccaattggataataattcactaaaaatcttaaagtttataaaaagaaataccttgtttctttgaaagaagtttaggacattggggtttccaattacctttctcattgcagtagaaacactttccttttagtgcatcaccagaagcagcagccttttttttttcatagccttggctcgcttcttggtgtttttccacttcttcttagatttgggttttgaagtagaggcaacatgtgcctcaggtttaaccgtcccattaccattgccagaattttgaggtttacccctttctt

SEQ ID NO: 146979 - DNA, 577 bp, Cannabis sativa
  modified_base (443)..(443): a, c, t, g, unknown or other
aacgctttgagaccaaagagactgaagaacatgaacttagtgggagtttctaaaaaatttctacaataagctcatcacagagcaagctctctatctctctcacacacataaccacaatcttatctttcctaaattttcttcttcctcctcattcatactctttttttttttggttacctgctataaaaggagagagttagcttttatttaggtaatgttgtagacttggaaaaaaagaaaaaaaaaaggaagaagaagatgaacatgggagatagagctcaaaaataaaataaggtgtgtgtttaattatttgctcaagagcaatatatatatacatatataatctctaggaatatgagatcacgtgggcttgcctaattttttttaaaaaatgaaatacacaagtattttaacagttaaaaaaagactaattaggatttttnccccctgaactttgacatgtatcagattatacctcctgaacttttaagatcgttaaaaatatctcttgaactattgtaattgttagatttaaggacttttgtcaaatttcattcaattttactatttcaaagat

SEQ ID NO: 146980 - DNA, 1205 bp, Cannabis sativa
  modified_base (490)..(492): a, c, t, g, unknown or other
aatcattactcatgtttctcttcaatataaatgatggatttattctattctcaatcaaagtacaacccaacttacatataactctataattatatattcataatattaatctgatatctaaagagtaaagattattctcattttttgggcacttacctgtctttaatatcttcgctttggctttttaaactgggtaaatattattttgaatatttttcaaaaaattattaattggattttttattttgttaaatgataaaatgtattctatattttctaaaattatataaataggattttgatttaattttttatcaaaataaattttaagaataatttaatctagaaatgttatgataaaattattattagttacattttctgtatttgttttgttaaaaatgagggaaaatagcggcataatacccaaagttccatatttatatgacttaagtacccaatttatttttttagtggcaaaagtgcacannnttcacttctgttagtatttgttagtacccaattcaattatgtcagttttcgtaactcatattaattcacctatttactaatatgacttttgtttttatctcatcattttacatcttagtaaatgagtgaattaatctgagttgtacacaaattgacagaattgaattgggtactaaaaaatactaacagaagtgaacattgtgcacttttgccactaaaaaaaaaatttgggtacttaagtcatataaatgtgaaactttgaatacttatgccgctattttccctaaaaattatttgggttatattaaaaaagaaattttttaaaaattgagtttaagtcttattttaagtattttagaaaatataggtttattttatatttaataaaatagaaagtgtaattaataatttttaataaatacaaaatttaaaacagtatttactcttttaaatttcataatttgtttgcaatactttcgtttgtaattatttggggataaagctaatttagcatacatcgtatattgtatgcactaaaatatttatttgcatattatataaatggtagctaaaacttgctattaaaatccttttggcttttgtctattatttgtgagttgtgaccaggcaacagcgccgtctcaaatattttagagtccctgttctaattttaaaaaataggccctaataaaaaaaattataatttgtaaata

SEQ ID NO: 146981 - DNA, 628 bp, Cannabis sativa
tttatagattttttattaaaaatttattcattaaaactagtataaatttataattttaaattatcatgcattaattaacaatagttatttaaattgatttaaagagaaacactataataataaaattataatattctttttcaattactagaaaattaatatcaatattttttaaaattaatatttgtataaaattagtgattaaagttttatttagtataaatcaagtatttttatttcattattttaattatttattaagtaaaaatatgataaattatttattaaataaatatataataaaatatttatgttatatatttgattatacgtgatatggattaaatcatagttctcttggcttaacttcttagtttcttattctgacaatccattatttgtttaaactcacaatggattttgatcactggtgtcttccaagtcataacatggtgagttccttgaaactctcccactacgataaggtaccgtgatttttgtctaagaatctaaatggtatttttctcttccggctgtgttaaaaaacaacagaggcagtgggatcatcttgtatagaataagatgataaaatacttttggaatcaagaaaaaacatctcctttatttg

SEQ ID NO: 146982 - DNA, 1036 bp, Cannabis sativa
caattgtaattggatatccaactttttgtaattggattggattggatcggttcggttcaattggattggattggatgatgcccacccctacgtgaaagtattattattagagtattttcaatggagattgtctattgaagttgtcttgccacatatacaatgaggtctaattttcaagactaattttatgtgaattgttgctcaatatagacaatgatcacatgatatatttttttaatttttttattagattttttaaatttaatgtgatgtgggaccatagtggataacttttaaagttgtcaaccattagagtataaaaaaaataatcttttaaaatgatatgtgtattttaacaactataaatactttcttattcgagatgctcttaagagtacatattattggtctttggtcaaaatagttgaacgtacggttgatcaagaagagcatgctatataagatgatcattcattgttattgttattgggtagtaatagtcatggccggtcctaggcataagcctaagcgggttaggctcgtgcctagggcccacacttttcgggggcttaaaataaaaataataataaaattattagacatttatttaagtaaaattaagtgtattgtaaataataaatatcatagcttagttggttaaggtgtatgacatattatacaatgccatgggtttgaatcccataacactcttttagggtcagccctgctccccttatgtattacaatgtatagaactaaaaaaagtaaattaacttattaaattatcaataaattactaatttgaacaaaattacataaaaaaaagctaagactattaagaaaatttataagaacagttgaaaaatactttatattataacaaaattttaattacacgttcagtaccaaaatgattttcttcgatgttagttatctagatcactatattggttgtctagatcaccaactgggaatgaaaattccttaagagtaaattcaaaattatgataatcattttcttcatatattgctacat

SEQ ID NO: 146983 - DNA, 522 bp, Cannabis sativa
ctgagcagtaaccatgagggccctatgatctgactgaaaaaagtcaagatgagacacaactggaactttaaagtcatgtatccaagaagagttaatgaatccataatccaatcgttccttcacattggaaccacaagtattgttgttgtgccaagtaaatctctcaccctcaaagatcaattcttgtaatccacttgcatcaatggtgtttcggaaatcatcgatttgagaatcattttctatggggccacctaacttatctatgtgggaaatagtctcattaaaatctcccatgacaagccaaggcaaaagaggggccgagtctttgagcttctttaaaagttcccaagtgaatttcctttgtgcaacaacaggagatccgtaaaaactagagaagtgacaagtaggcccatcaagaagagcaatataacaatcaacaaagtgccttccataatttataatagttacatttacattagaattccaaagaaaaagcaaaccaccactaagacctattctagg

SEQ ID NO: 146984 - DNA, 672 bp, Cannabis sativa
  modified_base (603)..(607): a, c, t, g, unknown or other
tttaatttttgtgtatcaatgattctgggttcctttttattattaatgatctttttaagtttcataaaattttattatgatttaaaatcctacaaatttaattttcgattaacaaaattactaaaattaattaattattactatataaaacaccgcactaggggtgagcaatggtcggcttagtcggtttttttacacaaaaaaattcaaaattcggtttttggtttttagattataatcatgaaaaccgaccgaccattatataaatgtaaaaaaactaactattttaatccacgatttggtcggtttgaaccgaccaaaccgagcttcttttttttttttaaaaaaataagtcttaaaattttctataattatttgaaaactaaaaaaaattagagtattgtatcaaatatcatataatttaagaacaaaacttttttagttaaataaataatgtaaaatatatatttttttaaaatttgttcaaattatttgtgctactaatatggtaagttatattaaaaaactaatattattttgtaattgtgtgtatataatacgtaattacatcaaattataataaaataaaataatgaataattnnnnntttaaataaaaaagataagaagtaaaactagtttaataaaattatatattaaatagggtaaattt

SEQ ID NO: 146985 - DNA, 641 bp, Cannabis sativa
cttttttgaagtttattgcttcatgttcttctagtctttgcagcagtaaaactcaatgccatcacaggctttatatatataaatatatatatatatatttgtatttatagttacttcattgattcattcaaacaaaagtcaaaattgttaatgaaagctccattgatataaaaaggcaacaacttacagaattaatttgtgcactttattttttttttatttgttctttttaaactatgtattaataatactaattaaaattagaaatttttacataacactaaaatttaaaaattatatgtaaaaataaattaatacggataaatttttaattttatggtttgaactctattttttaataaaaatatgttcttcatagtttatttataatttttatgatattaattttttttttgttgcccctgattttgccaaaaatacgtggaccaaccgaataaggacacatggacggaaaagatttagcatttgaataaaacagctaagtcttcttaaagcgaatgattaccctagacatgcctcccggagaaggcatgtaagtctcgtatgctcccggagagcaaaatgacaacaaagcatctccgggtggtgtcaggtttcatctgaactgtcatctcgcattt

SEQ ID NO: 146986 - DNA, 778 bp, Cannabis sativa
ttctattgtttcgtgtcatttatcagtgatgataatcatttctgtgttgtcgacttcttcttcttctttctggttgttttcaagttattgtaccatttccatttctggttgcacgtattcatcttctgcaggagttttattgttgtggttttctggttgttgtatggttgactctaatattaaagtcataatgtcgaccaaaatagcatcatcttgaattgatccaatcgttgcagtagatagttgttgcttgtttgttgtttttgggttgttacaatgatgttgcgcatctgcatgtgctcagttattgtgatatgttgtcatcatcatatttttgcacatcattgattagttaggtgccaaaaacgtttctctctccgtgttgctgattttgttcacacacaatgggtaccgtgtgaaatacatttctttgcttaatacctttatgtggaacatcaaacttttatcattcttgatttgtaatggttgaaatccttctttcatatggtattttagtagtatttgtgatgtatcagagttgtattgtagttcccccatcattattttcactagttgatcaaaagtgcaatctattgatactaattctccacttaatttgtaatcaacatagtgtttgttgtcatccaaatgctcattgtttcgtactaaaatttgcagaggttccatgtcctacaatttgtgtacttattattatgagaatatcgttaggttttgtgccctaaataaaacccatttcaacataatcagatttacttat

SEQ ID NO: 146987 - DNA, 613 bp, Cannabis sativa
  modified_base (287)..(289): a, c, t, g, unknown or other
taaaataaattccaacaatatatatataaaagaagatgaagagaagattacaaaaatacaatgaataataacacaatataaataatagaatatatatagatgtgagaacaatctcaacaccactaacaccaagtgtcaagtaggaaaatcacaaaacttgaacaaagttttacacctttctccaaaaggttattttcccctaccacaagcacttagggaagacaaaaaaaaaattaataactttctgaatttatcaagtttatagtttctagcaaggtgctctcttnnntagaaactcacaaaaaatgtgtctgaaccaaagacctatatttatagtgtttaagatcatacactttgaaattcaaactcataaccccccatggctgttatggactcaaatgtaactcatgcacacaccataaatcttatagcattaagaatttcaaattaaagtgtgtaacacctttttacacacttaatattggtgataattgtagaggttacaaaatgtaagtaactccatctcttatgttacaatttatgtgttgttgggaattttttactaggatctaaatttactaaaaagtatgtcgattaacatcctaaatatgaa

SEQ ID NO: 146988 - DNA, 563 bp, Cannabis sativa
aaaaaaaaaaaagaaaattagtgtgggtattttggcttccgcgctctctctactcacttaagatgaaacttgttgttttaacagaatgagtgagaagcttggggaccagtatcctatatttataggtaggatactccatcagtatctgtgctacattaattgtaaaaatattttaacaattaattcgagaaattaaatcagaaaacaaaatattgggtatatcaaaatctgaccataattaaaatatttaattaattatcatataattaataaaatataatattactaagtatatttgatcgtattcgtctaaaatcaattgtgatagattttttactttatttcgaatattctaatattcgtccacttagtcagcatttagatttatctctcaaacccaatatttatcactacataataaacatgaatcatagcgataggtcctcattatatatcgagtattatcttccatatattacaatatatgcattatataacaatgtattttatgtagcaatgtacttaagcgaataaactcaaaatcttatgtttattctggtcct

SEQ ID NO: 146989 - DNA, 582 bp, Cannabis sativa
tcaaaactattgttattattgtatttcacttgttgtctcattgtatctcacttattttcatcaccgtatctcaccccgttgtcatcattgtatctcatcatttgtcattattgtagttcacttgtagtcataatgcattatttgagattttatgcttaatttttctatttaattagaaaaatctctcatttttatattatatagatagggattgttccatcggctgaaaaaaaaaattaagaaaaaaagtttttaagcaaaatataaagataataaaaaaattgagattaacttaaatatttgtacataaacataatgttgatacagtgtaaaataatatatgtttttttttattttttttattaagtagctaaattaagtataaaatttaaatttatctttaattttattattcgtcattggattaaaatctaatgatttaatatcttaaaaattaatatttatagttaaatttatttagtaaccatcaatgggtaaacctattaagaagtattccttatatatattgattgatattttatgttatataaataaaatttacgattaattatatttgattta

SEQ ID NO: 146990 - DNA, 924 bp, Cannabis sativa
aatgggcattagaattataatttctcaatttcgaagatgttattaaactctaggtgtaatatttgtgttatatgtgaattatacaatttttattatttttgctttgacaacagaaaatgcgatagatggtcagtttgatcacatgggtaagtctagaatcttattttttagtgggatgcatgttggaggaaatagaatatcgagtttgagcggggttatggtttttaaccattttaccctaggctttatttttgcttaagttgtaagtaaagggcatttaggtcattttatggtgagggttaggtggcaacctaggaatgtagcacctgcccatttttattcagcaaaagattaattggttaatctttaatttattttggaaattaagaaagaaaattcaaaaattgaagaaaaaccctttctttctcttctctctcttcgaaccagccaaaaaccagaggaaaatcaccccaattcttcccttttttttggaatcaagataagtatcaagtgttcttgaggttgaggtaatccttagttcttttactctttgttttttaaagctttgaattggtttgagtatgtgattttgaaaattaggagctgttagggtttaaaggtagtgtaatttgatttctaagctgattttgagttgattctaagttctggatgttagttttggtgtattgtattcagattgagcaagttcaagctttgaaactcaaacttgggtctctaatagcatgtttaaattcagtcagtttttcagggatttgttggttggaatatgttgtgtataccctgtttaggtactctggaaaatttggtggcaattgggcaagttttaagaaagttttgaagttgttggggaaacctggtgcaaaccggttaatcggtttgccaggtcctgtaaaacctgttaac

SEQ ID NO: 146991 - DNA, 814 bp, Cannabis sativa
  modified_base (136)..(137): a, c, t, g, unknown or other
atgtacaatcttcctccctcgttattgatgaaaaggaaatttaatatgctttcgttaatgatatcaggcccgcaacaacccagacataatatcaatgtatatttgaaacccttgattgactatttaatagaattgnntgagaatggtgttcaggcctatgacggttttaaaaaagaattctttaatttgaaagcatggtattgtggactgtagcaattttctaacttgcagtaatttatcaggcttaagcataaaaggttacaaaggttttccgattcattgcactaacaccatggctcgtcgcttggaaaatggacacaagatgtgttatatgggtcatagacggtacttgcgtacaaatcaccctgatagaagaaagaagaaagcattcgatggtactgaagagggagatatggtggggaacaaattcttcaagaggtagagctagtagattttaagtatggaaagatgcaaaagaataagaaaacaaatggttcctttcaaagaaagtcaatcttttttcgtcttccatattgaaaaagtaaactgcttcgacattgtttggatgtcatgcatattgaaaaatgtgtctgaaagtactatcggtaccttacttgatattcctagcaaaactaagaatggtttaaatagttgtttagatctcattgaaatgggtatccgacaatcttaggcacctaaaaagaaaggtgaacgattatattttcttcctgcttgtttcactttctccaaaagggaaaaacagaaggtttgcgaatcattttcaaatatgaaagtacccgatggttactcgtct

SEQ ID NO: 146992 - DNA, 1509 bp, Cannabis sativa
atcagattatattgaaatgggttttatttaagccataaaatctcaacatatattacacatactcataataacatatataacatgttctatgctattcttacctcttttctaaattcaagtgagttggccgacctgaacagaaaacctcatgctggatggatgccctagtcacatttacataaacgggtaaataacacaccaaaaccctaatctaggaaaccccaaactcccaactaagggtttttctattggtaactaatataacaataccctaagtatcgagaaattaaccaactaaggctttgaaaataacccgaatcaacaaatcgaacaattcgggaaacctgctcctgattcagctaaccctttttacaggtcttgtaaaactggttaaccggtttgcatgagttaacccaaacaagtttgaaacttgttcaattcgtgtccaaaccaagccaaaccttccaaaacacatgtaacaacctcaaaaaacattttccaagcaatagaagcaagaaaatcacacaaaatccaaacatgctattaatgaccctagaacacaacacatcaaaactagctacaagaactcaatttcaacttgaaatgaacctagaaacttaaccacaaagcattctaaccctaatagccactacatctcaaaattgcataattaaatcaaaattaagccttaaactacacaaagattaaacctctagggttacctctaatttacaccacttggattcagctaacacctcctgaaaatcactctaaaatcttaagttccttgttggttcttgctaggcttgaagggaagggagagagcgagagtaagaaaatttgagttttttcttttttttctttttaattttaattcatctagttggtggataaaccttaggctgaagtggtgccaaaaaggccagttgccacccttaggaaatgccacctaatcctcaaataggaaataccaaaaataccctttaatcccttaagttaaacaatagttatcctgctaagaaaaaggttctaaacttacccatgtgacacaaacggccatccatcacatttttcgttgtcgtcgagcaaaaattataaaatttgcataatacatatttaatataaataatactcctagagtttaataaaatgtctagaattgagaaattataactctaatgtccatttctaataataggacccacaacataataaaatcatgcataattataaaaatgccaataattaacactaattgcctttactaatctatattctaacatacagtcattacaattatccccccgttaaaaggatatcgtctcgaaaatcaaacctgaatagctctagatattgagttctcatgccagactctaatttccaagtgacttcctccaccttgttgttcttcccgatcaccttgaccaaagctatggtcttatttcgaaaaactttttctttcctatcaaggatctaaactggttcttcctcataggataagtctgattg

SEQ ID NO: 146993 - DNA, 519 bp, Cannabis sativa
tgcactacccttctattgttgtgttgatgggtatgtagaatctaagtaggctcaaggtgttgggtgttggggtaagggtttagggtttgggtttttgcgtttaggatttagggtttagggttcagggttcaggggaatgggaataggaatgaaaataatataaaatttaaaatgcaaaaaaaattgataaaaatcattaaattttttctaatgttacattggaattgtctttccttctgtgatatccgaaatctggcaggcaatttagaggatgacgcgtgtcaaccttagagaatacgaatccacgaatgtaatggcagatactaatttgtactctaagacttgaatatgaagaatggtttcgcgttaaatttatttaaaattcccccctaattcaaaaatttaaaatattctcctttaaagggtaaattttaacaagttttttctttactgttacactcgttagtattctgttaaaatctcaccctacacatctaaaaaattgtgaaattttacaag

SEQ ID NO: 146994 - DNA, 671 bp, Cannabis sativa
atccagtctcgcatttgaacaacttcaacacaagaatgcgagctagtaatgtgacaaacaatttacgttgtatcttgtttcccacctcactagttagagcagcaagcagcaagttcaacaagtttactgaccattcaataacttcctaggaatagttatccaggaatttcaagaaacagttccaggcaagaagggatagacaacccgaagcggcctcgctaaccaatataaagcaacaacctgacaagacacttaaggcataattaagttgttttagcaaggttgctgcaagggttagaaatttggatgatagtacacaacttacagcacttcaggtggggatctttactgatccatcaactgctgggggcgagctgtgggacgacttacagggtcgtccagtgagaaacatcactgagttcaacgaaagggctcaggtatttgtttgaaaagaggaagctcgaaaagaaatgaatttgttgaaaacgggctcgggaggcaaacccagcaatgtttcgacaagtactatctcaacgggagttgataacttgggggcctttggctcgaagagaaaggacagttctaaggaaccgtcaaaggataaaaagaaatagaagaagcatgataagtacgtgccagtatatacaatttataccgagattaatgaaact

SEQ ID NO: 146995 - DNA, 668 bp, Cannabis sativa
  modified_base (278)..(294): a, c, t, g, unknown or other
aaattgaaaaacaaaagtagttacagaacgcatttttatttttcaaaaacaaaaaaattacattcattttgtgattaaaaaattagaaaacaaaaatattaataaacgacacctaaatatatacaatttgaaaatataaggtaccaatttagtattattaaaaatacatggtaccaaatatatattttatgaaaacacaatatagtaaagggtaaataccattttgtaccctatgttttgcagaagttatcatttggacattctgttttgttaaatgnnnnnnnnnnnnnnnnnttttctaaaatagtacaaataagaccttgaactgattttttgtcaaaataaaatttaataataatccaatctatatgtgttataacacaactatttatattttctgtatctgttcatgttaggaattatcttcaagttggttatattaaagttgtcaaaaattaagctcagggtcctattttttaggggtgtacgtcggtcggtttagtcgggttatagtatatttttaccaacttaaaataaatattaggttgcaaatatttaattgtaacccgcccaattaaaaagtagaaaaagttcaacccgcctaataatttcgtcgatttggtcggattaacccgtccaaatccttcttcactttttttttttttttt

SEQ ID NO: 146996 - DNA, 509 bp, Cannabis sativa
atcggtggcgataaaaattagtgtaccggaaatattgccaaaaataggggtagtatatatcaaaacactacctcgacgagtagatcgcactcatgccgaatgtttgtcaaaattgtacacgatgtcaccaaaaattcaccggataggggcggagcttcaaaaatatcatcgaaaaaagtagtgagctaggtgaaatagtttagtgtaggctgttctcctcgacgagctgagtttagtagtgaagacaactcgtcaaatggacaccggaggtgaccataaaatttgttcaaagtttgaaccaccaaattttgacttgcgatcccgagctaacgatggcgaaaggagcaatgccgcttgggggctgaggtggctggcactagggggttcgagtggtctggtgcgtggggctggtcggtggccggaggtgggtcgctggagtccgccagtgatggagctttgtggtttttttttgtgttttgaagggagagaaaaagatatatatatatata

SEQ ID NO: 146997 - DNA, 602 bp, Cannabis sativa
ataaaatattatcaacacaaccaaactgtcatcaattatataattgtatgttgtgtaataatgtatttcatggggtgtccaacaatttttcaagaaaatttaaataatttatgaatgtcaaaatcaaaatattaatgttatctcagtagtgaaaatttagtaactatgcacttaaactttacaaaaccaaatgctctgttctgttcaaatcaaaacaatttcaagccaaaagtgttgtatgacaaaaatgaagtaaagggtagagtagaaactcttaccattaatgtatctccttctgtaaatgtaatagccaatcaaaactaatccaacaaagagaatgacagctacaattatcactactttcttcaccttggaattaccattaccattaccaccaacacttgtttcttttggagctgggaaaggcgaaaacaaaacagaacacatatgttaactaaatatggatatagacagggccgaccctaggtataagctggctaagcccgcgtttagggcccactcattttaggggcccatttcaactcagggccggccctggatatagatagcattttaaatctgtactaatctgtacctgttgt

SEQ ID NO: 146998 - DNA, 850 bp, Cannabis sativa
  modified_base (617)..(617): a, c, t, g, unknown or other
ggctcgttactacccaaatggaacgtttttggatgctagcttgggtaataatcccagctttgtttggcggagtctgcatgaggcccattctattattcgggcgggtgttcgaaggacggtgggagatggttctataatctcaattttacatgatcattggttaccttgccctgtagatccgtatgtgcattcggaccatcctaggttacaagacaaaacagttcacagtctctttcatttggatgataaggtgtgggacacggaaatcataaatgacttgttctctgcccgtgacagtgctcttattacatctatacagctgagctcaaataatcatagagattgctggtcttagaatttcgagaatagtggtctgtttaccataaaaagtgcgtatcgtttctttgaaaatctcaaatatgattgggtggacgatgacaacactagtttttggaggaaaatgtggacattaaagattcccccaaaggttagcaactttatttggagagcagcttcgggtatcctcccaacttgtttgcaacttctcaagcgtcatgtggttattagccccatttgtccggtatgtcatgaggctgaggaatctacttttcatgctntagtgggttgctcttttgctcgagcctgttggaaatagatctttggttagtatttctagttgcttagctgatagttttggctcttggtttcaagctctttcggcaaggatcaattctcaagcactagaagaagcagcaatggttgcatggagtatctggaaggcccgtaatgaggttgtttggcaacaaaaatctcctactgctgcattagtggttttgtcggcaagatcact

SEQ ID NO: 146999 - DNA, 1082 bp, Cannabis sativa
  modified_base (749)..(765): a, c, t, g, unknown or other
  modified_base (1049)..(1050): a, c, t, g, unknown or other
gccatggtttacgtagggggtgaggttgtggggaagtcggttgaggagtgggttggtggtaggtcgatttagggttagggtttgggaaggagaagaagaggggaaacagagtagggcttgacattgttagagttgtattgacatggtttttttgtgtgtgtatgattgttgtttgaagaggtgtgatatggccgagtcaaacaggcttaggaatgtgaaaccgacgattcatattctttgttttttttagtagagaagaagaagaagaagaaagaaaagattaggaaattagggtttttttaattttttcattttttaatttttaaagaaaaataattttttattttttatttttaaaataattaattattttattttattaaatatttatttacgtggaccaataaaattgtgccacgtggacattccaccatggcagtgaacagccaaaaatggatggaaagggctaattgccaacagaacttgggtttaggaggttttaccaccaaaattttagaattgggggtgagttgcaaacacgtgaccacttaaggagattatgccacaaattgccctaaataatatcatatccatatatgagcaataagctcctgaaaagccttaagtggtatattcttaatgatccggatcacacaaaatatggagtttgttcttagtatgttctatagacaccttattactctgaacttcattttaacaacaattagctcaaagtcaatgtgtctttnnnnnnnnnnnnnnnnntgttgttactaaaatgcaacctgatcaatttattgtcacaacatatatctttaatagcttttaataccatttctaattttgcagccaatgtgacaaaaaaaatctcacaactaaaaactttataagatcagaattaaaaatcttaatgatctccaaaattttttattttctgatttctgataaagtgaacatatagtattttattctccttaaattccttgtagcttatttggctgcataccgaaagttccttatatggttacttaaatatctatccaacattnntaatatgtatattaagtacaaatacatacatg

SEQ ID NO: 147000 - DNA, 902 bp, Cannabis sativa
gttaatatataaagatatatatatgtgagtgatgacttctacctaccccatctgatcaccttttcatttaaagctcaataagtgctaatactaatcacctcatttttccataggaaagtgaacaatattccacttgatcgataatccactgtacgaaattgatatgtatataattatataaatatcatataacagttatattttcttgtccaataacttattagtcaagtaaataatgcttttcgaccaaataatgtgatgtgaattattgatatatgatttgtttatggaaatgcatatatgtgtatatatattgtatacgtatgatgaatttattttgtatacgtctagactctagggtttctagctacttgttttgtttccatgcatgtcttttccatttaattatttccattgtgatcgttacgtacttatatactctagtttatattgggttcgtttagtatatatactctgttgtgttatattatattgtataatattgtgttaagtaatattgtattctataaccacttgaggctaactcaagtggctatagggggtgcgtgtgtattggaggtcctgggttcgagtctcagtttatgttgatataatatataaacgcttaaataaaaaagaaaagtaatattgtattctataatataatattatatagtagaatgttatatttgatattgatttgttaataaattgttaaaattattctatatttacactactataaaataagcttttttcgtcggtcaacacggcgattaaaactcgaaaccgttataaaaagttagtggagaaattaatttattgttggttgtgccactatagaagaaaaaaaaaaaaaaaaaccatttttaatagtgacaacataaattttttgtgaataa

SEQ ID NO: 147001 - DNA, 850 bp, Cannabis sativa
cccaaatggttaaatctgtcccaatttggataaggctaaatggcttgggtcttcaatattggggtaggaacagcctaagtgctttagttagcaccatagaaaaacaaatcatgatggatagtcataaggtcacaaaggagaagtcgatgatcaaatttgtgagaattctagtggacattgaaatttcaaacaatcctccaaaagctatatcattcattaatgagaagaagcaaatggtgaaacaatcaatagagtatgagtggttaccttctaaatgtatagcttgtactatgttaggccacacggtggctaattgtaataaagaaaaaggtttgttaggaagaaaaagagtgcagcgagcaagaagcaagaaccaaatattgggggtgaaacataagtgaaaaatgatgctgagattgtagaggggctgttatggagaaacctgacggcaccattgtgaagaaggatgaaaggaagaaaacagagaagaacaagtcgacaactacaacagattcaggaggtttagggtactggattacgcctaggaagaaggggcataaactagtggaaatagcttgtccgagggccacaaccagtaatggatctgatgtgctacagaataatggagatggatttggggaaacaactaaaacttagccagttaatggacagtgttagtttaatgggatggaacattagggggtttaataagacggagaagcagtaagtgcttctagaggtctgtaaaataaacaaggttggtttcttggctctttttgaaaccaaaataaatcatgatagggtgttagatgtgatggaaaataactttaggagctggaatttctactcc

SEQ ID NO: 147002 - DNA, 798 bp, Cannabis sativa
tggtagtatataattttattgtcatgttatatatatttcaattgtggtatataatttggttagtataatatatatatatatatatattagtaatatatacattttcttattattattaatatatatgttttggggaatattatatgtatttttgattatacagtatatcatttttcaaaaataatatttaagttctatttttttattgtacttttctttaacatgatatataattttattagcatgaaatatacttttatttgttgttattgtatatatatatatttctattctaagatatatattttttgttctacggtatataagttttattgtaaagtatattattttatttaagatcttagtttttattttattatatataaagtgatacataattttatacgtatggtataattattttatggttgtatataattttattaatatggtctacataactttttttttaataatattatattattttatttttttattgtaaatatacatgttctgttatatggtatatagtttttgttgtgtatagtatatcatttatttaagatgatattttattagtttctattttattatatataataattatgtataaattttttggtatgtatacatattttaatagtgatatatataattttgttggcatgacatatattttttaagtattaatttaatattgttataatttttttgtggtatataattttattactatggtatattaattttacttatacgatatatcaaatactattatttaatatatttatttat

SEQ ID NO: 147003 - DNA, 561 bp, Cannabis sativa
actgttgttttataaaaacacagatttttgaaaagattttcgtgtgacagtattcttgtaaaagttaactaaaattctagtgtttttgtaagtttcccaataaatttaattgaaataatacccttacattataagttctgactttgattaattgagttgtaggggactcctattcctccatagcaatcgaatgtacgcaagctccaccgcaagtctttcattgccagcgtccctccgattactccaccaccgacatcaatgctacacttttgtaattacaaccgcaaccgccaccgtccttcaatattcaaatgtacataactttctcttttctttctttttgaatttgttttagtttttctctctaaatctttgtttctccctcgtccaatcctctatttattttggtttgtattgcctatgtatatgtgtataagtttatgtgtgcttttatagtcattgttggtatgtcaatataatgtctgttagactttttatttgggcttacattaaattttattggttttattaaaacttgggttgattggatagttctttgct

SEQ ID NO: 147004 - DNA, 731 bp, Cannabis sativa
ttaattttttatgttatttaaatttttaacttaaaaaaattaaattaaattaattattaatatattatgttagtttttttttttaaaaaaatatattatgttatttaaaaattttctcttttttccttttaggtttaactaaatatcataatatatagtcatataagtgtgtcattttttaacttttgaacaaattaaaatttaagagaaaatatttagttgtaagaaaatgtttttaacttgaagaaataaaaatataaaaatttagaatattaaaataaattttaaactaaattaatttcataaatatatatgaaattaaaaattactataaaaaattaattattaaaaaataaataactacttatagaaatatatatagaacttattgggtaagacatttatcaatcacccataaaaaaataatatctaagacaaaagaaaataaataaataaaagtactatttataacctatatggataataactaaaatgtctctaaacaatgtgagactttttagcttgtagtgtagtttatttttcaaataaaataagagaatgtgtcacaaaataggaaaaataggaagaaaaaaaaaataaaaagccacctaaattctcttgtgcattcctttatattaaaataaattcttaaactaagttaatttcataaatgtatataaaattaaaaattagtataaaaaatttaattattaaaagataaataactactt

SEQ ID NO: 147005 - DNA, 598 bp, Cannabis sativa
taaaaatatgaggtgtcactaaagagtaactcccataatttatattatttttttttttaaaaaaaaattagtctatagtcacacactaggtgcgactacgtaagtgtgtcccgacccacttggcgcgtcactatatctaactttattttttttaaatacatctgtaaacaaaaattaaaaaaatatatatttgatataataataataaaaatcacgcttatctctctttctcaattaatttttattttttttcttaaataatctttctcaatcaattacatcatcactattctatcagcaaagaaaataaatataaaaaaaaaattaaataattaaatataaaataaatataataaaaaaaataaaaaggttaacatttagaaaaccctaaacactcaaactttttatcttctttcttcctttgccgcctgaagactcaagccctctgctagcaattcgtgcagcagcttcccatcgacgacgacatgaatccaagcttggcagacgaagtactcttctccaccgtcggactctctcaggaccttgacccatagtctctctctcaagccactctcgaccgacgacaatgggccactcc

SEQ ID NO: 147006 - DNA, 507 bp, Cannabis sativa
tatcgtgtgagccattggctcacatatcagatattaaactgataagaacagatactacacttgatcttagccaaaaggccgagaaaggtatgatttgcaaagtcaaaggcctaaacctttataagtcattaatatgctgctattgaagctagtaatccatgtgggagtattgagactaaccatttaacagccataacatttttttttcattgtaatcttacagactatctatgagtcaacaaactacattcttaattttgccagtaatcagcatccttctcaaaacatatttcaagtaaaagtggcaatttccttaattttataacatcatatacatccatggtttatcagaatgatttgtttatttacaaattaattacctatatatatctactaataaatcttacattttaaatgaagaacatatatttctacttgatactctatggtttgaggtattacttatgacagtctcaccaactgcaactgcaactgcaagtggtgtat

SEQ ID NO: 147007 - DNA, 509 bp, Cannabis sativa
tatagtatgattaattctcatttttcaaattttgaattaaaaacattaaatgatagtaataattaagtttcacaagagcattaaacacaattttcataaatcataataatgaaaaaggaaattaaataaattacattaatccttagagagtttcaatatacttcattaaaaccctagaaaataatcttgttcatgctcatggctaaaacatcaataaaattaaaaataaccataaaaaataaagaaaaaagaagaaagaaaaactctaatctttccacggtgttctaagaggtctcctccaactttcaaccgtcaaaaactatgtttatatatatggatgcacttttaatgagtattatccatgaatgggtaatattaaaaatttttgagtttttatgattaatttttctatttaattagaaaattttttcatttttacattatatgaactgagactagttcatcagttgaaaaaaaaaaaaaaattgataaaaaagttgaatttgtct

SEQ ID NO: 147008 - DNA, 873 bp, Cannabis sativa
  modified_base (40)..(40): a, c, t, g, unknown or other
gatgttaataaacatacttgtaagtagatctaagatcctngtaaaataatttccaacaagtagaaccctatttcagtattggttagtgatttcatttcaaaactggagacttcgatactctacacctaacttgataacagactcttcacctaactagtgtacatcgataccgctaagtagaaccctatttcagtatcggttagtgattttgttatgaaattggtgacaccgatacactacaccaaacattattacagactgttcacctaacgagtgtacaacggtaccactaagtaagaccctagttggtataggttagtgggtgtctttgatacactacacctaacttgattacagactttgtgtcaggggacacctaaacaccaatagtgatagtgtcactactacgggtctacatcggcaccactaagtagaactctatttcaatatcggttagtgattttgttaggaaactggtgactttaatacccaacacctaacttgattacatactttatgtcacgaaagcccgaaacatcaacagtgattgtgtcactactgcgagtttacatcgacaccacgaagtagaacgctatttcggtatcgattagttatgtcgttacaaaactagtgactctgatacactacaactaacttgattaaatattttgtgtcgcgggactcctaaacatctacagtgatagtgtcactactgcaagtctacatcggcaccactaagtagaaccctatttcagtgtcggttagtgactttgttaccaaattggtgactccgatacactacacctaactttataacagactgttcacctaacgagtgtacatcggtaccactaagtagaaccctagttcggt

SEQ ID NO: 147009 - DNA, 916 bp, Cannabis sativa
tcccctaaaattgtgggatttgattatgttccacgtaaaataaatgcggttattatttgaaaatcatacaactgtgatttatctacttttaccgagtcaatgctaacgtggatttgattacactgcaaagtgtatctcgctggtcacctcgctaggatagcaacaataatccttacagcgagctggagcttttgaggttgataatgtaaatactgtcgttttggctatttaagacataacacttcatctgacaatcctagttcttggtgacaaggtgaacttcagcagtcaacatcatttgaatgtcagcttctgtctgagagaactgactcgacggagcagtggatctcattgaaagatgtctgaagctgagaaggtaccacgagcataccttcaaatagagagatggatgccttgctattcgttgctcagattcattcaactatatgcttagtctgtataatgtatattatacgctaagtgttgcaacagtcaccatgtctcgtctacatctcttcatacgtagcgaggttggtgcctcactttgtatttctaatgtcgtccttgtgtcttcatatacaaaatggtttctcgtcaatatgtgaattaatactatgtacattcgtgtctcgcttaagacttttcagtcaacgagttatatatatactctatcagctccgcatttaatgagttattgtattttaatatcttgtaatataattgctaatatattcgttgatttatattctcccaagttgacacatgtcctcctctaaagtgtcagccaaatttcgagtataacaatcctcaaggcttaataaaataaatttaatgcaaaatagacagaaaagggtaaaaaaaatcccataagtttactttgtttaacgttgttagcttgactgcatgttgtgctcat

SEQ ID NO: 147010 - DNA, 650 bp, Cannabis sativa
tcaagcattgcgagattaaaatcacaatgtcgaaaatcacgaagttgtacgaactgttacagagaaaactacaaagtttcgagcctagattttctatgtatcttctacaacaagacaagaacaaatgtattttctacaatggaaacccagaaattcaaaatacacagttaaaagcgaaaaagattgaaaacttactcactgtttgaagcctaaatgtagtctagatgaagctgctctgatgtctctgatagaaatctcacgacagacttgaagaaaatttcttgtttgctctgggtttgcttcgtggagaaaatggtgaaagtaatttctaaagaagttccagccttattaataggcaaactggtgaaaaggggtaaacatttcaaaaatccccagatgcttcgatttccccccaaaaataaatattgggaaataaaaagcaatcaagtgcctcaaataaccgtcaaagcgtgcaaaggaaaccgtgtttcgaggcattaattgagttagagcattaattagcgaaaaactgaagagacgcctggttagattcacatcaaatcacgaacagacgcacccaacacgtgtcacccattcaaatgtaaaggcagctcggatgaagtctccacgtaacttcggaagtcccgtac

SEQ ID NO: 147011 - DNA, 512 bp, Cannabis sativa
atcatgagccattaaattatcacataaaaatcttaccatgcccgtcaagcgattaatctctcctggaagtgatcgtatattctcttattcttcagttagttgggatgagttttggcaataaggagggtattggtgactccaaccctgaagtgattgatcccagtgtcagtcgtaatcaaaatttcccatatcattcaatagatttattacatcatgggctctccttaacaaaggctctccagttacctttgtccataatcaacccagcttcttgtttcatcatcaagtctgttataaaagaaccaagtaaagcacccacttgagaaattggaataacatctctctttgagctctttaaatctccctcaagcagaatagaatgactcaatatgttgttggacaaaatccacaagttatagcatctagatttaccttgcaggttaaacacatcagtaaaatattaataaaattaaataaaaagaaataagattagaataaaattcaactatatt

SEQ ID NO: 147012 - DNA, 657 bp, Cannabis sativa
gagcaaaacggaaccagagtttaggtagtttagccgccaaaaattcagttttggtggttaagtgttacaaaccgtaaagtttaggtggtttagccgccaatatccctaattgaaatatcaaatcatgattttgtcaataacaataacaattaacaaaataatgataattattaatttttagagtagaaaaactataacaaaaatttctctcacttttctttttatatttttttctagaatttttatcggaataatgagcataatgacataatcttccattctatatgcaatgtgagattattttgtatctttaattcattttttgttataatatttatttgagtaatgcaagttcattttccacttttatttttattttcttcatccatctatactattatacatgttattatatactaaatatgtatatagacttattcatgctatttttatatatttttatttagtgattatagtagggaaatttgattttttatgcttatatttggttaaaatttttttcctaaataaataataactaatatttgtaggatgaaaaattttatttaccccctaaaaatttctaagtacaccccatcttaataatttttattttgtataaaatttatatctttaattgtactaagtatttttaac

SEQ ID NO: 147013 - DNA, 605 bp, Cannabis sativa
agggttagagagggaaagagagtttggccaagagagaaagaaagagcagaatttctaattcattttgtcaaaaattcaatttcccaactcataactcataaaggctaaattactaaaatgcccttagggccaatttccatgtatccacacaaacaagggcataattgtcatatcacactgataaatttttcaaataaaattctgattatcaaatatcaagtaacatgccaatatttaatcccaaattgcatttcgggcgcgaaccccgttcggcccaaaatacctagttgtgactataccgcgccaacctgtcaaaacgcacctgaaaagacaacacatacatactatataataatatagttctaataaacacgttattaaattaatttaatcattttacccttctcgggtcataattactaaaatgcctctggctcaccaacggggcttaccatataataaatcatattaattcacatatatggaactatataataatataattcctcaattattcataattatctaattagacctttgctaatccattcataattccagggtattataattaccccttccttatagaaatttcgtcccgaaat

SEQ ID NO: 147014 - DNA, 550 bp, Cannabis sativa
gttaaatattatcttttaaaaaaataaaaaataaagacttggatcaattagtgattgacacgtgacaatttacttaacacttaatagccatgtacctacgaaagtttcaaaattataacttaggtattattactgcaaaaaattaaactaagttatttatttacaattaagagttaaacttaggtatttataccgcaaattactttaaatattaaattatctcttttttttttttttataaagtgtgagacatcaagtttgtaaactatattttttaaatttttaataaaaaaatatggcctaaaagaaaaataattctaaagcaattttgcctcaatccaaaataataactaaataagaagcataacaataatatacatcacaacaactaaacgttaatccaaaatcaaacaaaagaaaaaactgtaaaaatgtaacaattcacccaaaattatcaaggaataattacataaggcacaattttttgtaaaaaaattacatttttacgtttacagattttttttttacatttttacggttttccataaaa

SEQ ID NO: 147015 - DNA, 565 bp, Cannabis sativa
gtccagcacttatcggactaggggcagtcagttcaatcaagcacctatctttaaagttccaaacacctgacagcgtgggagtggtgcgtggcgaccagatgctggctcacaattgctatcgcatacagttgcagcattgaaaggccggtgatcggctgacgacgatcttggcaggagaaaacaagaagaaagatgaagatcttgatccccgagttcaagatgaaagaaacatgctaaaaccaattgaaaaattggaggaggttattctcgacccaagaaatcccaccaaatgtgtgtacattgggaagaacctggacgatcaacttaaatagcaattaacaagctttttgaaggcaaactaggctcaatttgcctggagtcatggggatatgatagagatcgaccctaagattatcttccatcacttaaatgttgatccaagctacctggcgaagagacaaaaatgaaggcccttggattcgggaggcaagggtcactaaaataggaagttgacaagttgttagtcaacgattttatacgcgaggtattttatcccttgtggata

SEQ ID NO: 147016 - DNA, 1025 bp, Cannabis sativa
agatgattctactttcaagtggatattggcatattttctctttgtaaagaatcatcttgtcaaaactactatgaacaagatacatatgccatagatatattcactgtagttgtggtctttttgatgacttagttttagttacaagaaagagttcttagaatagtccaagtggtttttggtcacaaaatacaaaactcataatccatacattaacatacagttcggatctatttttagaaaatgaatattaacaacttgtgaaagtcatattgtatagtccaatgtattcttggaaactgaaatttaaatttctatttggaatctaaaatttaaagtcaaagacttatatttataccaaatattcaatgactaattattctttcttagaccaccataactaatctaactctaagtttaagttgtctctagtaagcatatataagtaggaaattttctaagatcgaggatatatatcatttcaggatagaacatctgaaatatagtcatctgcgccatttaatttcgtagaagaaaatagaataacatcataagcaaattatttataatccttctgtccaatgatatactttctaagtaatttcttaatgaaaaactaagaggaaaaataaaagataattttaattaaaataataatccaacaatgtcccgtttaggcaagagtcaaagttattcttattttataaactttttcattatttcatattgtaaacactagtctaagttgtcatctttggatgattcaactagatgttgctaatgtcgctgtaactgaagaagaaaagtttagagagtcggagtcatatgaggaggcataccaatattccaagcggcttgaagctatgaaagaagaaatatttgctctagagaagaatcagacttgggagctggtgccaaagccaaagatagtgaaacccatttcgtgcaaatgagtatacaaggtaaaaactcgtcctaatggtaaaattgagagatacaaggctcgattagttactcaaggattctct

SEQ ID NO: 147017 - DNA, 804 bp, Cannabis sativa
aagttcatgtttaggatgttaataacatacttgttagtgaatctagatcctggtaaaataattccaacatttacgtgattttcagttaaaattttgcatagtccacgagtcaatcttattagatttttgatacaactctcaggctttttttctctaatgatcttttttcgtctttttttcaatgtaacttgcctcgatttataattacatagaaaggcagttaattacatagttgactgatatcttacaacaattatcccctgaaatcgtggagtttgattacataccacgtaaaataaatgtggttaatatttaaaaatcgcacaactgtgattggtctgcttttttatcgggtcaaggtaaacgtgtattaaatatgttataaaccgtaacattatgggatatctcgttgggaacacgataacaatagccttggtagcgagctagaacttttcccatgtctttcagagattgatgatgtaagcctcgtcgttcatgcgcttgaagacataatactccatttgaaaattacagttcttggggacaaggtggaccttagcagtcaacatcatttgtatgtcaacttctatctgagagagctgactcgacggagcggtgaaccccattgagaggtgtctggagttgattaatgaaggtatcatgagcacgccttcctatagtaagatgggtgcctcgctaatagttgtttggatttacctgactattatacttagtttgtataaggtgtattatacactaagtgtcttaccagtcaccatgtctcgtcttctaatgcgtagcgag

SEQ ID NO: 147018 - DNA, 797 bp, Cannabis sativa
  modified_base (749)..(757): a, c, t, g, unknown or other
atggggctccaactcaaagactcgactccatacctccagcccgtgtatggtttctccggccagagtgttgcacctttagggcaaatttgcctacccctcattgttgggcaagctccgaagagcataactataatggcacaatttttaatattggacgttctatcatcatttaatgtcatgttaggccaactagctttatatgacttaaaggctgttacgtcaatattccactcatgccttaagtttccaacaaagaatggggtagggtgcttgagaggaaattagcaagttgctcaggaatgttacaaccttgctctaaccaaggctaaaaaggaagtatcctctagccagagtttggacaagggaaaaaacattgccaaataggaaaccgcccaagagggggatgaagatgtggatccccgacttggggatccaaacaccaatgttggtccagtggaagaactagaagaaatcgacatcgatccaaatattccgactagaaagcttaagattggaaaaggtttgttgctcgaagtaaaatcagcactgataaaatttctaagagcagacctagacatttttgcatggtcccatgaggatatggtcggaattgatccttctataatttcacatgttctgaatattgatccaaatttctgacctgttcaacaaaaacgaagagtgttggacaaggagtgggccctagcgctgaaagaagaggtagagaagctacgcaacaataatttcannnnnnnnnctttctacccagcttgggttgctaatcccgtactagtacc

SEQ ID NO: 147019 - DNA, 630 bp, Cannabis sativa
  modified_base (572)..(578): a, c, t, g, unknown or other
tatcatacattttattaattatgagaaacatattcttaatttttatgtacaaattatatatggtaaaaataaataataaacatacatgttttatttataaatttctatttaaattttaatacatattatatcaacatatcattacacacttggtcaaaaaacaatatatcttcacaaatattatcataaaaaatatattaaattaataattaataaacattatcaataataatataaacatagtatttatacataaggccacatttaattacaattttgtttttttttaaacacatttttcaataactaataaacataagtgttatttaaagtgtttattcaacataaataaataaataaacttaagtgttctatttttaaaattattatgatattttaacaaacaaattatatttattatcataataaacatgctagattaataataacattataaacattaataatattaatcaaatgtttaataaacatatattgtttataaaatataaataaaatttataaatgtgcttgtatattttttttaaaatttcatattaaattttagtaannnnnnnattttagtaatatatcaaaatataaatattaacttttatatttacatattta

SEQ ID NO: 147020 - DNA, 611 bp, Cannabis sativa
  modified_base (258)..(287): a, c, t, g, unknown or other
gattcgtcttcctcccacttgatccgcgcccaagttttggcaagtacgtcctccattgtcctgcatggatatatttgtcaattctttgtaaaggtcagattctacctgcaggcctttacggaaggcggtaatggttgttgtgaacgcagatttttgttaaccaaatttgagcctcacaatattgatttcacatagaaaaaattaaagctatcaaaataaagaatatgaacacaaaatttttacgtggttttgcagttnnnnnnnnnnnnnnnnnnnnnnnnnnnnnnattcagatttctgagtattttttaaggcctctttcatatgagtttttttgtcccttttttgatcttttttgtcactatttataattacatagtggacaatgaattacaaagttgaccgaaaggtgtttacaacaatcatccctaaaatagtgggatctgattacatatcatgtagtgtaaatgcagtttatgacttgaaaatcatacaactatgattttccccctttttatagggtcaaaaatatcgtgtattaaacacgtctttgattgttgtatctggagatgtctcgacagaaacttgattataatgatcccaatagcgag

SEQ ID NO: 147021 - DNA, 652 bp, Cannabis sativa
ggttttctagttatatgctcaggtggttgatttaacctcttttgctaagagtgtaaggtcgagatgtaagagacactagcaaagttaacgccacatgagagcgtgttttttgcatggggtaagtaggccatttagaagaagctgcattattgttgccgtgactggattaaaaagggtgataacattttagatttttgtgggtgtttgtttgacctagactgagactggtgctagtctttccaccgtgataagttgaacttctatgaatcatactttgttaatagttttaattgatattggtacaacataatcttatatttcgagaaggatgattggaagattgtaaaagttaaggatgtgttgctaagttgaacttctatgaatcatactttgttaatactttacacgcacgctgtcttcaaacaactcgctcgcccgtgtcaatgctgcaggcgcatagatgtgccgcacacgggaccctgcaaggctcctattccgcgcgcatcccagccatttgcagcctcctgacctccagcgtggagcctcctagggacagcacgggtgatttcacccaaaaacccgaatttcatgggattttttcccaaaattcgatttttccaattttcaaaccccaaatttaaaataaaatatt

SEQ ID NO: 147022 - DNA, 516 bp, Cannabis sativa
  modified_base (471)..(486): a, c, t, g, unknown or other
attataatcatgctgatttttttgactcaatagaattggaaatactatctttattcatttattgatcgaaaatgtatttgttacagtggtaacttacatcagggctatttgatttaatctaatcttttagctgatcatgaaatgaaacaaattgcagacataagaaactgtactttaaagtggtcttgccgacctgagtaccttgtttctgaaacctttgcgcgtagtttgcctagaaggccattcacttagaagcgaatgttcatttagtactttgaaatggtgtttccgacttgagtacttttgtttctgaaacctttgcgcgtagtccgcccagaaggccattcacttagaagtgaatgttcatttagtactttgaaatggtctagccgacatgagtacttttaagtggtaaacccgacctgagtactttattagtagtatttccttaaatgttctccatttcagtannnnnnnnnnnnnnnnagttgcattttttcgtcatacttatctaat

SEQ ID NO: 147023 - DNA, 510 bp, Cannabis sativa
ttattgtttggacaattacaacaccatttgttgtactccgccatgtcttccaacattcaataggcttcatcgattgatagttggtagaaattggtgataccatcgcctcttctacccattctcgtgtgcttggattcaacctatttaggaagatttctaattgacactctttagacaacccatgatatggaaacctcattagaaatgtcttgtatctccaccatgcttcatacaagggctccaagttatgttgaacaaaattcataaggacttgtccatgagacatgtcaagtacattgcaaaagaaaccaaaacatgacaaagaaatcgtaaaatagaactaaaaaaaataaaactaaataaatgaaaaataaataaaaaaaaactaaattgatagtaattaatttccacaaattaaatttcagtaaatcgatcctcgacaacggtgccaaaaacttgttgtgaaaaattgtatacgcaagtgcacgcaatcgtaacaagtaataaagt

SEQ ID NO: 147024 - DNA, 627 bp, Cannabis sativa
tccacgtgtcccctcttgactggtccacatattttgggcgaattttggagcaacaatgacagttttgaagtttcgataaatcttgttaccgactattttctattgatgcctattctatccagttttatgtcagttaaataggtgtcaattatagtgaccgacgacaatacaacacctgactattttaaacggtcaggaaatatcttttttaagtagtgtacaactgatctgaacaaagtcttacttttaaaagaattaggccatgtttgctattttttgggagtggagatttatagaattgctaagtaaatacattactgatcttctaaccaaatttcatatggaaggagccaaaaattatcctaaacccaactagctcaacctacaaattgagtcttatagatgaagaacccttagaagatgttatatttatagaagcacattgggtgccttccattacttgaatttaacgaggccaaattttgtattcatcatcaacaaattgagttattttactcacacaccaacaacaacacactgagagacttgcaagagactatttaggtatcttaaaactattttaacagatggactgaagctacaagcatcaaatactaggggtgttcg

SEQ ID NO: 147025 - DNA, 624 bp, Cannabis sativa
  modified_base (46)..(54): a, c, t, g, unknown or other
attgttttagaaattcatatttaagatgttaatcaacatacttgtnnnnnnnnntagattctggtaaaataattccaagagcaatttggttcacaaaattttactcctcatacacaaattatgctttgaaaattcttcttattttggtgaaaaaaagggtatgtgaccttgttcgcaatctataattttttagaagtatgaaaacaagccctaggaagacacccaagaaccactcaatgcataagttgaagtataacttggtgcgcttggttctgcttatcaagtttcaattttttcttgagcatctaactattttttgtagtaaatgagagttacaacttgtgacgggtcaaattcacactttgatatttcaccctttcaacaaggtgggatattagcaaaattgggaagtttcgagtctaccctattgttatctgcatttttgcaagcatgacacgtggaaattaatcaagaaaaagtcaaggaatcattaagactgcccaagtgccttgctccatgctccgaaaaggcgagagccctaatcttgtgaaaaagtttcagcaaagtaagtcttcccggatgcgggccacaagaaagatgttggaagttattttaccaggaact

SEQ ID NO: 147026 - DNA, 1220 bp, Cannabis sativa
ttagatttactttctcagttgaattctaaagttcctatcataatcataacatagtaggctatcacaagtgtcatccaaataaagatgggcttagaaatataaaattctcccactcaaaaaaggtaactgtgatactatgtccaagaactttattggtatcaatttctattactacagtaacatattaattggaacaaaatacaagatcaagaataagttctaataatttgctatattatatccatgtctaatcaaaatatgtgtgtcatagagatatcattgtgtattgagtatagtttagagttcaaaatgaactacatatgtcaatagcttcttccacatctaagtcttatagagatcttgtggagttatgaatataatctagagttcaatagatgtaaaagatcgttgaactggatatattacttcttaaattcttctacccctatcagatcaaaagatctttttattaaacaaaatcttaataatgtttaagaattaacaattatttataaacattgaattttaaattctaagtgtttatgtggtattatctctttacagagatgaatataccatcgattttgtatcaataataaagcacaaacgcatacaaaacatgataaacatataaatatattatggtattggcatataagttaaagaaatcatgaagctcaattcataaataaaattaataatgaaaatttcttaaagagaaaactttattaataatctcaaaattgtcataaagaattgtctgcaataatatgaaatagggaataaaatctcaaaccaataattgaaacaaaattgttcataaattgaaacaattaaatcaaaaataaaattagattttgagcttcatcttcacttggacaatctccacccttatgtccatccgtccgactcaactctctaggatagcaatccaagtttaagtagctggagctgaaataagaagaaaattaatatggttattagatccagaattaataacccaaggggataataattctctaaaacttatgagtttatagcaatgatagaaataccttgtttctttgcaaaaaattaggacactggggtttccagtggccctttttgttgcaatagaagcactttcctttttcctttgcatttggattagcatccatttttttattaactgttttaacagctttaagaggcttcttgctattcttccaattcttcttttt

SEQ ID NO: 147027 - DNA, 863 bp, Cannabis sativa
tcgaattattagctatacatcgaactagaccgctattgacagtgaaaaagatgttataaacttaccttatatcttttctaagtcaatgtcactcagttgaccttagatcaattgatctcaatcctaagatggttaagctttagcttaattgtattatatgggttcttagacttgttcgttaccagcttaaccaaaggactagcccatacttacatgctgggaattcggtagtgcaagtgagtgggagcgttaatcatagatataaaatctataattttataactatttagaagtgaagtgatagtttcttagagcttggcaaaatgatataaatggaagagctcttatttcagtaattataatagtttactgaaaatatcattaataaggagctaagtgttttaaggataaaatacatcgaatggtaaatggcaaatttatccatactcgatgtaaactgtctataaaggatcactaattatttagattaaaacattggataattcataccatatctatatttggtatatagagtgttctatgtaatcaagagtacaatttcgaatctatagtagagttaggagaaattaataagctaagaaatttgcttggtaaattttagatctacttattgggagattagttacatatgcacatggtccccacattgtctgggataatactgtcttgtaaactggattgatttaattaataagtcaattagaattcaaaaataaattttctcttgcgtgagaattttcaccaagtttgggccattttgagaataaaagagaaatagaggtttatttgttcattaagagactttgtgggtctaattaataaatatatttaaattacatttt

SEQ ID NO: 147028 - DNA, 772 bp, Cannabis sativa
agacctgtccaagcttcctccccgagactcctttgacttagcagcttttggggtagaggggtttgcagcagttagctcctcggaaagatcaatgacctcccagcaggcctcatttccttagaagaggacccctcaccgcctttagacttcttggccaaaggagaggcgctagagcttctgcccattctcttctttagagcgttaagcatctgccgagacatatctgtacagaatgaaaaacatcatggtcaggaaaaatagacatcagaaacataaggcataaatgtcaaaaagcacaaaaacaagacaaagtagtatgcaaggtgattgcccaaacaagactcaaaaattaatcatcaactgacatcgatctaattttggacataacagctttccctttaccgaaaacgggaggggacgaccgagcaggtgaaatgggctcccttatgcgaatggaatgttcaacaggtctgggcggcccgaaagttttttcttcctctttagtggagttacgtgctcttcctcagcttcatctacagttttcaagggcttgtgagcataatgcttggcccttgcaccttccttcaacttagcttcgcgcttaagttgaaggagttcattctctgaatgagctcgttcggcccgtccaacaccagatttcctcttcttccccttcacggacttaggaatgaagtccttgggatagagcccgtacttcaaaaaattatcctcagtggtcaactggataatattccagtcttcccccggtagt

SEQ ID NO: 147029 - DNA, 531 bp, Cannabis sativa
ttaaacccttatgtgtttatttcactattttagagaattcatatttaggatgttaattcagcatacatgttagtaaatctagatcctaaatattcccaatagtgttctgagcactttttctgtcataaaaaataacaaagacacaagtatgtcagggagaaaactagaattctaggtgcatgaaaattgagtctagtgcctaggttgacttggtgtcacgttcacaatcaacctggtgcactgttttgatcactcaaatgctaattcttctttgagcattctctcaaaaatggtcaaaaacggggtgggagacctcgtcccccattcaaagaaccttgaaagtgtcaaaacagcttcccgaaagctccagaaagagcacctagcgcccaagttgacaggtgacctagtgggttgggttttacttatccaattctgattctgtctcgagcatttgtcattttttctcatagtaactaagagctatgaagtcagacaagtcaaattcagaacttcatattttcacttttctaa

SEQ ID NO: 147030 - DNA, 545 bp, Cannabis sativa
aaaataatatttttcaaaaaaaaacctatattttcacacgaagtataaaatctataaaatttataatttccattttttttttaatatttaacataatttattcattattttggcttcattttaccagcccattacattttcttctcttcaattaagtggatattatattatatatatatcatttaaattttgagaaatttacgctgtacaacaaatttttgatattaatctcacgattactacttttttttttatatttcaatcataatagtttctcattttaattattttgaaatacgtgtatacacaccaaaattaaacagcacatcaatacaaataggtgtagttacgtttttcttttcttttcatttgtttttctgcacttcttttatttattaaatatgaaacacataaatgatttattttaatattataaaaactttctctattcttttttttatttcttaaaaaaaagtttaaaaagttttttttaatcacactaataattatttgagttaaaatattattatctaccattttaatga

SEQ ID NO: 147031 - DNA, 501 bp, Cannabis sativa
taaaaaacagttttaaaattttttgccaaacgactcctaatagtttttaaaaactgtttttagttttaaaaaacagaaaacagtttttaaactgtaaagccaaacatcctcctagttttcagccacgaaaatgcatccaaaaataccaattttcatgctatatcaacccacaatcataccaaactttcacctagcataaacacattaattagagaggaattacacctaattcactctccaacaataccaaaaaccagcaccaaatttcagccccaaaattaaacaaattcaacacaaattttcatataattcaaagtcatacaccactaactagaaagttctaaaatagggcattaaaatacataaaatatgcatcaaaatcaaaccatatactcctcaaagttcagatttaacaacatctaaactaagctccaaaccaagagcctaaatccataaaactccaacaataaagacttgctcatccaagtcaaaatctcaagc

SEQ ID NO: 147032 - DNA, 623 bp, Cannabis sativa
aaaaaaaaaaaactacatttagtgacaattttttagttacaatataaattttttataactaaatacttgtgactcaaacataacatttagatattacaacattgccactatagttttttgttgtgactaaaaatacatttagtcacaacatattctgatttttgtaactaatacttttaaccacagactttttagtcacaacgtaggaataataatttatgattatttaaaactttttacttttagtcgtcataagttttgtcgtgattaaaagtaagattttttgtaatgtcaataacctaatgaatatttatatgttataaataatataaaatagataagaagaaaagaagaatatataagatgaagagataaagagaaagtgaatgagaatttctcagttgtttattccaatggagtgaatccctatttatacgaaagtatttactaaagaaataggaaactaaattaatgtaataaagaaaattacaatgaagcattaatggtgataattaatatgttgatttggacatctataaatattatttcataacactaccccttggatgtccataaaaactttttcattaaaaaccttgctaaaaaacttggtcaaaagaaaa

SEQ ID NO: 147033 - DNA, 858 bp, Cannabis sativa
  modified_base (426)..(428): a, c, t, g, unknown or other
ttttctgcatacaacaagttattttgagtattatttttaactcaataaattatttaaaaattttaaaaataatattttactacaatgtatatatatagtgtcctaataagacaatatataatttaccgtctaaaacaaaaatgattctcatgcaactttatcagagcacacatattgttggtccattatgactgacacacactttcactacaaaaaaaatagtatttttagtgacaacataaatattttgtgattaaatgtgacttttaatcacatcaaaaaattatttgtgactaaaatataatttttagatataagttgtcactaatttatttttagtcacaacaagtatatattgtaactaaatatatatttagtcacaacaaattgtaatttcacgacataaaaataatgatttataattannnacaattttttttacttttaatcacaattttttttaaaaaaaataaaagtaaaattttttgtaatatttccttgttcatcacatatttatgctataatcatccataaaatatttcatctcatactaattttttcatgtctctatatgtatattaaaagtgcagtgcccattcaaaaaaaggaaaaaaaaaatgaaagcactatagttcaacacacatgcatgctatacctaattaataatcttttaatatttaaccaataatacattttctttggagaaataatgtttcaagtatggtgtattgccaaactttgattggctaatatatttttcttgagtcatttaaaatgtttatataatattatattaaactttaatttatactaaaatattatatatttaggtgtcataagagttaataccacatatag

SEQ ID NO: 147034 - DNA, 923 bp, Cannabis sativa
  modified_base (881)..(884): a, c, t, g, unknown or other
aaacacaatcacacagatatcgaggaaatccttgaataccctattaatcatatccatgaaatcggcgggagcattggttagtccaaacgacataactagaaatacataatgtccatacctagtgcggaacgctgtctttggaatgtcctgctctcggattctcaactgatgatagcccgatcggagatcaatctttgaaaagattgtcttcccctgaagttgatcaaaaagatcatcgatcctaggtaaaggatatttattctagatagttagcttattcaattcctggtagtcaatgcacattcgcagatacccatctttctacttgacaaacagtaccagagctacccagggtgacacactaggccaagaaaaccctatgtcaagcaacccttgatgttgaattttcaattctttaagttcagctagagccattctataaggggccttagaaaccggttctgctccaggtgccaaattaataacaaaatcaatttctctctgaggtgataaaccctgaagttcatcaagaaaaacatctaaaaattctcgaaccaccttgatgtcttctggccgaacagagtcaggttgagtggtatctaataccaccgccagaaaccctagacatccatcacataacaattccttagctgttagtaccgaaattactaggatccgagatccctgaacagatccgataaaaacaaacagttcctcgccttctggttggaagattaccatctccctcttacaatcaatattggctgaatacttggacaagaaatccactcccaatataatatcaaaatctgctagactcatttctagtaagtcagcactcaactccctatcctcgattctgatcggcatagacctaatcnnnnttttggagataactaactctccgccagataatagggttc

SEQ ID NO: 147035 - DNA, 722 bp, Cannabis sativa
tattaattgttgtttatgttgctattggctcctcagacattccaacataacaatttatccatttgaaagagagggttcccccctcctcctgtcttgatcccttcatctagcatattctcccctgtttcaattgtcatctcctccaatcgagagcctggaaagatttactcacaactgtgtactcacagctatgtcagcaactattttttctttaccttcaattttcctagcttttgtcaccttcgtaaagccctcttcatcaatttgaacttgtttcctattatcttgtttaatgacccattgttgtttctctgatgggtttttcttacaatctacagtaatatgacctaaacttgaacaatgtgcacagacaactggtttccattcatattttaccccattaattatattcgtgccaaattcattctcaaaatctagcatctctagaaaattttcatacatcaggacctcaactaaaactctaggataattcaatccctccctctccttggtgacagaatccaccataattggcttccctagctgaccaacggtcttaaataatgatctttggcactagtacttcaggtctagatcctccaatttaatctaaataagcacacacttcacatcttatttttgaaatttacatttgtgtcctagggcttcattataacaggcctcctgttgaagaaaatgtaacccccattcaatatctggtc

SEQ ID NO: 147036 - DNA, 843 bp, Cannabis sativa
agctaatgattgagaagccatgtagatagtctctaaatcttctgtcaggactgagaaagcaataaacttgggggctttttcggttttgccagcgaactttccctttttcccattgccttgtctgttgttgttgttggaccatttaccgcccgagattaaattgctcgggtacggaaggagctggacggatgttccagcagagggagcttttgggtggccaagtttaagctcaacttctgctcgctgaatggccccttcaagcttgatgaagccatctgcacgatcaaggaagtcactcatacaatctactggtccgtctctcttgatatccttccaaagttctctgagaacttcgatgcccctgagtatcccatttaatttcccttcttcggtcaaccgtgcaaccttcgttgcctttgtcataaatctgctgatgtaagctcggagaggttctcctggcctttgcttcacttcgaccaggtcttctaaatgcaacaggagctagaaagaagaagagaattgtgcatggaattctatggagaaagccttctaagagttgaacctattgggtgtcaacttgaaataccattgctgagcggcttctgagagtgtggcaggaaaaactctgcaacataaatctcctcgcactccttgtaggtccatttgcatttcaaaatacttaagatgtgtaagggatcttccttcctagtatacatcttccaggtcggcaacttgaacttgtgagaaaactctaggacattgatctttggggagaaaggggatccacgtgctcggtccaacttgacgtcattgttcttctgaccggccaggccttggaacata

SEQ ID NO: 147037 - DNA, 669 bp, Cannabis sativa
gattagataaatgtcaattatttggcattttatcatattagaaatttattttattaaaatttaaattttgttaaagtaacatgaaatttttgaatagttggttatattgtttgaattgacattttaggattttctaatcctaaaattttcaaaaagaatgatgttttttttttttgaataaaatgataatattctaatcatcaatatcttattttcaaatttttaaattaagatattgtagtatattatcttattaattatttaaataaaccagatgttttaaaaactagttggatattggaatttgaattttgaattaagatattttaggaatttattagatttaatattataaatattttctaaccacctaatttaaattcaaattaagatatttttaaatatattattttaaatagaaatatgttcaccaattttccaaagcttgttacttgtttatttatatttaattgttttaaattaattttttttttacaaacttatcatttatttgaattaagttgctatgattaacttattgatatatctaatgatctaaattaatcatagtccaattgaaaatggatcaaataaataatttgtaacaggtaattttgtaatttctttcatctgtgataaacgtagtagcatgatagggcccatccaaat

SEQ ID NO: 147038 - DNA, 588 bp, Cannabis sativa
cccaacatttgattcacgatcagatctcaatctccactcacttcgagatccttcccctcgagttttattgggtttttgaaaactcttaggtcgattgatcatagctttcaagttgttctacaacttatagcatataggtcgaatatgacccctcttgttacagaagtgacacactgggatgaatctctccatccgagatatattcttcgaggaaatccttcttccttctaacttcacattggtaggtccagatggaacatggaattttccagtggggtctgaggactcacgtgtctagggaagtgatgatttcttatcagcctttttgtccaggttgatcactggtgtagtggactcttctacccctaaattatctccttgcttatacagcatcttgtattcaatagaggttcgatcaccataaggtttttgaagttgaagagtttgattgatggcagccgttcttggagggataaactctaaagcctgtttagctcttttcagttcagctgaaagcttgtagatctcattgtccttctcatcaagaaaataaacacatataaagtttagaaaaccttacagtgggtg

SEQ ID NO: 147039 - DNA, 621 bp, Cannabis sativa
  modified_base (248)..(257): a, c, t, g, unknown or other
tttttttttttacatttttatggtattttataaaaagtaatacgaaagtaacaagaaaattacataaaagtaacaggaaaataacatgcaaacaacaataaaaaaaataacatacaaataacaaaaaattaataacaacaagagtgcaacataaaatatacatcaaaagaccgtattttctgtaaataaaattataaaaaaatcataaaatatttaaattttttacaactgtatttttgtaatttttnnnnnnnnnnttgtgtatttgtaaaataattcttttttaataatattttacacatcaccataaaaaatttaattagaaatgtaaatatttattaataaatacatatgtgttattattattattattattataggaatttttaatgtatcttacttaatcattttttttttacaaacgtgtcatcatggcaattctaatttgtagtattctgttgtgtcgtattcaaatttatattttttttatgtcagatcgtcctcgtgcctcggattgatggcgtgtcaatcaaccccattcaaatcctaaaacggtagatactcaccctttctccatgatacaaacgtcgtcaaatattaataatatgatatgtatttttt

SEQ ID NO: 147040 - DNA, 558 bp, Cannabis sativa
tgaaggagaaagccattatgatcatggacaaccagcgaaaaaccaaaacgattctgaccttcaaacaaagctgcatctatgtttatcttgatactattgtattgaggtttgacccaatgctcattcccatcatggtgctgtaaaccagtccatgaagactcgattggagttttttgagcataacgccattgatcaagaaagctaacagcagaattcacaatagttgaaggattaactcgctttttttgccaaattagttcattccgtgctccccaaatggaccagcagacagtcgcaattaaacactttgttgcagctgatgtatttttaaaaacaaccacgcaccagtccaagaagctccctccagccgcctgagatgtaccaatgccaactctatcccaaatttgtttcaactcactacacagaattagactatggcaaatggattcactttccacattacacagtgggcaagaagtgttgacagccacctttttaatggccaactgtaccaaagtaggcaagcaatttgaacaagcacgccacatcaaattcttt

SEQ ID NO: 147041 - DNA, 641 bp, Cannabis sativa
tatagccaaaaatactactaaatcataaactgttaataacatacacattaaaattaaaaaatacactagaatgaaataaaaagatatgttaatgtcatgtcatttaaagaaaaagtaaaaaaaataaataaaaagaaaaataatataaatgaggtagatggatgtgtagataataaaaaaaagttagcttatacatacaaaatgaaaagaagaaaaaagaaaaaagatgagcagcgtacctaagtatatacctgccaaaaagatgagcagcgtacctaagtatatagcagtaatgttaaatctaatatttttcgaaaataatgaaaaataacactatgtatttttgaaaaaaaaaaacaacatatccataaaaaaatgtataacttttgccatttttgtatatttatgaaataattctttcatgtgcacaatattacactgagtttaatttttaatatttttttaatataaccaacttaaagacaattagtagcataaacagatgtaaaaaaaagtaactaattttatcataacatccttacattgtgttattattaagttttatattgataaaaaatctatttaattttatttatttaattaatcatttaaatttaaatctattaattaaatcatattta

SEQ ID NO: 147042 - DNA, 892 bp, Cannabis sativa
tttaatgggtcggcccatagtatttttgtaattttttttatccttttttgtatttttttgttttttccctaaaatttaattatacatattaggtcggttgggtgttgggtaaaattaagggttttttattaggaatttttacaaaaataacttaccaaatctgaattacaaaaatgtcttgtcacgtcattaaaaaatatcttaattctaaaataatatgcctaaaatgaaattaatcccgaaattctcttctttttttttttaaaaaaattttcttgtgtttcgaaagtaaccttgtggttacttatgatgttgataagaaaccaataagtaattttttcataaaaaaatatcacttttatattatgtaatgtgagatacattttggttacctctaaagcttacgtgtatacactttaataatcaattaattatttaggttatattaataaatcaagagtaaccttcaaatttatttttaaaaataatgagttagcatccagtaagctgccattttagtaaaatgtattttaagaaaatatatatcatgaatgtttaactcgctcatatattttaaatacaaattaatatatgcaatttgaatagttaaataaagaatcaagttacaaataacttttaaattattacaaataagacacattttttagacaaattagttatgatttcgaaaagataccaattggttatttttcataaaataattaattttaaaataaaaagataaggatcagaccaaatatcctataaccagttttgcatgtactcctatatgccaaataaacttattagtttattttggcatattgtttattattgcatattgaaataaatttttattctttgtttgcattttttgtatagcctaccatca

SEQ ID NO: 147043 - DNA, 606 bp, Cannabis sativa
gattgatgaattatttgatcaacttggtggttcaaagttcttttcaaagattgatttgaggtcaggctaccatcaattgaggattagggaagaagatatctctaagactactttcaagacacggtatggacactttgagtttttggtaatgccatttgggttaacaaatgcacctattggatttatggatcttatgaatagagtctttagacctttcttcgataagtttgtggtggtattcattgatgatatcttagtgtattctaagacatgtgaggatcatgttgaacacttgacaatagtattacagacgttgagagatcatcaattatacgctaagaaagagaagtgtgaattttggatgactgaagtcaaattcctgggccatgtaatttctcaagatggtatcactgttgatcctactaagatagactctattctacagtgggaaagaccaatgagtgtcactgaagttcaaagttttcttgggttagcaggctactattgtcgttttgtagataatttctctcgaattgctatgcctttgacaaagttaacaagaaaagaagtaaagtttatgtgggatgatagttgtgaagaagcttt

SEQ ID NO: 147044 - DNA, 529 bp, Cannabis sativa
aaattcaaagcttcaactatgagctaaattcacatgttcatccatgaagaagctatatcaagatatcactaaagtaaatccaaacttcagcatgcttttctaattatttcattcaaattaacaattagaatttccaaattttacaatccaaagcatacataacacaccgtctactaatcacaacatcaccataattacaacatcaagaacaacccacaactcattaacatgcaaatcaatcttcctccaaaattgaaaatcatcaaaacaacatcaatttcagctactaacaattagaagtcaaagacaaagaaactacctcaagcctcaagcaagaatcaagcacaagcacaagcataccaaaatccaagcttaccctcaagcaatttctcaccatatcacaaagtttaaaatagggttggagggagagggaagggtcgggttggagggctagaaaccaaaaaatggtttttccatttaattaaaaatcatccttttgttgtagataaatcaagggtcaaaatgacca

SEQ ID NO: 147045 - DNA, 696 bp, Cannabis sativa
ccccaaaaagatcaacatcatgcacgcacatcacatattatattcgagtatctttttagttgtgtgccttgccggagtgaacttcagcttacgttgtttccccaaaacacaagcttcacaaaatggtaaggcaaaagaatttaaatttccaatgataccttatttgtgcagttctttgaggccctgttcactgatatgcccatgtctgtgatgccacaacttcatatctgattctagtccttggagaacatataaaccattgatcttttcacctttcatcactaccagaaaacctttggtgatcctcaagctcacgtgcatggatttgtatccgtatccttcgtcctcaagcgcacccagggatatgaggtttcgtctaaggtttgggatgtgccttacgttcgtcaacaccttaattttgccatcatactatttgatggccaccttcctggttctaatgaccctacaagaatgatcattttccattagaactttatctttatcaactgacttataatcaaaaaatgactctcaacttggacacatgtgataagtgcatttggagttgagaatccactccctattcattcaagactccgagatagagaataacaatattttgtatcattcatagatgattactcaagatatgcatacctatttctacttcatgaaaagttctaagtcatggacgtg

SEQ ID NO: 147046 - DNA, 898 bp, Cannabis sativa
  modified_base (102)..(105): a, c, t, g, unknown or other
aataataataataataaactaaataatatgcttcaatatatttacccaaattatcattgttaatgtacctataataatattcacaaataattaaatattaannnntctccaataatttaattatttatctaacattatacacaccctcaaaatagaaaaataaacgaaataaaagaaattttattgtcactaaaaaaatctcatactccactaaactcataaatatttaaataataaattatccctattggcaaataaaataaactaagtatgaagaaagtttaaaaattatctttcaagaaaggcggatattacagttcacatgttactttcatgatttgatgtttaatatacaaattatgttaaattctgaatatattgttattcatgattatagtattgtctacatagtagaaataatcatgattatatgcttcaaattatttagtcccacaatttatcaatgcattagatttacactgataatcaacaatgtggtttacttacacttggataagtagaatgttctttccaaaacattagcaaagtaaacttgtattgaatgtatcggctatacatcgaattggaccaatattaacaatgaaaaagtggacacaaaaaattagccaactcgctcgtatgtatagacgagatgaaagttagaaataactaagtaaaatagagagcacacacaagaatatatagtagttcgctctatgtaactctggtccaaacctgaacccgaccccgacagtaaactccgaacctcgagccccgagcttagacctggagctcggccccaactctgatatggatcctaacttcgactttaccacaatataacctaagttcatacatattactacacaagcttatatttattatgtcttctattaat

SEQ ID NO: 147047 - DNA, 543 bp, Cannabis sativa
  modified_base (179)..(180): a, c, t, g, unknown or other
agacacatcttgccgatctcaaaaggaagagtggttccagctctccattgggatcactacaatcaagtttctgttgagacatctctaaaatcaataattaaagacgtgtttaatacacgatatttttgaccatatataagtgggaaaatcatagttgtatgactttcaaaatcatgcanngcgattacattttgtaatatgtaatcagatcccatgatttaagggataataactgtaattacattttggccagccttgtaattaactgctactatacaattataaatagttgtagacaatctcaaaaaggagaggagaaaactcttatacaagaggccctaaaaaaatacactcagaaatctaaataagattgactcgtggactatgcaaaatttgaactgcaaaaccacgtaaaaaaacccagtgttcttattttgttattctataacttttattatctgcgttgaatcataatcgtgaggctcaaatttggttaacaaaatctgcgttaacaaaaaataataataaagaagttacgagaaa

SEQ ID NO: 147048 - DNA, 712 bp, Cannabis sativa
attgtaagaggaagatggtaatcttccaaccagaaggcgaagaaccgtttctttttgtcggattggttcagggatctcggatcccgataattttagtattaacagcttgggaattgttacaagaggagtgtctagggtttccggccgtggtattggataccactcggcctgactctgttcggccagaggacatcaaggtggttagggaatttctagatatttttcctgatgaaattatgggtttaccaccgcagagagaaatcgatttcgtcattaatttggcacctagagcagaaccagtttctaaggcccttacaaaatggctccagcagaacttaaagaactgaaaattcaactctaggggttgcttgacatagggttttcacgccctagtgtgtcaccttaggaggctccagtactgtttgttaaaagaaagatggatctttgcaaatgtgaattgactaccgggaattgaataagttaacaatcaagaataagtatcctttacttaggatcgacgatctcttcgatcaacttcagggagagacgttcttttcaaagattaatctcccatcgggctatcatcagttgagaatctgagagggggacattccaaagacagctttccgcactagatatggacattatgaatttctggttatgtcttttggactgaccaatgttcccacagctttcatggacctgatgaata

SEQ ID NO: 147049 - DNA, 813 bp, Cannabis sativa
gcaccttagtggagtttcttaatcatttctttgatttctcaaatttttatatttaaatattttttaatcaatttttttaatataaataaatattaaccatttaatgatttaagtgatgtcctttcaattatttagcaatgacttttcgttattatgtttttcttatatcacacttaataacttaaggaatgcactaaaccggttgacgtgacaacttaattgtaattgtttactaatctagcttctcctaatttttgtgattttttaaaaaatttattctgtaattgtattttaatttttattagtattatttaaacctattaattagttttaattggcgtaaattgttaccgtatattactcttacccttacattttaactcaaagagactctcaaaactaccatcgctgcttaagcttcttctctctctctctaccctatgaattgcaccttcggacgcccctctttctcctcttattttctcctttataatcttggtataagtgaagggagttttggaagttctatgccattgtgtgagtatttcatcaatggattcatattaattcagtttcaaaccagttatggtatgttttatgaacaatctgtatttaatttgttttcaattttcttttcattccttttcgtaatggatttgttgtgaaagtagtttctttaccttacaagtaattatggtttccctcttcttcatcctccgttggaatctatcaactcgatatttgatcatattcccaaatttttagttttaattttcagtaaccaaggttttatggtggggtaattatactttc

SEQ ID NO: 147050 - DNA, 538 bp, Cannabis sativa
  modified_base (68)..(72): a, c, t, g, unknown or other
taaaaaggttattagattattaccttattaattttttttagtttccatcaatgggtattacccattannnnntgttccatatatatatatatagatgcaatggttaatatatatacggattaaattttcttttacctctaatcacacgtgactaataggtaaatattctttttataaaattaaattaattatgattaattatgtacttaaaaaataataaataattaatatatttaatagacttttttcagtaattaatgtttataaataattttatttttacatttaaatccctattataatttttttaatattcaaactattgattagatgtgttcacagattaatttgatctgaattttcatattttttgaaccaaaccagtataacggttttttaaatattaaaaaccaaatcagactaataaattttttaaaccaaaccattgagaacagtttggtttcgttcgaaaccacggtttaagtaaaattcataattattcatattttttaagtaattgtactatttttaccaagtt

SEQ ID NO: 147051 - DNA, 550 bp, Cannabis sativa
atgattagaatatacattgtttttttagtatatgagtgaggacatggatgagaacaaaataaaagtggatgacaaaaatgtagtgtttagtgtgtatggttggtagttattaatgatgtactaaatattattaggaacaaaagttcaatctcaaactttcctctattatgcataattgaatcactgattttcatacaaaaaaaatgagatttttacctaatgaattttacaaccaaatgaatcaaactatttatctttaaacaaaaaaaatacttaaaagtaagatcttccacaatacaaaatcaacttatgcaaaatttaataaattgttaaacatgtcttctatttttattaggaatttctttacctaatgaattttactaccaaatgaatccaactatttatctaaaaaaattattcaaaaaacatcatctacaatgcaaaatcatcttatgcaaaatttaattaattgttaaacatgtcttctatttttacctaataaattttactaccaaatgaattcaactatttatgccctaaataaaactct

SEQ ID NO: 147052 - DNA, 628 bp, Cannabis sativa
ggggttagatccttgagcggagccccatcttttcataggcagtcttgaataagatatttgaagaggctccattatctatcatggttctagccaccatcttgtttgttacttggacctctacgaccaacgggtcgttgtgcgaaaacctgatttttacagcatcttcgtcgttgaatgttatggtgggccctcttgcccgtgggattttaggtttcctttcttctacggccaggatcacttcttcttgttcgtgttgtgctgttcgggcatacctctctcgagctttgcccgaatctctaactatgtgcgggcctccaacgatgacttacagatgcccatctactggtggaggtagcaagtcttggttattatcacccctttgattctgatcgaccttgacatacttctgcacatgcgggttattttttcttattaggaattcaatttcctacttcagattgttgaattcattagtgtcgtggtcgtagtctccatgaaatcgaaaaaaattggtcaagtctctcttgctgacatcttttttcatgggtgcaggcttcttgtacggggctagtgatagagtggccatgtaaacactttttatatcctcagtcaagatggtaaatgcagt

SEQ ID NO: 147053 - DNA, 508 bp, Cannabis sativa
ttgaaacgaggcataacaatggcagtgacagcaaaaaacaagttttccttcatttatggtacccttccttgacttgcaattaataatatccttttctcaattcttggatttgttgtaacaacatggttatgtcttggctcatcaactctgtctcttctgaaatagcacagagtatcatgtattttcacctggccacagatatttcaagaaagatttaacaagggtaatggacctcgaatctttcagctacaaactcaactcacacatttgtagcaaggtgatcaattcgtcacctcttacttcacaaaactcaaatcaattcgggatgaattaaaggaatttctacccaacaccacttgcacccgtggtgcaatgaaattgttccttgattagtataatcaaaaccaagtcttgcagttcttaactggcccgaatgagtcgtatacttcagtaaagcctcagatccttctcaatgaacctattgttggaagttattttaccaggatct

SEQ ID NO: 147054 - DNA, 721 bp, Cannabis sativa
aaataacatacatataaaaaaaatcaacaacaaattaacatgaatacaacataaaaagaccgtcttttttgtagataaaattaaaaaattcgtaaaaatatttaaaattccgtaaaaccgtatttttgtaatttttttttgttgtttttgtgtatttgtgaaattatcccttatttattactatgagtaacctccacaaggttcaccaatattaagtgtgtaaaaagatgttacacatcttaatttaaaatttttaaagttataagagttatggtgtgtgcatgagttacatctatttactgagtccataacatctatgtgaggttatgagtttgaattttaaatggtgatatcaaaaacactaaaaagagatctttggtgctcatttggtatgacttattttctatcaaaaaaatactttgctagaaaatcctaagacttgataatttccaaaattatttcctagagagttcccttagtgcttagagatagggagaaataagcttttggacaaaagtgataatactttgttcatgtcatggtgattcctactaatctaaactcaatattgagagtgagtatatatatatatatttttctctcaattatatatatatatattttatattacatgtgttgtaatctttcttatacctttcttatatgtatacacaatatatagtgtatatatgtattgtaacatatatttaatcaatctctt

SEQ ID NO: 147055 - DNA, 869 bp, Cannabis sativa
ctatcagtgcaagaaggacattgatgatgtctcgggggcaacccacttgtcctagggtgagtcccaagatctctctcgttatcacgagggatttcttgttccctagtctagggttgccttcttctcgcatttttgcgagaagactctggtaaatcacgatttccattcccctgggttgtgaatcctgggggtctccgtggcacttcttgatgaagtgcctggtcatctagtggttcatcttcagaaacttctctagtttcccaagttgttcttcttgagtgttctgagggtattcctaagctgtttcctacctcctgattcgtgagccctgaggtctgcctcgcagtttcctcactccagggtcaggttggttttgtgtgttgttttcctatgccgccctggctgcggctgcctcccgttccaactcagaatttcgttgggttgcctcctccagaagtcaccggagacgattttccaactcgaccaacggtacgtatcttgtggggtcataggcaccctcactcacaggcatagaactaccagcatttgcgttgggttccttattcccagtttctaggtttcggacaccatcacgttggcctcttcttgaacttgttgaccttgttgacggtgctgttcgtgaatcaggtggcctccgtgagcccatcggctcttttccaggacagcgagtagtctcttcaggatgagtgttatcgttttcaacattatcagccatggagattaaattccttctttgcttaggagggatttttctgaggttttatcatgtaggctctcaatgaaagcaccaaactattaacgcagattttcgttaacgataatgagcctatttgttgggttttatgccc

SEQ ID NO: 147056 - DNA, 946 bp, Cannabis sativa
  modified_base (52)..(55): a, c, t, g, unknown or other
gggtcacattttatagttgttttcttctttattattatttttggaatagaannnngcttgttttctttggtttcaggttttgacacttttaatgaataaattggataaattttgaaaaatagtgatctataaaatagagaaaattttggaagaaaataaagctgaaacttcaatcctaaatttgactatgttctgatcatattttaggaaaaaatcaaaacataaaagttttaggtccctttttaatcttttcaacgcatcttgaatcagctaatttggagtttgtatgagaaagttatgaccattttactaagagaggtcgaagcagaaaaaaaatgggcccagtggccgcggcgaggcttttggccgacgcggcgggggactacagaaaacccattttttcccttttctatagccgccgcagcaaggatattggccactgcagcacctacttcatacatgtcaaggataacttcgtcttttctcatttttgggctgaaaaactctatttaatgaatggaggtcgtgaattatagaggggagaccatacagaaccctagaaacacaagaagaaggctcttggagtgagcatgggcgatctgcgacaattctccatctagtttctttctcttctcttgatttcttatctttttatttgtgtttagttttatttaattattgatttgattatgagctaaattctctatttagggatttgatggatttcgactgagattattctatagattaatgctatttgattgttctttctttctctattatggtgatgtattcatatttgtgcttattacatgtttgattttctaccttatgcatgatttatgatctcaatacaaaatctgaaaagtgagtactaagaatgctctaaatgaatagacatgggttttgatgtgaaacgagagtattcacatagcttatgtgactt

SEQ ID NO: 147057 - DNA, 648 bp, Cannabis sativa
tgagcaggaaaaggtccaacaatagtggtagacaaggcaacaaaaaaaaagggaagttcacaggcaatacggaacacacccctagagaaaatacctccaagttcattgccttctctgttctaactgacgaccgagagaatctacgcaacaacacagtctatggtccgatacaaaaaacccgctcccatgaagaaggatgtaagtaaaagagacacgtccaaattttgctgttttcatgcacactatggccacaatacgaatgagtacaacaacctgaagcgggaaattgaattcttaatcagaaagaataacctgcacttgtaaaagtatgtaaaggctgaccagaatcaaagggccacccaaacagacaataaccaagatttactaatgcccccaccagtggatgggcatttacaagtcattattgggggcccacatccaactggagactcgagcaaagctcgggaaaagtatgcccgagccttacatcacgagcagaaggaaatagttttagccgtagaggagagaaagccaaaaataccatgggtaggggaacccactataaccttcacataagcaaatgttatccacgttcacttcttgcacaatgatcccttggttgttgaagtacagagagcaaacaaaaca

SEQ ID NO: 147058 - DNA, 538 bp, Cannabis sativa
ttgtttattccaatagggtgaactaatatttatacaaagagtcaaatatgaagaaaataatgaaaaggaaactaagaaaaaaagaatattgattacaattaatgataataaataaaagatttagacatccacataattattaatatttataacaattgtttatttcttattattgttacattaatattttttagaattttaaatttttttatactatatttagttataactttcaattaaaatataattaattgtgcggcccactttgttgctaggcatgcacgatcgttaactggtcgtaacattttggggtcttctatacctccgatcttcaaactattttgtactcagaatgttaattaaatgaagtttcaatttcatgtaaaaaaaattataattaattgtccaattgtatttttgaatagatgtattgattagtacaaaattaaatgagaaatgctaaaatgcaccagtggtgcctagcaccctcctatgtgttaatatcgctattggtacaactaagtatcgggtcccatat

SEQ ID NO: 147059 - DNA, 606 bp, Cannabis sativa
  modified_base (80)..(83): a, c, t, g, unknown or other
tattattcttaactttttctccacccctatcagaccaaaagatctttctattaaacaaattcttaataattgttttagannnnacaattattcataaacataaaaaactctgtgtttatatagtattaactctttgaagagtttaagatactatagaatttgtattaataactacacatacacatacaattatcaaaacatataaatataattggtatttgttttacaagataaagtaaatgaagctcaattgcaatttatttccaaaatagaaatctttattataaaatttccaaaattaaaggaattgtttgcaacaataaaaaaaatagggaataaaatcctaaactaataattgaaatccaaactcttctgaaactaaaacaattaattcaaaaataaataaaaaatgaataaaaatgagcttcatcttcatcttggacgaactccacccctttgtccaactttccgattcaactcactaagatagcatctgagttcacgcagcttgggctttaataagaagaaaaaaaaataaacatggttagtaggtccaaaattaataatccaaatggataataattcactaaaacacaccagtttata

SEQ ID NO: 147060 - DNA, 604 bp, Cannabis sativa
ttagtttgattttttaagatatgtctttataaataaaataaagtttgaaaatattattttttttaggaataatttaagttttttaagtgaacttaatattttttttgttaatttaacaattttattaggttttttaattttttctttttcaaaattaataaaaaattatactttttgaaatttattattttttttaataaaaggggacaaaattaagggagtaaaaatgttaatttttaacggcaaaagaaatagaacctaacaaaatgggcttgattatgtaactgttatattttaaggagaatttgtaacaagacgtttattttaggaggcagaattatgaggttgtatcaaaagtttaagaagaaaaaaaatacttattcttctttttatacgacaacattcatcattggacatactatttcttttttaagaaaattttaaataatttacaaagatttaaatatttagttacattacatgcatattttttaacgaattattcggaaaaaaaaatcaaaaacatataaaatatctactatatcaagtcatatatataatgaaaatatatataatatctttttaagtgcttaaaattaaaaac

SEQ ID NO: 147061 - DNA, 1029 bp, Cannabis sativa
aagatggccataaataattaaagtttacaaaaaattttaaatgccaaagtaaataattttttttataaattattcgttttagagactgcactatatatatatatttagaatactattaatgaaataaagaataaatattattttgactttttaaattttattaaaattattaattagattttctattttgataaatgatatattaaaatctatattttctaaaataatattaaatattaccctgaattgataaaataaaacttaataataacatgatcttataataaaactggttatatttactacatcaattcatgttagaaattgtttagttatattaaaaaaaaatttatcaagcttagaatcatagttactatttaaaaaaatataaaatttattttatcatttttttttgaagaaaagcgaagcaatatatatattaatgaagaaaacagttagacctcgcggtcattacataataggtcgaccggtattgaggaaaccggaataacaccaaatatcttgtgggtgaacgcccacttggccacgttatgggccgtaaaattacaagttcagctaacataagaaaatacacaactagaaaataaaggagaagatctattacaaaaggagatgtagttctcaagcgcccattgagactccttcccaataagagcattgatcaccacactcgaatcattctccacaataataaaattagccttaagatccaaagccgtttcaaccgtcaagcagcaagtcgccgcttcaccacacaacgcatcaacaaagtctagcctggccgttgtaattcgaagaaccctgccaagatgatccctggccaccacagccgaacacatgctatccaaccccactttgatatcacaattaagcttgatccactccggtgggggggctccaatccagcaacggggagggactgggaggaggaaaaatggtagcatgcatatcttcaaaagagtgacaaatagaatcaatacatctgctaacatcaactggactattatt

SEQ ID NO: 147062 - DNA, 1124 bp, Cannabis sativa
ggcattccttccttttcttttgctgccacgtgtcataaatcccaattaatgagggataatggtatttaagcttcctaatacgaacccatttcatattttccctctcatttccattttcctcttcatctttctctgaaatttcaaagattcaaaacttcctccagatttctatcctcctttctccagaaactcaaatcttctaagtttcagaggcaatcgaaaccaatcaaaggggggatcgacgaatctcaaggttagttttcgaaattacttgcgaattttttcttctaattttgagaaacaatctgcattttgaattttagggaatagaaaaatgcatgtcattgtaaggaatacatatagagccttatttctctgctaaaaactgggtaactctcaggagaaaattggcctaaaatttgtataatcgtgagctttaggaagaacacttcgagtattcgcatctttttttcttgctgtcttgaatactcgtgagtattgagatgaacatcttgaatactcatgtgtatattcttaggaaatctggggatttaatcatctcaacccgtgttttagaacttagggttttccttatgttttctgtatgcttttgttgggaatactggttaggtccttcgaatggtgggtgtgtcactgtaacttaatgttcatgggtgcgatcacatgttccttgagtcactgtgacacacccagccatttgcgagatacgaccagttttctctttttctgcttaatcacatgttttaactagttggttttctcgaaacagtgaggattttccattgacccaatgattattggagaaatgcatgctctttgggacactggagactccttagctgtttctagagatacgctgctagttggatatgcgcgatgtagtcgcatgttgtgattggtcagattccttgaaatgttgggtgtttcccagtaactccatggtcatgctcaagaacgcatgctccttgggtcactgggaaactcccagccattttttgaggcactctatcagtcgcacatgtgcgacttacaccttgggagagttggctggatttctcgaaatgatgggtgtgtctcaataccttaatactcatgtaatcgac

SEQ ID NO: 147063 - DNA, 833 bp, Cannabis sativa
attattgagcgggttgaactttttctaatttttaattgggcaagttacaattaaatatttgcaacccgatatttatattggattggtaaaaatatactatggtccgactaaaccgaccgacgtacacccctagtaagtaacatgacacgtggatgcctcaagtttaatccggtctttttaatttttattttctcctaaaatctaaaactaataactgacacaaataaataaaacaaatctaaaattaatctaaaacctttcaacattttaggaaaaaaaacaaaactcatttcaaaaccattatcgacacctaaaacccaaagccctaaatcaaacctaaatccctaaatccctagatcgaaggtttgagaacctaaatccgtagctcgaagctttgagaacgacgatgatggacgaagcttaagaacaacaaagcttggacgaaggctaagaagaatggatggggagggttcttacagtagttctggtatcaatagtagaggtcgagagtagctgatggctcaaaccatgaaagggaacctcaaaattgttactgtggtatctcgtggattgcaagagtatcaaacacgaaggcaaacccaggtcgtcatttcaagaggtgtagactttcaagtgcaaggattataatttttccccttatattaagttttttatttctgtccattataagaaaacacagtagttatttttgaaaatttattcaagctgatggaggatgtaagttctttgaatggatggatgttgaatcttgtggaaggtgcagagaaataattctaggtctcttgaggaagataactaaacttgaagatcaa

SEQ ID NO: 147064 - DNA, 651 bp, Cannabis sativa
ttccttggataagaagtttagagtgcttctattctataatgcacagataatactaatacattttttttttattttagtatttaaaaatatttcaattttaattattttaaaattaattaagatttttgccttttaaaatatactaaattatgtttttgaacttttgaagtcgttaaaaatgacccatgaactattgaaattgttagatttaagaatttttgtttaattttagtaaaaaaaaagtctaacatagtgaaaattcaaagggcatgatttaatacatgtcaaaattcgaaggacatgatttagtagatatcaaaatttgggaagcataatttagtatataaaaaataacgtaaaattgaataaaattagacaaaaatccttaaatctaacaatcttagtagtttaaggggtttaagaggtaaaaattctaattaatcttctttttaagtcatatttattgtagttgcaaaattataggaaaatcaaaaaaattaatatactcaaaatatagtttaaatagtattttgtacgcatatttataaaataccttaaataagtataccaatatattttgtagttaataaatagggcaaatactattttggaccatctgttttacaaaagttaccaattggaccctgtgtt

SEQ ID NO: 147065 - DNA, 762 bp, Cannabis sativa
  modified_base (32)..(37): a, c, t, g, unknown or other
aataatctggattacattgaaatagagttttnnnnnnggcataaaacccaacagtttttagcttgttgacactttgcccagaccaatcacaaaattattcaaggcattgccaaactcccttggcctcagtaatcgtcgcctttcctaccaggataagatcatcagcaaagaaaagatgtgtgagtttaggaccatttctgcttaatttgatccctccaatagtgccagagtctaatgccttctcaagaattcgagacaagacatccgcagcccaaataaagagatacggggatagaggatccccctgccttagcccaccctccggttgtttccatttcataaactatagtttctatttcgagattaaatgctagttgtttctatttaacataaatgaggttaaatgctagttgtttccgtttcagaaactatagtttctattttgatgttatattgtttccatctttcgagattaaattctttctaatttcaatgttagttgtttctattttttatgatatttgtattaatttcaaatatacgaggttaaatgctagttgtttctattttaatgttaaattgtttctattttttattatatttgtttccattttacatatatgatgttaaatgctagatgtttccatttcgaggttaaatggcttctatttttcgagattaaattgttttcatttttgaggttaaattgtttctatttttaatgtgagttgtttctgttgaccgaggttttctgcaaccaat

SEQ ID NO: 147066 - DNA, 621 bp, Cannabis sativa
tttttatttttgaattaaatcttcttttctttttagatattcatatgagttatgaattttagaaatatcttttcgaacccaaaatctttaagctaacgaaattgatcaaaaataaagaaaataacaatgaagatttttacgtatttagagtgttaatgagccttagtgcacgagccaatattaatacttgaaatctaaaaaagcctaaggtggcgtttggtaagaggaaatagaatggaaaggaaacaactttaattttattcttttgtttagttttattttaaagtattgaaatgttattcttattctagctatatttttattacttcaaactaaacgccaccttatgtgtgtttgttatgtgagtttgatttggagagagtagagttagagggagtagacttggaggcagtggcggacccagaatttaaagtgaggcgggacgtattttttttgatggaaattgaaccattgacctctaccctatatataatttaacttaaccattgcagtaatgccaatattatgtctataaatattatattttattataaatatatatcgtaactttaaattgcatatatatttttttcctgattttttttcagggggtgactgtcc

SEQ ID NO: 147067 - DNA, 598 bp, Cannabis sativa
aaaataaatatatattattgaggactctatgtggtttaaggtataaattaaagtgcattgcacatttcaaaacaaactctaccttcaggaactcttaaaccatgtgctctagttattgcatctcgtagaactcttgagtctgatgccgaaccttcccaacccggtaaaacaaatataaaattcatatttcgatcaaaaactcctaacatattggtggtaaccttgccctttctatttcgatagctcggcttgtcagtttgactaactgcacctcaatacgtgtcccatctaatgctcctaaacaattctttacaaaataaagccaacaaaatattaatttgaatataaacactaaattttactggtccaaaatctaataacttcttagttaaaaattgttaatataccttgaaccatttccatctatcgtcattgcaactttctaaaacaggttctggcacaactaacaagctagcttgtaatcaaagaattccactcaataccgcattgaagtatctactaatagtttcacccgaccgcttgaacttatggtgaattgttctatttttaacatgatgagcaagtatatttaagaaaa

SEQ ID NO: 147068 - DNA, 596 bp, Cannabis sativa
  modified_base (529)..(529): a, c, t, g, unknown or other
gcaaaaagttacaaagaacgtacaaagttgtatcatgataataacatcttgcgaaaaagatttctccacttgtcggaaagttcttttatataactctcgtcttcatctgtttctcggtaagttacgttctaaatggattggttcatttactattcgtactgttttttctcacggagttgttgaaactgaaaattctaaaactggtaatatattcaaagtcaatggccaaaggttgaaattatttttagaattaacaccacctgatgtggaggaaatgctccttcacgacccgatttaccaaggtcagtgaattctttcactattggtcctatctttaattgctttctttatttttagtattttagtttcttttctgtcatttttcttttttagaaatcaacatctatcactatgcatattctctattttttcagttctcatctcgtgttcttatcatatacttatttagacattgatgacactgtctcattttagttaagggtactgagtatattcttgcgttaagttngataaatttcttacctttttgaaaattttgagtcaaattctgctgctaattatgtgaataaataaat

SEQ ID NO: 147069 - DNA, 573 bp, Cannabis sativa
  modified_base (81)..(92): a, c, t, g, unknown or other
atttatttaaaggttaaattccacatgatctctataacacataggggtggataaaaatattgacatatgtagttcattttnnnnnnnnnnnnatactcaatacaccacagtatctctatggcacacatcttttgattaaatatggatgtaatataatgaacaaattaacaaattttgagaacatcttcttgatttttttgttccaactaatatgttactgtagtaatagaaattgataccaataaagttctcggacatagtatcacagtaccttattcgagtgggagaattttaaaattctaagcccatcttcatttggatgacatttgtgataggaattttagaattcaaccgagaaagtaaatctaaccattcatatggatagaaataacttaccagaattttgaggataagatagaaaattttttgcatggtccatttgaatgacttaggcaaaattccttatcttcatgaaatgttttatgatatctctaatgattacttatcttaagcaagtattttacattaatgttaatactagattgctatgttgatgacttagtttagaaggaa

SEQ ID NO: 147070 - DNA, 832 bp, Cannabis sativa
  modified_base (744)..(746): a, c, t, g, unknown or other
  modified_base (807)..(807): a, c, t, g, unknown or other
ttccctttttataaaatgggttgaaaaaagggaagctaaagacccattttgtagtaggattataattgggtgtatgggcgcctagttaaaatccaatttatgtttatgcttttcttactgagtctgtcaactcacatatattgtttacatgtgtaggtaagggtaaacataaggctgaacaacagaaattgcgagcaaataaagattgtacatatcaaggtagttagacctagagtgttcaatctttgggacagcaggttttattttggtagttgctaggcaataatttttgtagttatatattttgtaaaatagttgtaacttttaaagacgaggtcccagattatgtaaagtttgtttatttaaagtttaaaggttaactatgaaaagttttaattgaacacgaacttcaataaactcattggttagcaacaaattacacagttagtatttaaacgataacacacctaatctagtagggtgtatttggtattagagctgccaagttatcttctaatgatcgtcacgatatgtgcaatcataatcaaagataagctcaactcacggttcagtaagcctctattgctttagtagtttgtttattagtacgttataagaaaagcctgttaagaagcatgttagtatcctgataacttaatagacacatgttttattttttcaagtaagcagtattagaatttaatcttgatcatgatctgacaaggctgttggaaatattttacnnngatctagatttattaacaagtatgtttcattaacatcctgatatgaatttctaaaacaatnaaataaacacataagggtttaagga

SEQ ID NO: 147071 - DNA, 1041 bp, Cannabis sativa
  modified_base (990)..(999): a, c, t, g, unknown or other
tatgccacatccacgtaaattgatccctgagttgtagggattgagctggtgactcatgatgcgttaagctgaattcgctaagtgtggatcattttgcacagctcgttaactattccattctgaatatgcccgtgaggcatcctgctcggcatattgatccgaacagatgctctaagtagagcccacttgtcaccattctcatgatgccacgtcagagtgccgaatttgagataacagtgttcacgaaagagaatcttcaagtgacaagacttaacgcctagaacccaaagtcgaggcgttgataaaattacagagaagatctctagaaagcaaaacgacagtgtatcagattctaaagaagaagatacagagccttgcgcgaaaagaatcatagaggcaccattgccccaatgctttagaatgccacatatgaactgtatgaaggaaggacggaccccagggaccacatatccaaatacaatcgcattatgcaagtcgccaaagccagtaatgatgcaaagtgcctttgcttttcactaacattaagcaagtttgcagaagattggtggaagagattgtctccggatcgatccaaaattggagagatctataagccatgttttgaaagcagtttgtagcagcaaaggcctttgacttagaagccagttccttaactagcgtcaaacaacaaccaggggaaagcgtgaagaaatacatccaatgcatgatggatgttgctactaaaaccaaggttgccaatgacatgaaattggtggccttaacatcaggacttgcaactggatctttactatggggaggccttcaacgcaaaagtgtagacactctaactaatttcttgagaagagctcagggattcataaatttagtaaaagcttatactcgagcatatggactacttttagcaccttctgccgatataccaaatgcccaaacttcacaggtgataatgtcgggttttatgccctaaannnnnnnnnnttcatataatcagatttacttatcaataaagatcagaaataa

SEQ ID NO: 147072 - DNA, 1200 bp, Cannabis sativa
  modified_base (1096)..(1110): a, c, t, g, unknown or other
gcgggtgcggtttggaaaattggaaaaaccacatgtgcgggttggtttgaaaaaatggttgaaaaccgcaccacccgtaccgcgaacacccgtacttctacccttgtagcccccacgaccttttccaaccttagtcctacaattagggtttcgtactcggcttcgttgttagaagctggaaatgcgaagcacagggtagcctggacccgaagtccgtcaggagatatcattgctatcccgacgccggatccactttcatttgatgccccatcaacgaacaccttccacgccggcgtctgtgtggctggtatacttgagctggcctccgcctcattgcatttcattatgaagtttgtcagggcttgtccctttatggaaatgcgtgggatgtaatgtatgtcgatctggctcaattccatggcccatttaaggtgtcttcccgagtcttctggcttttgcaagacttcccgaatcggatgaattgtaagtaccttaatgggatgggcctgaaagtagggtctcaatttcctcgaagccatcaggaagcaaaaaactaatttctcgattaaaggatgtcgtgtcttagctcttatcatgcgcttgctaacatagtacaccagatgttggaccttgtcctcttcccagactagggtcgcgttgacagcgttctcagaaacggcaaactataataataagtcctctccgtgaactggttttgacagtaccggtggtttggcatgtgctcttttatttttttgaatgcctcctcccattcttcactccactcaaatttttgacatttcttcaaaatattgaagaacgggatgcacttgtcagttgaccaggaaattaatcgactcaaggcggcaacctttgcacatccttgtgtttcttggggagggcatgtttagtaacgcctgaatttttttggggtttgcctctattcctcgttggttgacgataaatcccagaaactttcccgatttgacgccaaaggtacccttctttggattaagcttcatcccatatcttcggaccacttcgaagcattatgtgaggtcctctgcatgctctatgtgttggaaatattttaccnnnnnnnnnnnnnnntaccatgtatgtttcattaacatcctattatgaattataaaacaatgaaataaacacataagagttaaagaaaaccttacattgggtgca

SEQ ID NO: 147073 - DNA, 793 bp, Cannabis sativa
tcccgaacagatgctccaagtggattccacgtgtcaccattctcgtgatgccacgtcagagtgcaaaatttgggataacagtagcatttgtctgttgagagcttccattcttcccgttaaggcctagacttcctttggtttctttggcgacgacatttctatcaaggccttaattttctctggatttgcttaaatgccccttgcattgactatgaatcccagaaactttcctgaggaaactccaaaggaacatttcttttggttgagctttatattgtactttttcagtacctcaaagcacttcgcgaggtctttcgtgtgatctccactttttatcaacttcaccaacatatcatcgacgtagacctccatgttccttcctatttgcttttcaaatatttcattcactagtcattgatacgttgccccagcattcttcaaaccaaaaggcatgactttatagaaataaagtcccatgttggttacgaaacttgtatgctcttgatcagggacatgcatcttaatttggttatatctagaatatgcgtccatgaacgtcataagctcgtgtccagtagttgcatccactaactggtcgatccttggtagtggaaagcagtcctttagacacgccttgtttaaatctaaaaagtcaatacaagctctccaagttccatttggttctggcacaagggcaggattagatatccacgagggatagaatacttcgcgtataaagtcgttagtcaacaacttatccacttcctctttgagtgccccttgtctttcaaaa

SEQ ID NO: 147074 - DNA, 570 bp, Cannabis sativa
  modified_base (504)..(508): a, c, t, g, unknown or other
aggctgcatgcatcctccagtgctgatatttctcggttgatcacatcacctgcgcgaatgcataccatctgcaccaaatccattctttttttcaatttttcattttttcatgatttttcaaggagttaattcgaattttttgtgtaattttggatgtagatttttatttttcatatttcaaatctaattagcagtttgaaattaattattatttttaattaagtttagatattagtaaattttgaatttgaaaaagatgatatctacattttttttttcttaattggttgtcttattttttttttaaaaaaaaaattgttattttatcttattttaaatttaaggtcggatgtttaatattttttttattatttaaataattttataaaatggccttatttgaaatttaaaatatgatatgttttaataaaataacctagataacttttaaaacttaactagaattttaatcaaatttcaattttttttatttaaattaaattnnnnnattagataaatgatatttatttatcattttattttataagatatttaattttattttctttt

SEQ ID NO: 147075 - DNA, 551 bp, Cannabis sativa
cttagcctcgagctcgacttgctccttggccttgcaaagttcctcgagctctttatccttagaagtcgcatcttgtttcaacttcttcatgtcctcctaaagctgaacgttctgtctctttacgagttcgacctccttggatccagtaacaaaggccttcgagaacatggcaatgaactgcgaagctaactccacagagcgaggtaacagctctacagcaggagtcttgtcgatcttcgattggaattcatcgcctacgaacttcttttggagagtcagtatgttgcaggctcggacagctgggtcaatcacgaccttcttccctttctcttgtatgcccttcgctggcctcttggaagaatccgcgacatgggtaaccaccacatcgctcttcctcttctgaggaacgataggggaagttgccgctgttccagatttttgcttgcgattaagaatgggtgctgacttcaagaaagtcatctctgcgaggacaaataaaagataagtataaataaatttcaaggcactagttaatacacgcgatatgttac

SEQ ID NO: 147076 - DNA, 1127 bp, Cannabis sativa
cccaatttacccctaagtgatttcatgacttttagtgtaggcaagggcattatggtctttttgcctttttgggattttcgtcttttagtgatagtttaatagattagtaatctgattttaatggcttgtattaactaaataatatatttttattcattttttttacaaaatcaaaaattagaaaaaagagctctctctcttttgaaccctatagaacccaacaagggtttgattgtttcacgcttaattcaagaaatcccagcaatatccaagtgtattcatccaaggtaaagttcgttagcatttcccttttttaattcttgagctttaagttaaggatttatgcatgaaattagattttagggttctgtagttgctgttgttgtttgtggatgttttctgaagttagattatggctatttatgttgatttaagctggttttggtggttgttgtgttgtttgagaaagctttcagtttaagaacttaaacttagctctttaatggtgaattttgattttgagcatgttatgttgttctgttgcttgggatatgcttattaaggtagattaagcacgtctggaaggtttggtgaggtttggattcgatttggttggggtttcaaaaaatttcggttacctggtgcaaaaccggttaaccggattagcagctgggttcccgaacttttcgtgttgtcggttcgtgttcccaaacttgccatgttaactttcagtaggaaaacttttggtgcaaaacctaagtccctggatatgatttagcgtgtcacttacccgtgttatgaatgatgtgatttaggggtctgtaattcgtcaagcagttgttccactcaggttggctagcacacctgaattcggaaatgaggtaagattagtataatgtcatgcatatgtatttagatgtttgacgtacattttatttatgcatgttagagtacattgatagcagtattgatatacaaagagttatactggatattgataaatgtatgtttggcacaaataccgatcgattctatcacatcagtatggctagagtatgactagcatattgagtataggctgatattatggtcgatggtattatcgtatgaacgttttagactcagca

SEQ ID NO: 147077 - DNA, 713 bp, Cannabis sativa
aatatgcggttcaaactgcaccgcaccacacattataaaaatactaatttttatatttatttaggtccaatatgtgaatgttcaactcaaaggccaataattattgtattgttgaatttttttcttatatttattttcaattgttatggtatttttgacaagtgttgcttaagttttgttgtatttgtgatagtttaattatttggtgatagcttaaatcgtcaaaaaaccacaccgcactgcaccattttttgtggtgcagtttttgcggttttttagtttcgcggtgcgaatgcggtttggaaaattagaaaaatcgctagtacgagttggtttaaaaaaataatcaaaaaccataccgcgaacacccctgctctacacaattacctttaattaattcaaattgcgtataaaaagattcctaaactatttagaaagacaacttatcaccagaaactcagagcatgtttggtattattttctgttttttgttttcaaaaaattgtttttagaaatgagaacaaaaaaatagtttttgaagtttttaaaaataagtaatgtttggctagtgttttttaaaaacaatattgaccaaaagtgaattagtttttaaaacagaaaacaacattttttttcaaaattcttagagcatgtttggtattgttttctgttttttgttttaaaaaatagtttttagaaatgagaacaaaaaa

SEQ ID NO: 147078 - DNA, 958 bp, Cannabis sativa
gttaggtggctgcctaggttgttgacacctagaaatttttatttcagcaagggaataattaggaaattcctttttgcattttgagaaaaatcaagaaaaaccgaaattagagagcttatccttttctctctctttctttgttcggccaacccaaaataagaggaaaccatctaaattcttcccaaattctgaagtcaagctgattaccaagtgttcttgaggttgaggtaatccctagctctttgctctttgtgtttttaagctttaaatttggtttctagtagtgatttttagtgttagtggttgttagggttggaaatgcttaggcttcgaattctatgcttaatttgagttgaatatagcttcttacaactggttttaatgtatgggattggatttatgcaagtttgaacttaaaaacctaagctttgatctttgatggcatattatgatacaatgagtttttctgtgaattactggttggaaaatattgtgtataccctaattaggtactctggaagtgtgagtggcatttggagaagtttttagcaagaaatggagtttttaggtgagctgttctaaaccggctaaaaccgattagccagtttttgcagggttccgtgaatgttccattttctcaattctcatgcatttaagtgccttagttgggtgtttccctatttcctgagttagagtaatccctagagagtataacagaacctagagtggtgggttcgggtttcctggattagggttttgatcatgtgatttaccgagtttcattatgtgattagggcattcatttcgcacaagactttccgttcaggtcgtagcacactggaatctagaaagaaggtaagaattgtttataatgtgtaatatgaatatctgagtgtatatatatgttatgtgtatatgcatgcttatatgttgagattcatacactaccaacacttgt

SEQ ID NO: 147079 - DNA, 542 bp, Cannabis sativa
  modified_base (470)..(472): a, c, t, g, unknown or other
aaaaagcaggtgtgagattatatagaagaagaaataggtgtgagattatgaatcaaattttttcataatgcattatttttatacaccaatcataaatttgatgtcatcatcgtagtttcttatgatatcctcaaatttctaaacttaacactcaatttatcattatgttagttaatcaataaagtgacacatgtaaatatagtattggtcaaactaataattcttttagaacaaataattttaaaaaacaaaaaataattaaaataaattcatattatttaaaaaaaatatatattatatacatattaaatgaaatgaaaataaatttttccatattcttccagccatattatatttacagataacaataaattttaattctcgattcaaatgttatttttcaattctattttcatatattcaaaatctcattttataaattttttactaatatttttcaatcaatgaannnaaaaggtaaattttaattcccgtatgaaaaattaaactttcaatcccaataattaatagaaacaacatca

SEQ ID NO: 147080 - DNA, 527 bp, Cannabis sativa
agccaaggtttaattgattaaacccttatttcatttaggaagaaaattagagaaaataagaaaaaaatcaaaagattgaaaaacactctctcttttccctctcttttcgaaccagccaaatatagggggtatcattactggattttggtgtttgcagcaagggattcaaggaggatcaagcaaacgtaaccctagaaccatagtcttatgttttgaagcattaaattttagtttgaacttgtgattttgtgaaatgagggcttttagggttaggtttgtttagggttagaattttaaggttcatttgagttgattttaggtcctagcagctggtattgatggttggattaggttttgtgcaagtttgagctttgagttcaaaggtttgatctctaatggcataatttgtttcattgagattttctttgaattactggctggaatatgttgtttatgcattgattaggtactctggaaagtttggtggcatttggtggaaaattgagcaagaggtgaaaggtttgggg

SEQ ID NO: 147081 - DNA, 526 bp, Cannabis sativa
  modified_base (26)..(42): a, c, t, g, unknown or other
taaaaataaaaatatataataataannnnnnnnnnnnnnnnnataataataataaataaaaatgaataatttgctgcaaaaagataaaaaataaatagtaaaataataaattaaaataaaataatatatgatagataacaaaatatatatcataaatatataataaaataatttattatatttttatttaataaataattaaaatagtaaaataaaaatatttgaataatataacattatttatactaaataataatttattaattttctaaaatattgatataaaatatccaataatttaaaaagaacatataattttattgtcatattgtttctcttagaatcaatttaagttactattgtttaaatagtattattttaaattttgatagcttatgtatgataattcaaaattattaatttttaataattttaatgaataagtttttgataaaaaaaaaaatttataaataaatttgtaataattcttccatttaaatttttattaaatttaatatatattaat

SEQ ID NO: 147082 - DNA, 1431 bp, Cannabis sativa
  modified_base (1059)..(1059): a, c, t, g, unknown or other
cccagcgagttaagcaccaatacagcccttatgcacttattaccttaaaccctaactcaactatttacttcatataattaaacacttaacatataacattataagcatcgcatcatatatcacataaatattgtagatgcttacatactgtctaaaatggaaagcggtaagtaattgatcacataagcagtaaagtatttactctcaacacttactgcaccatgagtcgaggttgtctctgacgatgattgtacatgttcggccggtctataggaagtttaaaaactgtggcgctctgataaaaaactgtaacgccctaacatttaggcacgctacccaagatgattaagaaatcctaatcccctaaaggggattactaataaaataagcgtgaaaattaaactttaaatgaaaacggaatgagcataaacttgtaataattctaaccttacaaacaaaagttatatgtttcgagatcccaaaaattgtttcacaaaatattacatgccttttccgttagctgacctaagcggaaaaatagagttaaagaagttttaacacttgtagaccccaacccgcttggtatagtgtggcttgaacatgtacattcgtcgtctagctcctacactcatggctgattagaaactgatttaccctttcttgcactgtagagcacccgtgagctaagcccatcaagacagtataattatcaataatcataattaacacatcacataaatattaacggcatttcatatttgtctgtatgacacaaacccgcgtgttacactcacacgcttatttatgtctatataacatagacctacgtgttacgctcacacgtctatttacaataaggccttacaacggttcatctcggttctagttaccgagtctaactccattatgcattgaacacataaccctttatttcaatatacatctatataatgcatggcataacaattacatataaacaatacacttgggtaataaccttaagccaataaaccgctcactttagagtaataactctaatcccggtttctagtttctcanataaatcacattccatataagtgccattgtgcatatctctacgtgctaaacaatgtcttacctgatgtcctgcaaatattgagattccaaatcccctagtgctcctgactaagtgccggtaatcctagtcacaaacccagaatacacaagtatagggttaacccctaaattcaattaaaaatttggcatttaaattccatatattcacatagagctcggaaagagctttccaattatataaagaacatcccaaacggagtcccgagtagaaagttataaccaaaaccaaaacccaaaaaaaacacaacttgctgctataaaatggcagcggctactgggtttaaaaactcagaaaacccagttttcagcttc

SEQ ID NO: 147083 - DNA, 510 bp, Cannabis sativa
  modified_base (442)..(442): a, c, t, g, unknown or other
aaattaattaattttattctgataattagatttgaaatatgaaaaataaaaatcttaatacaaaattacacaaaaaaattcgaaattaattccatgacaaaatatgaaaaaatgaaaaaattgaaaaaaaaaattacatttggctcggacggtatgcattacataccatccgcgcgcatgcaacaggtggactgggcctaaaatgccgcacatggaggctgctagcagcatatgcgcgcacggaatggggctgttcagacagcccatgcgtgttcctttggacagacactgtccgaagacgcatgctgaccgagtgaaactcgatgtccgcccgcgtgtgtgatgcacccgattcctcattttttttttccaaattttcaaaaattcagaactaattcatataaaattgaagttaatttctgtaaaaaagtgaattgcttantttttttcatactatccaataaaagtaattccagaacgaaacagcaatcaatcatcaataaacacata

SEQ ID NO: 147084 - DNA, 967 bp, Cannabis sativa
  modified_base (55)..(62): a, c, t, g, unknown or other
  modified_base (184)..(185): a, c, t, g, unknown or other
tccacgtaaattgatccctaagttatagggattgtgctgatgactcatgatgcgnnnnnnnnattcgctaagtgttggttgctttgtgcagattgctgaatattttgctctgaccgtgccaacgatatgtcctgctcggactgtgcttctcgagcagatattccaagtggattccacgtgtcannattcatgtgatgccacgtcagagtgaaaaaattgggataacatttgcccccaagtctgtacgggacttctgaagttgcgtgtagacttcatccgagttgtttctttctttggatggggacacatgtcaatcgcgaccgtctgagactcgatgtgaggctgaccgggcatcccttcggttttcggctaataaatgctctgaaaattaatatttcgaaatccgattttctctctccacggctgacagctgtacttgataacttttgatttcccatatttgtttttaaggaggaaaactgaggagtctgaggttcttttgagggaattacctcttttcgtgacttgcctataaataccaacatcagtggcacaaaaactcatttttagcactctctttgtcgtgtaagctttagagcgaaaagagaaattcttggctttgaagttgccgaagtgccttcatacaaactgcttgttggatagacgttgctcgaactcagacatttgactattgagtaagtttctgatttccttcatgcttatctttgcatgtttacattttgaatgcaccttctactacgccgtagaaaaatgtttaggaaaccctaggtttagaaacctctgtgattcttctttatcatgtcttcgtgcggttttacagccataatgtttgtttctgaaccgcataacatccgtctttcatcttgcttattcaaagcttcatgaacttttttcccctaactcaagaaaatttttgacttcttgagttctgacttttctttgaaca

SEQ ID NO: 147085 - DNA, 682 bp, Cannabis sativa
aagatcctggtaaaataaatttcctacaccatttacatctaattggatgataatcatcaagtgcatctacatattcccagacattatttcttttcatggaatcaatttctgaatccatgccggctgaccatcgtttccgttctagacttgccagtgcctatttataggttaatggatcgtcatcaatatcgtcagcaatgaccttattgatttcaccattggagccataatgagctcattttctagaaaccctcccactatgacgaggaaccatgaccttctgaacaggaacgtcaatggtagattttttcagttgtatcaacatgcactagttcaactgagggagtgcgattatccccaatttgagtagaagatgtggaacattagttggagttatttctgaaagcatttcctccaatactactttactttgcagcttgaagttcttaacatagtcatcttcaaggaaagtggcacttgtagaaatgaatactttatcatccttatgactatcaaatagtccacccctagtctccttaaaatttccaacaaacgtgcaaacttaagttcgcgcttctagttttccatctgtaatatcccaaaaattttattgatatttatttggccatattttattaaatatgtaattatgtggatattagagtaagattataatcttact

SEQ ID NO: 147086 - DNA, 589 bp, Cannabis sativa
aatggaagatggcgatcttcccaccagtgggcgaggaaccatttctttttgtgggatcgattcatggatcccagttccagtgatttcagtattaatagctagagaattgttaaaagacggatgtttagggtttctggtcgtggtattggataccacacggcctgagacagttcggccagaggaaatcagggttttttgggagttcttagatgtttttcctgatgaccttttgggtttaccagcgcagagagaaattgatttcattattgatttggtacctggagcaaattcagtttctaatgcaccttacagaatggctctggtagaacttaaagaattaaaaattcagcttcaggggttgcttgacttggggtttacacggtctactgtgtcaccctggggaggtcctgtattgtttgttaagaagaaagatggatctttacggatatgtatcgactaccaggaattaagtaaattgactgtcaagaacaagtgtcatttacctaggatcgatgatcttttcaatgagttttagtggaaaatggtcttctcaaagattgatcttcgattgggctatcattagttgaga

SEQ ID NO: 147087 - DNA, 654 bp, Cannabis sativa
tattagtttgtattacaagagtgatttttttaatattttatgttgagtctctatattattatagtaaaattttgaagaatcaacaattaggcaaaaatagtagatgataaaaggatcaattagatctgagtatagatttgtttatcactatatcttttttatataggttcaataatttatttagcaaaacaatcttttattataattgtatataattttagaaatgttaattttgataatgactttgtagaaatataaatagaataattattttaattttatactaatatgtattttgatttatgctaatgcatatatatatatatatattattaaatgactgataattgcttaaaaaaaaaagaaatgactgacgatttaaaagtatatatattattatatttatatattttgaggtaatttttatgttaatgcatatatatattatattatatatatttaagtaatgatttaaaaatatatattatcatattattatatatataaaaaaaaaaatattaagataacaacaacgatttaatctttaaaaaaacgatttagaaatatatatatatatagatgttcactgccgttgttggattcggaaagaaagaggtccttgtactcaaagttgttggtatatcagaaaaagac

SEQ ID NO: 147088 - DNA, 630 bp, Cannabis sativa
aaattcatacacaattcaaaaattattaaacatatttagcaagtaatgaaaacatgtgaaaatacaaaacaaacacatcttaaattatttctaaggttttcaacaaactgatacagtgtcccggtaggcaaaagtcaaaggtatcattcattgaatagagtacgtagttaactcatctaaaatggataccatgcattctagcaactttttattcgatcaagataagaatccagcgttgtctcgtttaggcaagagtcaaggccattctgagcttccacaattgtttcatactttgtaagccctactcttagcagtcactattggggtgatcgttactaagaataaaagacttacaataatacttatctctcgagattctacgacattaaattgttaatgaatgaacatctattagggatgaatctcattaaaacaagaactatgtagaatcaacaatggagatcaaatatccttatactaaagctcattattttaagggagatgtattttcatttgatatatagtttaatctattttttttaaatattgatatatataatttatttaattaaaattattaatttagataactctgaatataaattttaatttaatatttataaaattata

SEQ ID NO: 147089 - DNA, 865 bp, Cannabis sativa
ttaatttcgttactttttaaatatgttgatttcacgttgtttgtacgttaaattacagtagttaaaatttgtaggttacttaaattatatatacaattatttttacacttttaaatcgtaacaaaatattgttaacagttaagaaaacttactaacaattatcgtcttttttctcataaaaaagaagaatataattatacaaatacttaatgtataaattaaaaatataataataactatttttttgtactaaactatataaaatatgttcaatatcacgtgaaaaatacatataaaattaattaaaaaaagttttaaaaaatatataaaaacaaaatttcttagaaaatattgttcttcagcgtataactaaaactaagcccacttctcaatcactaattcatacacaataatttgaaccttcgtggaagattggaatctttttttgtacactttcaatgtatgcaactcacttcattctactaaaggaataaaaatggacgacaaacctattctgatcaacattgaagtacatcatcactgaaaatcaactttcttgcattcaacggcagtagcaaaacaacaaaataaaaaataaaagcatttataaaatatcatataaacatcttataaacaacgctaatgcaatgctatatcaacataatccttgaaagcatttacaaaaataatatataaacaacttataaacaacgttaacacaacactataccaacaaaattatcaaacatctataaataaaaattgactaattcataaaactaaaatgaacaaaaataacaagtaacaatatgaacagtacgttcagcttaaagaagaagaaaaaatataaagaatatgttttatt

SEQ ID NO: 147090 - DNA, 744 bp, Cannabis sativa
ttctaatactttaaaaagaaactaaacaaaagaatggaatgaaatttttttcttttccattccatttcattacctctaaccaaatgccacctaagggtctatgttcacgggatagggttcagggtgttggggtttgtggtttgggctctagcgtttaggatttagggtttagtgttttacggttttagggtttgagggtttaggggtgtggggtttagggttcagggttaatggttcaggggaatgggaataggaatgaaaataatataaaatttaaaatgcataaaaaattgattaaaatcattaattttttttctagtgttacattggaatggtcgttccttctgttatacccacaatccggctgggaatttagaggatgacacgagttaaccttagagaatacgaatcaacgaatgtaatggcagatacaaatttttaccctaagatttgaatatgaagattgctttcgcgtgaaatttggttaaaatggccctttaataaaaaaaattgaaaatatccttctttaaagggtaaattttaacaagttctttctttactcttacactcgttagtgttctattaaaatctcaccctacacatctcaaaaattgtgaaaatttatgaggatgaagccaagacttttgtgcatctattttctattggacacgtctcgagataaagtagttttcatgcactaacaataattttaatcgaaacagtgaaaatcacacatttctgata

SEQ ID NO: 147091 - DNA, 999 bp, Cannabis sativa
aaaagaggtatgtttcaattaaatataaaattagaggaaaatttgatcaattgattaataaaaatggtattttttaacttaccccttactaaaataaatatttctgcgtgtttgaaataaaatctcagattgttgggcttgatacaggcccagagtcttattcactggcctgcttaggatcaagtgaaggttagtaacaataaattttcaaaaataccaatatattatttgcacatgaaataatattgcatttaaaattgattttaaaagaaccaataatggccttcgtaagctatgatggagtttagagtgtgtttggttgggaataacgaaacaaataaaaatagaatgaattagatttaatatgaataattattcttaatttttcttataataataactcaatgaaaacctcatttgatactagttttgaatacaaacacttaaacaaaacaaaaagtttcaatttccaacaaaatatggattatcatgcatatcctaccacatttagagctggtttggtacatcgtattataatatattgtattatattgaattgtgttatattgtattgtattaatattattcaatacaatataatattaagtattgatttgtattaattgattgtataaagttataatatatttttaatacactcgatcccaacaccaactacgagtccgattctgggtccgggtccaggtcccgggtccgagtcggagattggtgttgaccccaaatcctttgtaaatattataatacaagctaatacggaccatttattgtgtattaaataatacaacatacatatattaaaaaatttgatcctaataattaatacaatatattgttttatccatccatagtgttatttattatttaatacaatacgacccttatacgacgtactaaacgagagtttgtacgtcgtattacactgtattgtaattttatagtattatattaaattgtattttatgcaatatttttatgtaa

SEQ ID NO: 147092 - DNA, 1122 bp, Cannabis sativa
aactagcttttcaggatttttaaaagaaaatagacaatcttttacatttattctaggagccataacaaatgaaaaaataaatatttatacttttttttaacaagaggcaacatattagacaaattgatacaaatattgctcttgcaattttttttattaagaggcaacatataatgatagaaatgttgctcttgtttcatttttttttttttcaaacaagaggcaacatattaaatataatgatagaaatgttgctcttgtagatttttttttacataaagaaaataattacacaaaggctccctaataagatttgtctttagaaaaacttatcccttaaagcaacatccaatcaaactctagtactatgtccaaaataattataaccatttctaagaatcaatgaagattcaaaggttagtttctcaaatctcaccactcacaaaaatatgagcacttaaacttggcaaattttctaaataaatatgtattaacaactatcttaccacaaagtttggcaagtgcattttataactctagaaaaattctaagcaataaagatagcaaaaattagcttgaaaataatattttacaagaataagtgagtaatttttgaaaaaattaaccataaaaatattaatatgacataatacaaatcacaatgcctgactatgctcaccacctccaaccaaaatcagacaatgtcctcattatttaaaaatatataaatgaaatgcatgaattgagaacgctaagagagtgagccaatgtaaaatgacatgatattgatctttagaaatataaaaattaagaaataaactaacaaaacaaaacaaaagctaaaacatactgaaaataaataaaagaaggcaaggaaagatagaacctgattagtcttggcaagccggacacaagtgccctaacgttgggataccaactcaatattcttgcctatgcagtatcaagaatgaattttcttttgtcctgtgtctcaaaattacaagcattagttacattttcaggacaaagaaaatgatcattgtttaagtcgtggaggaaagagtgtgaatgactaaatgtaaataattttctaattttctcaacgattttgtctatcacatc

SEQ ID NO: 147093 - DNA, 737 bp, Cannabis sativa
taaaataaattaaaaaaatagtaaaatattaaagtgaataatatttgtggttatttagttttttcaatcataattgttctaaaaaaataacaatgataagatatttactttattcaatgatttttttttctcacctcattttatatttactttttttaattttttaaaaagaaaaatcttacataacgcgccagatggcgcgtcctccttccaccaccagaaagctggacccacacgtgtcagcctttattctaaaaactagctgataccgtataaaagtataaaaaaagacagaaaaagataaaaaagaaaaaaattacagatttaattaaaaaagtaaatagggaagcttttaagtcaattcttgtaaatttcccgatttaaaatagtgagattaagtgtcatcttctactgttcaagaaattgaggatactctctttctcaaaaaaaaaaaaaaaaaaggaaagaaattgaaattatgctcaattgaatacaaagtaaaataaccctttaagaaaaaaaaaatatataatgtaaaatataatagagtattttgtaattaaactctcttaattatcatttcacttacacttaattctttaagcttaaattttagtagtaaaaccttctaaactactgaactgttagcaaatttaaggtgttatctatttttcacagtaaactgcccacatagactgcttatgtgtacactctggtcaggcccggccctgggcata

SEQ ID NO: 147094 - DNA, 707 bp, Cannabis sativa
  modified_base (26)..(30): a, c, t, g, unknown or other
acgctaaccggtatgccacttgaccnnnnntctcgagaatctcaaaaggtcctgtaaatctagggcataacttgcctcttttcccaaaacgcttgataccattcattggagacactcgtaagaacacatgatcccctatttaaaactcaacatttcagcgtttcagatctgcataactcttttgcctactctgagaagcaagcattctacctttaatcttctcaattgcttcactggtccgctgtactgattctagacctaggtatttcctctcccctgtctcatcccaatggatgggagatctaccctttcggccatataacaactcattgggagccatccctattgtactttgataactattattgtacgagaactctattagcgataggtacttactccaggagccctcaaaatccgtaacacaggctcgcaacatatcttccagtatctgaattgttctttcggactatccatcagtctgaggatggaaagctgtactgaatttcagtttagtacccatagcccattccaaactctgccaaaattttgaagtaaacttcggatctctatccgaaactatggactttggtacaccatgcaaccttactatttctctgacgtacaaatccgcgtactgatccactgaaaaggttattttaactggtagaaaatgtgcagactttgtgaatcggtctaccacaacc

SEQ ID NO: 147095 - DNA, 588 bp, Cannabis sativa
cgaaagatgaggaggaaggatgcagggtatatcatagtagagggaattatgtacagaagaagattctctatgccgttgctcagatgtgttactcaagaagaagctgcacgacttttatctgaggtgcccgatggatattatggaaatcatgcagcagggcagagtttatctaagaaaattataaggcaaggttatttctggtcgacaatgattgaagattcaaaggcctatgtcaaaaaatgcgacaaatgcaagagattttctaagatgcctggagctccgcccaacgagttaactctgatgcaaagtccgtgggcttttgccatttttggaattgacctgatcggacaattacccaaaggcaagggaggagtgcagtacgcagtggttgcggttgattacttcactaagtcgacggaagccggaccattagcaaccattacatttaaaaaagttcaagactttgttgtgaagaaaatagtctgtcagttaagattgccttataaaatagtttcggacaatggcaaaaagtttgacagccagtccttcactagtttttgtgcgaaccatggtatcataaaaagtttc

SEQ ID NO: 147096 - DNA, 667 bp, Cannabis sativa
tattgtatccactaggtggattcgttctttgtccttctggattgacggttgtgaattgaccgccaatctaattgaattgcaattatctgattttgacataatcctccgaatggattttctatctaagtatggggcaacgatcggctgtaagcggacaatggtagtgtttgagcgcgatagtgctaacccagcggtgttcgtgggtaagattcaaggggtacgcatactgttaggttatatttagcctatgtttcgggtctattggtatcttttagagcggctttacgcttgattttccttgtttcaggttcttggggtatcaaagttcaaattcagtcaattgatgaaaagaggggacaaactggtgaaaaatcggtaaaatctgctcttcgggtgtcagtagtcgcgaccatggatcgtgctagtcgcgacccttttttctgtgttcgcgaccacggtcgcgacttgaagatttggcagaacttatggttttcgaggttttcctgtagtcgcgaccagcctttaagttggtcgcgaccaggtacggaaaacgcagtctttgacctaattcagatattttcccaattggaggcacacctttcattcctatataaggaacacgattcagaaggtcaaattaagcagaaatagacctgaatagtggatg

SEQ ID NO: 147097 - DNA, 962 bp, Cannabis sativa
taagcaaaataaacacattttcactactctcctcacaatactttagtttaaaagcataaaaattaactctataacatagagttatcaaaaaccttccacaaaatgccgatagtatcccgctaaactgagaaaacttcgaatttcagtgactgtttttggtctaggccaattcttcactgcttcaatcttccctaagtctaccataatcccgtcttttccgacaatatgccccaggaaggatacttgtgacagccaaaactcatacttttggaacttcgcatagagtttatgatccctgagtcgttgcagaaccatacggagatgttgttcatgttctgcttctgactgagagtacacaagaatatcatcgataaatacaattacaaaattaccgagaaaatccttgaatactctattcatgagatccataaaggctgccgaagcatttgtcaatccgaatgacataactaggaactcataatgaccgtacctggtacgaaaggttgtcttcggaatatcttcctcccggattctcaattgatgatacccagatatcaagtcaatcttagaaaataccgtcttgtccttaagttcatcgaacaaatcgtcaattctaggcaaagggtatttgtttttaatggttaacttattcagctcccggtaatcaatacacatccgaagagttccatctttcttctttacaaatagaaccggagctccccaaggtgacacacttggtcggatgaaccctaaatccaacattccctaaagttgtatattcagttcctttagttctgtaggtgccattcggtaaggtgcttctgaaacaggttccgccccaagtattaagccaatgataaaatctatttctcactgaggtggtaatcctggtaattcctcaagaaacacgtccaggaattccttaaccactttaacctcttcaggtccaagtaacacaggtt

SEQ ID NO: 147098 - DNA, 653 bp, Cannabis sativa
tgacatatgttttcccaagctacaaccccaggaccactatacaatgcttggcccttccacaaaaaggccctacacacagtttctattgcccttacaactttttttggcaataccatcatctgactccaataagcctgaattgctatcaatacagaattaattagagtgatccgacctgcaaatgagagatttcttgaactccaacttttaattctagccgtcattttttcaaccagcagttcacattccttacctgaaatcttcccagaacaaataggtatccccagataagtaaatggcagagtttgtttagagaaccccgatgcttcaatcaagttcttcacactcccttcattcatgttactgcaataaattgcagttttgctagcattcggttggagcccagaagtgaaagaaaacagtttaagagcttgaagcatataagtgatgctctgtatatctccataacaaaagagaaggacatcatctgcaaaagccaaatgattcaattgaagtgaggcacatctgtcatggaagaggaagtcctttttctcacctattttcttcataagtctagataagtattccattcccaagacaaataacagaggagacatgggatccccttgcctaagtccccttttagcttcaaa

SEQ ID NO: 147099 - DNA, 600 bp, Cannabis sativa
ggggggcttatagatgacctggacgaatgcttcaaagtgctcaggaaatacaatatgaaactcaatcccttaaagtgctccttttgagtcaggtcgggtaagttttcgggctttatcgtctatgcccgaggaattgaagccaatccagaaaaaattcaagccctcatagatatgaaatcgccaacaaaaactaaggaagttcaaagtttgactggtcggatcgccacactcagcagatttgtttcaaagtcaacagacaagtgtgtcccattctttaacatcttacgaggaaataagcaatttgaatggacggaggaatgcgaaaaggccttccaagaactaaaaatgcagcttgcaaaacctcatgtgctctcaaaacctttggatggagaagaattaggaatatacctggctgttacgaaacatgctgtaagagcaatactgattagagaagaaaacaatatccaacacccggtctactacatcaacaaaaggctcaatgaagctgaaggccggtacccattgatagaaaagctcacttattgcctaatcctaccaacgagaaagttaatgccttactttctggctcatcctgctggg

SEQ ID NO: 147100 - DNA, 749 bp, Cannabis sativa
actaggttagagttttaatagctttaattaaataagtattttcttcgatctgacgcaattctcatgggttcgatctcgttcttcacaatctctataatacaataaaggttcgtgcgcttatgagttgataaatgtaaaacatactattaacgcagattttgttaactatattaaagcctaaatcgtgatggatttgcacagaaaataatagcaataaggaaaaaactaaagaacacaaagcttttttttacgtggttttgcagttaaattctgcatagtccacgagtctatcttattagatattgctgatacaattctagggttttttctctaaaggatttttcagtcccatttttagtgtatcctgcccctattaatagttacataggagggcggttaattaaaaatcaggctgatatcttacaacaataatcttctgaaattgtgggatttgattacgtcccacgtaaaataaatgcggttattatttaaaatatcacagctgtgattggtctgcttttactgggtcaatgcatacgtatattaaatacattgcaaagcatattgttctaggacatcttgctgggaacataacaataataaccctggtagcgagctagagctttttccatgtctttccgacgttgataatgtaaatctcatcgtttttgtgcttggagacataacgccccatctgacaatcacagttcttggtgacaaggtgaacttcagtagttaacatcatttga

SEQ ID NO: 147101 - DNA, 501 bp, Cannabis sativa
aaaaatatatatatttttatttaataataggaaataataattctaaccaatagtattaatatattaaaatttatttttagaaacttacttattatgttgaaattactattttatccttgcaccaacaataaaaatttattaaattatgaaggtcattggtgatatttcactctaacactctttgatgagttttttttagttaaagaaaaaaaattaagttatttgattttatggttggaaaaagaaaaaaaaaatgagtagcttattttttctactctttgttcttattgtaagaattattctgttacatttagtgcttggattttttgttcgtgctggaagtaaacaggtgattagtaaaaatatttaaactggaaaatattttcttcaagatttatttcttcaaattttacataaagtactatgtttacttgtttgcttgttgagagagaagaagatcgagatgtgtattatttctttgctccattagttcatgctctc

SEQ ID NO: 147102 - DNA, 1571 bp, Cannabis sativa
  modified_base (32)..(61): a, c, t, g, unknown or other
tttagaaagttcttatttaggatgttaataannnnnnnnnnnnnnnnnnnnnnnnnnnnnntaaaataatttccaacaatgacgattgcaggatgttgtccgacagcctgatatgtttttcatatcaacacagtggcgtgtctggttcggtcgtcaatggctgcttgctgagccctcaacgtttccatctctttgtccctccattcagcgaacatgcaacgcgagatttaccgcggcacggagttcctcctgatcgtgatgcagggttttggtatgaccttgcatgactccaagagcaggacagaggttctctatttcggtgtcatctccaatggttgttcgaacatttgttacatgcggaacgacagtgttgggaatgccctaattagttgttgaactggtatctccagtctctttcacaccaagcgcgattccactcacaggagtcgtcacactgtgacctatggttgagggttgttcgggatttgtggttggtggaacccttgtgtttcttgggttctgtagtgcaggatccaccgcctgtggatttgccggatcaaccacgcctctacgtgtctataccaccattgtgtttgtgattagatttgagaacgatcttgagttcagctctcaatgaaagcaccaaaatggtgacctcgcttttggccaacgacagtgagtctagattgtaagcgacaagtagtataatgtgtatgtaatataataaagtaaatagagacacaataattttatagaggttcaaccccgagcagttcagtaatagcctaatcctcttagtttgtattgacttaagaacaaggaatataatcccttttcttagagctcttacaatagtatctctgaatatgaattcttagataagttttttgaccctttgcccagtgagtatgcatcactatttatagggctataagcttcagagggaagaatttcccttctgagtacaattgatataaagggaaagattccatattaaatacagaatacactaatcaagggatttggacagctttccatatctctgtgatctaatcccaaaattatagagatttcttcggtgactcacaattcaaaagatgaaattgctaagtgttggcatgctgtttagactgctcactgcccgcttaagaagccttcgtccaagcaaatatatgtggtgccctgttcggcatatctcttgcgaggaggtacataaaattgatttcacgtgtcaccatcatgtgatgccacgttagagtgcaaaaatagggataacagtatgaattcattctaatatagttaatgtgacttttaacacatagtggattattttagatttttattccacattcataatttcttgcaaggtttacaaataaacctatgaaagtcagtaactgtgagcaaatcttatctacagagaagatgagttctcacatttagaaactgtgagaacaggaaatatagtagtcagtttgttttataattagcgaagacctttatgtttcaagcttctattgaaacttgatttagacacatatttaaaggtctttactacaaaatgatgtcac

SEQ ID NO: 147103 - DNA, 881 bp, Cannabis sativa
taagtttagaaccttatttcgtagtgggaaacatattggagaaaataaaataccgaggttgtgaagggttatggtttttgacaattttacccctagtcttaaaaacacttaagttgtaagttaaggggcattttagtctttttgttaaatagagagttaggtggctgactaatcatgtgacacctagcaactaattaattcaataagaattaaccttagtttcattttaggaaatatagagaaaataagaaattaaggaaaaaaaccaagagaaactctttctctttctccctttctcttcgagcagcactaaacaaaggaggacccagcttatttcttgttgtttttttggaaattcagtaaggattcaaggcttcttgaagccaaggtaatccctagtaacacccttctttagttcttgagttttgtggttggttgagtatgtgattttgggttttggtgttgttagcgttagaaatacttagggttcgacttttacgttcaatttaggttggttaaaggttctagtaggtggttttaccactttgtgttgaatttatgcaagtctgagctttgaactcaaagcttaggtctttaatggcatgttgagtttcattgagtttttctgtgaaatactggttggaatatgttgcttataccctaattaggtactctggaaggtttggttgcatttggtggagttttgagcaagcaatggggtttttgggtgagttggtgaaaccgactagctttaccaatacctgtaaaactggttagccagtttttgcagggtatctcgaatgttccatttcctcaattcttgtccatttcagagccttagttgggtgtttccctatttcttgagttagagtaatccctag

SEQ ID NO: 147104 - DNA, 505 bp, Cannabis sativa
agcttgtactcaacaaattctattttaaaataatctaaaataacaaaaaaaaaaacataaataaaaaaaaaacataaataatctgaaattaaaaaacaaaattatatttagattcatgttttaaatgcaaaattagggtatacctaaattttctattttaaaataatctaaaataacaaaaaaaatataaataaaaaaataacataaataatctcaaattaaaaaaaaaagaattatatttagattcaagttttaaatacaaaattagggtatacctaaattttaactaattttttatcttgcaatttttttgaggttatacacaacccacattattttaacataatctgaaatgaaaaaaaaataaaaaaacgaaatatgaaaattaaaaaaaaaaaattgttacttgagatggaggagtacgcagcgcctaagatgatggagcaccggtctccgcctgagagggaggagctctgcgttggcctgagatgaagaagaaaaaaaa

SEQ ID NO: 147105 - DNA, 1438 bp, Cannabis sativa
  modified_base (1390)..(1404): a, c, t, g, unknown or other
tatattaattacaatacaataattaatttcatgacatgaaaatatcaattaaaactcaatttattttatcatttaaaataaataaaagtgtatttttaaccactaatcatcactggaggtggctcatcgtcattgagccgagagcaacgaaggagaaagagacagatctaaggagaggggtgcggagagagcgggtcggggtttttggatcttcgttgagttcatgcggtggtggtgctaggttgaaatggttgtactgggttgcaatggtggtgagttgacatgggtggtggtggtggtcaggtccgtaattgaagaaacatagacaaagatatatatatatatataaatgagagagagatagtaaaataaagaaaaaaaaaaagaaagaaaaaaaaattgttttttatttttaagtatttatttatgtgtgccaatgatattgtgacatctgtactctgtattcatgtggacaatattttttgtatacatggatagctaatgtggcagtttattgccaaaaatagatggaaatgactaattgctaacagaatgcgagttttgagagttttaccgttaaaatttagattttagaggttaattgctagcaaaataaaagtattaggagttatgccacaattaacccttaaaaaaattgcacataccacattaacaaaattatatacagcaataaaataattatatcatacttacaaaattatataccatctttatatataataaaataaaaactaaacatgatctaaaataaaatgatatactacacaataaaacttatataccatataacaaaaattataccttacaaagttacaatagaaatatctatataaatatatataatatataataataaataaaaataaaaatacatatagcatgtttataaaattatatatcatgttaaaaaaagtataacaaaaaataaaacttaaatatcatttaaaaattaatataccgtataacaaaaaatatatatcattcaccaaactatatgtactaacaataataataataaaaaatattactaatatatatactatactaaccaaattatataccacaattaatatatataatgtcattaaaactatatatcaccattaatataataatatagaaactaattaaatattatttaaaataaataatataacacacaattaaaaatataaaaataataattaaatatatatatcatgtcaataaaattatatacctacattaaaatgtttgtgttatgcgaacaaaattatattccactattatacatagtaaaataaaaaataaatcatctaaaaataataatataccatacaataaaacaaaaatacactgcacaacaaaatatagggtaaataccattttnnnnnnnnnnnnnnncaaaagttaccaattggaccctatgttttgttaa

SEQ ID NO: 147106 - DNA, 586 bp, Cannabis sativa
tcttaagcttaagctccattaaaagaacctttcgattttaaccctcagttttcacaacatgtactcctccatagatgggacaattgagtaccatatattatacacatatatatattatatatgcatgtctcatataaatacatagaaataattatttctacatatttaatctcactaatatatattatatcttatgctctacatatatataatatatattactcatatatagatgttacatattatatatctcacatatatacatataataacatgatataaaatcaaatatcatattatgtactactatatatattaatatgatacaaacacataatcacatatatataactcatatatatatcatgtatattactatcatataaaatagtaaatcacataatatataccaacatgctcacccatgaatggttttcacacaaattaaatctcttatccttgtattctcacaatcttgatttatctcctcttccatattgaaaagggatgagcttttaatttttagagattttattacaatagaagaaaaatcaagatacattacaactctattgtaaaataatac

SEQ ID NO: 147107 - DNA, 547 bp, Cannabis sativa
ttctttgactgtcgacattttgcttctttcccaattgcacactaaacaaccacaacagattccccctcttctttctttttaaacgttgccccacaacacccctaattccaacaatacactactatattcttactccaatcttgctcaaaaatcaccactctttccaaaccacaccgactcaaattcaaagcatttacattaaaattctttcaccctcggcagccacaacaattgttcccctcttttactctttttttttttttttcagtttgaaactactcaagcaacaacaacagtgcttctaaatttacaccagaaaaacaaatttacagccacccaactgttctcaaatatcattgaaattcagattacatcacccacacagttcaacgccacacactactcggcatctattgcacatttccactactattcttctcaaatcacccaattccatacactgacaattccacaatcaactcaaactaaatatctctctgtttctttaaacccaatgtgtaagttcacaaattcaccatgttcaatt

SEQ ID NO: 147108 - DNA, 525 bp, Cannabis sativa
gaggaatgaaaacataaaaatgggaatgagaataggaatagaatggaacaaaatttaaaatgtataaaaaagattaataaaaaaatgaaatagcttttccttccatttcaaaaagaaatagtcattctaccaaaatggtgggaaagaccattctattaaaatgacattccaatattttaatatgcaaccaaacaaaagaatggaatgaaaattatttcttttcctttccattccattatctctaacaaacgtcactttaagtggcgtttagttgggagaaataaaaatataagaatatgaatgagaatgagaattgacattggaatggaatataaatttaaaatgcagaaaaaaaaattgataaaaaaaattaataatttttttcaaattttgcattggaatgatcttccctttcattttgaattagaatagtcattctaccaaaatggtagaaatgtcattccagtactttaatatgcaaccaaacaaaataatagaataaagattatttcttttctttttcat

SEQ ID NO: 147109 - DNA, 1074 bp, Cannabis sativa
ttatcgtatcttatttgtagttattactattgatcaaaataaatttgttctatacataaaataaatcatatatacttcagttaattcactactaatttttttatacataagtgaatgattttgttaaaatttattacttgtctcatcatataatttgtgacctaaaaaagaaggagaaagcgtattatatatataaaaaaaaaatagggtaataaaagactaaaccaataccaaaatagaaaagtttaaaaattgaaaaatcatcaagaaaaaagattttgaaaaaaaaaaaaattgacaaatctgtgcaaaaaaactcatcatataatttgtgatctaaaaaaagagaaataaaagacattgtcaaacgatataagataatgaaagactaaaccaaaactaaaataaaaattaacaaatattagaaattgaaaaaattctcactgagaatagagatctaaaaaaaaatgacaaatctaaaaaaaaaaaaaaaacttatcatataatttgtggtctaaaacagaaagaaaaagaggagttattgtcaaataatatagggtaataaaagactaaatcaaaatagagatctacaaaagtaattgatacaattgaataaaactcaccatataattataaacggaaagaactgtgagaatatatttaaaatagtaggtaataaatttataaaaaactatatatattgatattttcttaattgatttttatttatatattggggtttttaaaaaaaaattcttaaattacactattaataagtctttgattgagatacaattaaatttattgttttttttttttaaaaaaaaatctattgtgttttttatttaaaaaatgagaaaaataataaaaaataattagaaaaaatgagaaaatagataaataggttttaaataataaaaaattaaaaattagataaataaatgttaaataattaaaaaaaaataaaaaaaaatgtataaacagattttaagccattttaaatcgctatatatatatatactaggtgatcattacgtgccaagccacgtactgttagttttatttaatatttta

SEQ ID NO: 147110 - DNA, 587 bp, Cannabis sativa
caatgcttatattaagtgtggggagagattaactatcgtgtctatccaattttttttccttagttgtttagttagtttttttttttagtttatattagtttttttttctttaattttagtccatggattgagtgaaattttgttgacaatgattgctcgtgtttgatgtttgattttattttgatgtcttatgtatggtcttatagaaagtaattttgttgatgatgaaattcttgattgtgtggtagttataattctaggaaaatgatagattctcatgatttatgtgtttagctcatgattaattactattcaatggaagaaatgaataggtttaaaatataaaataatcgaaaataatacgttattatgttgtttactaaattgatcagaaaagaaatcagaattattttattttgtttacataactaagaagggtataagatttgactaaattgtcattgttaaaaaagtataattgttgaaattccgtattttaatatttccagtttgattatttaattaaatgattaattaaatgcggaataataaaactggtactgaaaacagttttctgtagttacaga

SEQ ID NO: 147111 - DNA, 588 bp, Cannabis sativa
  modified_base (558)..(562): a, c, t, g, unknown or other
ttctaaccttttgcttcttgggtcaccttagtggttgtgtctcaacaggcactcccactatcatattctttatgtcatcaggaaattctcaatcattctcattacaaacttgcataattgcgccttcatatgtgctcctccaatattttgtggtgtaacatggcgagcatagtgcgtacatgttaatacttcgttgttgagctgcaacacatgcatgaggacaagaacatttcatgatttggaataagccgcaagtgtaagcttgttccttcaagtccattatgacaccagtctcaactaatcctccagggtggacattcaacgtgtaagatccacatgtgtcaacgttcaaattaatatttatcaaactgccatgccaagtctccctccatttatggtgatagggtcttcgtccacttctcagctttttcttttctcgtagcaaaccactgctggactttgaacctcaggaattctacagaagcagtgatcggaaaacctcttgagtccttagttggttgttggatatattttactgggatctagatttactaacannnnngtttcattaacaccctaatatgaatt

SEQ ID NO: 147112 - DNA, 1026 bp, Cannabis sativa
  modified_base (988)..(989): a, c, t, g, unknown or other
aaggatttagagaagcaaatgatttctcatgcaatatatttaattgttctctgtcataatcaagttcttcgttgattagtctattacctaaatcttttattaatgaagaattaggaaggggtattctatttatgtctttcaaaattttctcatattcaacataatcatttcaattttgtatagagtgtatgattcaacttgttgttcagttaattgtatgattcaactttttcctttaataagaacaaagcttttgcttcaatttttgaataatgtattttagagaatgacaaatctatctggattgttaattctggatctacttaccatgtctgttgttcattctagatgcttgaaaattagaattatttaaaacctaaagagttgaaacttaaagttggtaatggcgaaatggtattggttagagctagaggaaaatataaactcatgtttcagaataaatttttaaatttagacaatattttgtttattctaaattttagtagaaaatttgatttttgtttcctatttgcaattgcaataatatcaattgaattttttgagttttgattctattatttctcagaatgatattcaaatatgtgttgctatagaacaagggctttatgtccttagaccagatgaaccatctacacttaataacgaactgtttaagatagctaaacctagaaaccacaaaaagcataagatcaataatgaagacgaaacatatctatggtacttacgtcttggttatataggctatgatagactttgtaggttaaccaaaggtggtccattgaaaaatatcaccttaggtgaattactagtttgtcaatctttcctataaggtaaaatgactaaatattatttctctacaaagggagatcatgccaaagaaactgtagggttaggacattcagatgtctgtggaccgctaaatgtaaaaaccagaggaggttataagtactttgtcactttcattgannattactctagatatagttttctttacctaatgcaaaa

SEQ ID NO: 147113 - DNA, 806 bp, Cannabis sativa
  modified_base (67)..(91): a, c, t, g, unknown or other
tatactgcagtatgaaacttataaaaaaacacagtaaaaaattaaaaaataccgcctgacagtattnnnnnnnnnnnnnnnnnnnnnnnnntataccatgtaaatttcccatagatattgacatataaattatatattacctattctattatatacccattttaaaatcataagattttattatttttattattaacgtaactatttatttaccttctaaaaaatgaattgtcattttaattgttagtaactcaaaaaggaagagagagaaaaaaaatgctaaaagtataaaattgtaacaacaaatttcatgaaagaataatgtagtaataaaaaaaattaagttatcaaaactaagtaaaaaaaaatcttaatacaaaaacattctgatgagttgatattattttgcatattgcaattaggtagtcaatgtattttgttatttttgttcttttgtagttttttatagttattttcatgttgtttattaagttattttagagttgttttttagttgtcttagttatttattttttttattgaaatataatatttttataattttgaaacgttagcacaatatttttgaatacttggtacagtaaaaatgtaaaagtaaatatgattgtaaaaaatgtaaaaatagaaaaaaaaaaaaaggggggaatttttgtaagatcctctactttatatgtgtgtgaaataaattgttttagccttattttgaggtttttacatcacatactgaaatttttctttttttttattttttttactgtggggcagaaattttttcaaaaatactg

SEQ ID NO: 147114 - DNA, 723 bp, Cannabis sativa
  modified_base (26)..(29): a, c, t, g, unknown or other
caacatacatgatagtaaatagatcnnnntaaaataatttccaacacgatagtattgtcatatggacgtcctagactcgataccgtgtgggacacgaggattagggttatgatcgggtgtatgggcgccaggttataacgcaggttatttgtatgttatatgttatgtttttcttactgagtttgttgactcatagtgcaatttctatgtgtaggtaagggcaaagctaaagtttgggagccgtgagagcgagcaggggaagattgtacatgtcagggtggttaggcctggagcgtacaatcctcggaacatcaggcttttactgtttagtcgctaggcgaaaaatcttttgtatatgaatagtaaactttgtaaatgtattttgtaaacgggatcccgggattttataaatgtattatgttatgattttatttaaataagcaaaattttaattattcatgatttccaacaacctcgttgattagcaacgagctgcacagtacgttaaaaattacgctaacacgcctataatagttagagtgttacaatttgttatcagagccgccaggttgtcttccgaagattgtcacgacatgtacaatcatcatcaacagtctgcttgctccacggttcagtaagcttttattgcgtagtagtttatttaatagtatgatttaagaaaagcctattaggaagaaagttagtagcctgaaagtagaatag

SEQ ID NO: 147115 - DNA, 569 bp, Cannabis sativa
tgcttccatgtgtaggtaaaggaaatgccaaagctaaataggagtgaacctgagctaggatgaggttgtacatgtcgaagcagtgtgacctggagtgtccggtctcgagacatttgggaatttcattttgtagtccctgtgcgacctgaataatatatattttggtatattatattttaaaagtttgaaaaaggaataccggtacttgtaaataatttggtataatataaagtctaatatttaatataaaaattttaatttgacacgtttttcaaaaaaaatctttgattagcaaagactgcactgtaattgaaaaagcactatagcgtgccttagcattagggctttacaattttggtatcagagacgccaggtttgtctaccgaagtttgctaagacatgtacaatcttcatcagagaaagctcggttcatggttcagtaagcccgtatttgtttagtattttaagtgaatattaaagcatgttaagaagcatattagattataattatttattttaagtgtgttacctttatgtccttaagtgcagtattaagttttatgatcgct

SEQ ID NO: 147116 - DNA, 550 bp, Cannabis sativa
gatgttaatggaacatacttgttagtaaatctagatcctggtaaaatatatccaataggtttttcccagttgctatcctttttgttgttttgtatgaccataatacttatggcagttcctccggccagttctctttagcttcttcaagctcttttttcatggtgtctttgagtgtcttgttgactgcggcttgcccatttgtttgagggtgtgctactgcaaagaaacttttgatggttccatgtgtcgagaagtctataaacatctggctatcgaactgcttaccgttgttcaagacaatcttgtgcaaaagtctgtaccgacatatgatgttttttactaaaaaatccagtactttcttagatgttatggttgccaggggctcggcctctacccactcggtgaagtaatccactgcgaccactgcatattgtactctacctttgtctttgggaaactttccgatcaggtctattcttcatatggcaaagggccatggactttgcatttgtattagctcattagggggtgcgcgggggatctttgaaaa

SEQ ID NO: 147117 - DNA, 783 bp, Cannabis sativa
accgctcttccgatcttggtagtaaatctagatcctggtaaaatatattctaacaaaaacggggtgagagaaaaccgcgttttgaagcattaattacgtcagagcattaattagccaaaaactgaagagacgcctggtcagcctcacatcgaatcgcgaacagacacacctgacacttgtcacccatccaaaggcaaagactgctcggatgaagtctacacgcaacttcagaagtcccgtacagacttggggggcaactgttatcccaatttctgcactctgacgtgggattgcacgatggtgacacgtggaatcaactctatgtacctgctcgcaagaaatatgccgaacatgacactgcatacattcgctcgaacgaattcctcttagcagggcagtgagcaatccgcacagtatgccaacacttaacaaatttagctttcgcatcgtgagtgaccaaagaaattcctataactttgggatcagatcacggggatgtggaaagctttccgaatcccacgattggtgtattttgtatttactatgcaatctttccacttatatcaattgtaagcaaaagggaaatacttccctcccaagcttatagccctataaatagtgattcatagtcactaggcaagagggtcaaaaacttgtctaagaatctgtattgagagatattattgtaagaggtctaagaaaaggaatcattctccttattcttaagtcaatacaaactatgaggattaggctattaccgaactgctcggggctaaacctcta

SEQ ID NO: 147118 - DNA, 593 bp, Cannabis sativa
tccatttgcgattttgagttcgagtttcggtttgagttcgggtcggagttcgagtcgtggtctgagtttggtttggggtcctgattttagtctatgtccagatcaagctctggttgtgggttcgcgtcctgggtcttagtataggttgggtgcgagtcccaagttccaatcccgatctaagtctagattcagttctgggtctaagtccttggttttgatacttttctgggttcgagtttggatccaggtccgcgtctagctttgggtctgattctatgtttgggtttgagttcgggtccgagtctgtgttcgggtttgtgtccaggtctagccctgatctgggtctaggttcgggtccaggtccaagttggggtcccgagtacgggtccaagtttgtgtctaagttaggatctcggtctagatctaggtccagcagttcgatcccagtctgggtcttagtccgagtcaaggttcatttctggatcgctatctaagtcaaagtctgtgtctgggatggggtcccagatttaggtccaggtgcgggtctcagttctggtacgagtagacgaccgtgtccgggcccgagttccagt

SEQ ID NO: 147119 - DNA, 769 bp, Cannabis sativa
  modified_base (471)..(474): a, c, t, g, unknown or other
tttgttataggggtggaaaaagttaagaagtaatatatgtagtttaacgattttttatatcttttgaactctagactatattcataactccacaagatctctataacacttaggggtggaagaagctattgacatatgtagttcaaattttctgaactctagactatactcaatacacaacagtatctatatgacacacatattttaattagacatgtatatagaataatgaacaaattagcaaattattaaaacttattcttgatcctgttttgttctaattaacttttaactgttgtaatagaaatagataccaataaagttcttggacatagtatcacagtaccttatttgagtgggagaattttaaaattccaagcccatctttatttggatgacactagtgatagattactatgttatgatcatgatagcaactttatataaaactaagaaagtaaatctaaccannnntatggatagaaataacttatcgaattttgaggataagataggagaattttgcaaagtctattcgaatgacttaggcaaaatccctagtcctcatgaaatgttttatggtatctttattgattacttaatcttaagcaagtattttacttttatgttaatactagaatgccatgtcgatgacttaatatagtagaaacttataatttcagactaagacaatatgtcacaacaagatgtctttgaaaaccaatagtaagaggttaaatgtactcttgtgtatgaatttaaccagact

SEQ ID NO: 147120 - DNA, 836 bp, Cannabis sativa
gaaaaccgtaaaaatataaaaatacattctttgaacgtaaaaatataaatattttaaaaaaatagtatcttatgtaattattcctttatttatagggtcaaaagtctcgatagttttattttgcttgcatttaatctcaaaactcaaatttgggcagcaaaatcctcaatactcatgttctgttagcaatttaacatttatgtccattttaagtattaagtgacatgttggactgtccatgtgtgcatttacgtggacacagtgtacacatgtcctaatttcgttagtccacttaaaaaattattttaaaaaattaaaaaattaaaataaaattaatttgaaattaaaaaataatttttctatttttttcttttcaatttttttttttcatttacagctctttcgatcccctagaaaccaccatcacctaactaaaaccaccagcaccacaccaaaaccaccagcacctcaccaaaactaccaccacataaacccaatcaaagctcacccgaaaaagaaaaaaaatgcaaatcacaaaacaccaaaaatatagtttcttaaaccaaaataggtgtttttgcaaatcacaaaacacctagatttggaaaaataaaacaacattttaccgtaatatatgataagagaaatgaggagaggagaggacttacgagaacaccgagggggagagaaccgtcgaggtggttggggcttgtcggagaaccgtcaaggtggctatggtggctgcccaatatttttaaaaattccagatcaagactgaaagagagaggaggtcacgagagcttggggtggtcggagaaccaccgaggtggcttgtg

SEQ ID NO: 147121 - DNA, 589 bp, Cannabis sativa
  modified_base (558)..(562): a, c, t, g, unknown or other
aaaggagtaaaatgtttcagaaaaaagggaaagttgtgccctagacttaccgaaccttttcaaattctcgagaaggttagattagtagcttaatgttaggttgtttttagtattatttttaggttaatttttagtgtgtttttaatttagttctactcttgtttggagaaattttacgctttttatcttttatttttgtagatttaaaataaaagaagattagaaaatatcaaaggaataagatggaaaaaagataaaaatatctcacaaaaagataatatataagatagagaaaattgtgcaaaaaaaaaaaaaaagctgaaacatcaagcctgaatttgactatgttcttattagattttggaaaaagtcaaaacataaaagttctcaacattcttttcttcttctattctgaattaatatgtgtgaaattgatacgatgaacatgagtagctaaacagtacatttgggtctagatggagattgtttgatattaatttttatgatctaattttccctcaacttctatgtattctatttcattcgtacttaattacnnnnnattgcctgatcaccaattaaatgtcta

SEQ ID NO: 147122 - DNA, 595 bp, Cannabis sativa
  modified_base (65)..(70): a, c, t, g, unknown or other
ctaacaaattaaaatcacactaatcaataatttaaagaatcaatttaagaatattaataaataannnnnncatatttataagataaatatggacatcaccagggaaagaatgttttgtcattttgccttctaggaaagattcacaaactggtaattcacctaaggtgacatttttcaatggaccacctttggtttatctgtgaagtctattatagcctatatgaccaagacgtaagtgccatagatatgtttcgtcttcattatcgatcttttactttttgtggtttctaggtttagctaccttaaacagttcgctattaagcgcaaatggttcatctagtctaagaacataaagcccttgttccatagatgcaacacaatttgaatgtcattttgagaaatgatagaacaagaactcgaaaaattcaatttgtattgttgcgactgtaaacaggaaaaagaaatcaagtttctactgaaatttggaataaataagacattgtctaaatccaaatttctattctgaaacttaagttttgcttttcctctagctctaactgataccattttgccattaccaactttaagtttcaac

SEQ ID NO: 147123 - DNA, 532 bp, Cannabis sativa
tagcacattaatataaaattctcaaaaaattagaaaaataaaaacaaaaaattctagagagccacctatacatttgtgtgctttcctttatataaatatatagatttcatatgcatacgccaattagataaaatcattttcaaggaggatattaaatttggtgtgacattattattaaatttgatgtaaaactattttcactctaattatgataccaaaaattacataaaaaaatattctttataaaaaatttaatattatattaattaactaaaattatcataattaactagatgcacactctaaataaaagagtcgcacatgtaatagtcagtttgaactttattttcggcgtattaaattattcttttgaaaatttacaggacgtcttaaataactataatgtacacgagcatgaaaaaaataaactaaaataatctctcgaatgtcaaaacaggtagaagtatatcaatacactatttttttaaaaaatgcattataattttatagatacaattaataatataaatat

SEQ ID NO: 147124 - DNA, 505 bp, Cannabis sativa
ttatgttgaaatgggttttatttatggcacaaaacccaacacttttctcctaagtccctggcggggaagaagaggaagtgtgatgctggacggcctgaacgagctaataaggaggatgagctcattcaacttaagcgcgaggctaagttgaagggaggtgccagagccaagcagtatgctcacgagcctttgaatcctgaagatgaggccgaggatgagcaggcgaccccattgaagaggaagaagaaactcccggccacgcccaggcctgttgaacatgcaattcacattagggagcccatttcacctgttcggccatctcccccctttgccgaaaaagggaaggctgtcatgtctgagataagatcaatgtcaggtgatgatggacttctgagtctctgtggaggctgtcaccttactttttactttactttgtttttgagcttcctgactttcatgccttatgttttctgatggctgttttctaaccatactatttttgttc

SEQ ID NO: 147125 - DNA, 950 bp, Cannabis sativa
aatgacagcaccatatttttgtaaaaagaatggaattaaagtactggaatgtaaattttcctaattaaaatccattacgagaaatagcgtaaatagaactcgaaaaatgcaattgataaaattgtgtgctgtaaacatgaaatactaatcaagtttctactaaaattctaaataaacaaaacattgtctaaaactaaaaatttattctgaaacttgaggcgagcttttcccttaacttggagtgatactaatttgccatttccaactctgagctttaactcccccggatttagataatctcaagtttcaagcagctgtaatgaagaacaaacatggttagtagatccaaaactaacaatccaaatggatttttcgttctctaaaacacatgattcaaaaacaaaagtgttacctacgtttcaattgtctagaagtctgggacatctttcttcctgttaggctatttttagcctactttttggatcactttatatagttgttctccttctttattattatttttttttgaatagaattacactttctctctttggtttcaggtttcacacttggaatatatcaattgatcaaatttcgaaaaacaacaatctatagaatagagaaaattctgtaagaaaataaagctgaaacttcaaacataaatttgactatgttttgatccgatattggaaaatgtcaaaacataaaagttttagatttctttttcttctttcccacgcatcttgaatcaaatcatttggagttggtatgagaaaattatgcatattttactgaaagatgccgaggctatcaaatttacttcagtagtcgtgaccaccattttccgtggtcgcgacccttttccatggtcgcgactatggagcaggcagagagcttgatttttgtattttgcctattgttcgcgactaggctttatgtagtcgcgacta

SEQ ID NO: 147126 - DNA, 664 bp, Cannabis sativa
gatcccagtttttgtaaaatttatttatttaaattttaaaggttaattatttaaagttttaatacgttttccaacaaactcattgattagcaacatattgcacaattaattagtattaaatcacgataacacgcctaatttaatagggtattacacatattgtataaaagtctataaatttgtaattacctattcttttattttggcataacttttgaaaaactttaaatcttcaacctgaaaaaattgtactataaagatgtttagtaatctgttagaactcagcatattaaaaaatttatagaaaaattacagctaaaatttaaaattagtacaactcaactttaagaaaaagttgtatgataagtttgattaaaatactgtaataaatttatttatactaaaatatatttacttatttattatatattattaaaaataaaaatatttgaaataaattaatattataataaaataaataatagttttttttattttatttttaaaaatattttagatattttttagtttcataattttatattaataaactatataaatttagtgtttactatctattctatataaagtgtgcctatataactgaattcttgtttatgagaaattcatgggtaatttttttttaaataattttctattcaaa

SEQ ID NO: 147127 - DNA, 869 bp, Cannabis sativa
  modified_base (720)..(720): a, c, t, g, unknown or other
taaattttattaatatattttaaatttaataagaatttaaaggaaataattataatacatttttttatacattttttttatcaaaaacttattcattaaaatatcttttcttatacaattgtcaatatgattgatcagtcaatgtcatttactttttttttatatatatttagctagatttacttttatatcttaaacttatttatcttatttattttttccacttatttttttttatttttatataaaaaaattaatctattattatgcatagtattggttatagtttggttatatctcataccgtgcttttttattttttacttctatattttttatcacatgtaattaaattattttctaattaccacaattattaattattttcgtcatttacaactcatctcatgatattactattaggggtgttcgcagggtgcggttttcgaccatttttcaaactaacctgcacatgcggtttttctaattttccaaactgcactcgcaccgtaaaactaaaaaatcgcaggaactaccgcaccgcaaaaaatagtgcggtgcggtagtttttgcagtttggactatcacatatacaacaaagtttgagcaacacttgtcaaaaataccataaggattgaaaataaatataaaaaaattacgtttcaataatacaataattagtaggctttgggttagacattcacatattggacctaaatnatataaaaattggtattttataatgtgcggtgtggtgtaattggaaccgatattaattcaaaaccacaaaccgcaccgcccagtttagaaaaaattcaaatcccgaccgcaccgcaaagaatttcaaaccacattttttttttgcggtg

SEQ ID NO: 147128 - DNA, 654 bp, Cannabis sativa
gaggttgaagtagccgcctcggtcccaccataagccacttgggtcgcgcagtacttaaggtacatgtccttagcctcgcccaagtagtcaaagttggcccggggactagccttcaaaaaatcaaaacacatcttgagaccggctgtctccaaggcattgaccttctccttcaacctgtccacttcggttgtaagctcccccaccttggcgtccttctcctccttcatccgaagaagaactgctcgcagagaagtcctctcatcctaaagactgtttacttcagcaaataagatctcgatggtctcctcaaagcggtcagcagcctcgagatccttggttagcacggagatcttcttctcggtagcgaacaacttcttgttggccttgcccaactccaaccgaacagctctagcttcggccttggcttccttagcttccttcatggccaagtctgcatctgccttcaaggtgtcggacagagccacgctcttggaagcaacagaattagcccaggagtaggtgtaagccaacttcagactgacctgcgcaaaggaaaaacttcagtatatggagctaagtgtggaaagttaaagggaagtatcaaaaaagacttaccctggtgaactccttcaggactccgcccaccaacacatc

SEQ ID NO: 147129 - DNA, 743 bp, Cannabis sativa
tcctcagctttagccttgcccttaacaaaaatagcactgtgagtcgacagaagaaaacataaagaataacatagtaatcggatggcatcatcactaactccattgactttgaaagttttacataactccatgaaattcgacaagtgcagattggggtcttcagaggggagtcaaccaaactggattgaagactgcaccatttggagtatggcaggctttatttcaaagttgttgacatctacggtgggtggtcttatacaagactggacccctgttagagctggaagaatgtagtccctcaaactacgaccatttgcttgattttcaacagcacctccataattaccattgttgcctccagtgttaccgccattagtattctcagccatgatttcttctgttttagcagttgctgaaactctttcttgcctcttgtttcttctgtttcttctacaagtcttctcaatttcaagatcaaccggcagtattacactttgtccttgacgtcgcatgcaccccgaatgcctgaaataagacaatctaaaagaaacagattagcaataagcacgaaaaattaaccaaagtagaatttaatctaatttttgataatatcaatttttaaacaatttctcgacaacagcggcaaaaacttgttacgaaaattatgaacaatacgtaagtgcacgtaatcaagtagtaaactcacacgagtgaggtcgaaccacaaggaattgaactgaata

SEQ ID NO: 147130 - DNA, 533 bp, Cannabis sativa
atactgtattgcaaacccaaaaaattaaatttttttctacaagggaaaggataattgatcaaattgtctattgacaatataaagccaagaaattgaaaaaccttttccttgagaaggaaaattaaaagtagcagttgtcaatgagattaacttataaaacaataataagctatatgcgagatgaatacttaacgactcgcattattcaggcatgtattataaacgaggcacaaataagccttgaaaaataatacttaagctgaaaaatgaatagacgatttaactattcataggagcaatcaaaagatattcaaaatagttcctgaagtgaattattcaaaatattttaagtttgctctaaaatatatatttttatacaacggattagaactgctcgcatataacaaggcagattaataactgctcacaaaaaacatggtagattgataactacttgtatatctcaaaaaatgagatcaaagctacattcaactcaaagtatcttaagctaagtcgtgaaaaaaatgttaaaa

SEQ ID NO: 147131 - DNA, 878 bp, Cannabis sativa
  modified_base (817)..(825): a, c, t, g, unknown or other
tggtaatgaagtgagattatgatcttacttagggtaactattaagaatttatttaatgaaataaaataatttttttgggccagacgattttggttaaaaatgtcacgacatttatggaagaattattttgggaatattccggactaggttagaaattttagaatgtcggtttaatggaattagtgaaattaccaaaatgcccctagggttttttttaaaaaaaaattatggaaggggtagattagtctttttcaaattgtgcctttgattttttttaggctgcccattattattattaaaaaaaagaaaatgaaatgaaaatgaaatgagatgaaatgaataaaaccctatttaagaagaaaacttccaagaaaaccaaacttcttcttcctctctctctctcacgtgacctagagctacccaaaacccggggattcatcttaatttccttcatcttttgagcagattggatacccaagttcatcctagaagctttggaggtaagttcttatccttgaggattaaaaatttcactattttaagttggttttggatgacggtttcgggatttcgtggctgtaggtttagttgggttgagatggtgttttttaggtctgttttgaagtgtgtggaagtttgaatcaagtgattttaatggctgtttggattgaatgtatttggttaagcaatttgaccttaattttcatttgagatggtgattttgagcaaattgataaattgtgatgaattagttgttgggttgtcatgtttactatgttatactgttttggaaggtttgagcaggtttggtggaggnnnnnnnnntttttggggtgaaaaaccaaaaatcaccattgctgccaggaaaaaacggcagg

SEQ ID NO: 147132 - DNA, 961 bp, Cannabis sativa
  modified_base (275)..(275): a, c, t, g, unknown or other
actcgcactcggttccagcagatttcgacatatcaccgtcctcccctcactctagctcttaggcatagagctcaaaaacttgcccgactgccggggaaaggccagaatattatccatttgacctccgaggataattttgtgaggtataggctctatcccaaggacttcattcctaagtctgtgacggggaataagaggaaatctggtgctggacggaccgaacgagctcatcaggaaatgaactcattcaactcaagcgtgaagctaagttgaanggaggtgcaagggccaagcattatgcccagaagcccttgaatcctaaagatgaggttgaggaaaagcaggtgactccgctcaagaggaagaagaaacttccgtccccgcccaggccagttgaacatgccattcgcataagggagcccatttcacctactcggccatcccctcccgtgtttggtaaagggaaagttgttatgtctgaaataagaacgatgccaggtgataatggacttttgagtcttgtttgggcagtcaccttgcatactactttgtcttgtttttgagcttcttaactattatgcctcatgtttctgatgtctgttttctctaaccatgttgtttttcgttctgtacagacatgtctcggcagatgcgacgctttgaagaggagaatagacggaagctctagcgcctctcctccggccaagaagtctaaaggcggtgaggggtcctcttcaaaggaaaagaggcttgctggtgaggtcattgatctttccaaggagctaactcctgcaaacccctctaccccaaaagctgcttagtccaaggagtctcggggaggaagcttggacaagtctgaaccactgaagggtgggtctgagctggtcagaagtgaacctgaacaggtgcgggcacctactccaccttttccggtgcttccagaggccaagaagggcaagga

SEQ ID NO: 147133 - DNA, 759 bp, Cannabis sativa
aggatttgaggtggaggattcaataaatttaatgaagttggtagtttgtatacaagcatattgttatgctttgaggcttacaagcaacctgtgtagagaaagaggaagaaatgataattatttatagattgatgagacacgtttaataggactagacgaccttttttcctcttaccttatctctgtcgtccctagctaataacttgggtgaatatatttatagaggtagcttgtcgtgcctcctcaaaataaacctaatctttgtaaaaaaaattaggtaggagttgcttttacatttatgcatttacacctaaatccaaatgtatatttatatcaaattttgtgcgattactattcatatttttatgcacagttatttactattttactttttttgttatcattattttattttatcacacagttttttgtttctctctttttacccatcaacaattttcatttcgttaaaagagagcatctttctattgtaaatgaccttgcccaaaaggttagaagtagaagggtcatgctctccacttcaatgtttttggggagggattgggcctgtgaatccctaatctttatttcttgtctaattgaacttattgttcttttaaaaaaaaaaaaccaattaaagtggaaatttcgagcaccaagttttttgtcaaataataatatatttaagggtaaataccattttggaccttgtgttttgtaaaagttacagattagaccctgtgttttgttaaatgacaa

SEQ ID NO: 147134 - DNA, 846 bp, Cannabis sativa
ccttaagaagtagtgtagtgtaatatggtacttgttttatcaatttttttttttttttttgtaatttaatatatattgaaggctaataatgtaatttaataagtgaaaccctaaaaacattttcatttttttatataggttatagatattgttatcccaatttttgcactctcacatggcatcacatgttggtgacacgtggaattgattctccatacctgcccgaaggagatgttccgagcagaacaccgcatatacctgcacggacaaggtcctcctagtcgaacagtgacaatctgaacagcatatcaacacttagcaatttcagcatttgcatcgtgaagcacaagataattcctataaatctggaatcgtatcacagagatatggcaaggtgtccaaatcccacaatttgtgcattcaatatatgtaatatgtattcttaacaattatagatattgtaagtaaaagggaaatcttccctcaaacatgtatccctataaatagtgatccattctcactagaaaaggggtcaagagaattacttgagagagatctaagagagcatactcagagattttattgtaagagctttaaaagaggaatcactgtattctttgttcttaagtcaacaaaaattaaggggagtaggctattaccgaactgctcggggccgaacctctttaaaaaactttgtgttctttatatatcttttcatattgtacctgaattatatcctttatcgcttaatattaagactcactatcatgttggtatttatgccctaaataaaaatctatttcaatgtaatccgtattattcaatatcaataaaggaacagaagta

SEQ ID NO: 147135 - DNA, 559 bp, Cannabis sativa
tccttaacggggatgggaacaggggagcactccctgccaattccccgccccgtgtgcatccctatgaccgtgtaataagccatgtcctccatctctactttttctcatggtttcttttcagctaataatttctcatctccaagaactttggagaccttttggtgcactaggatacctttcaaactttctctctatagcgcaaagtcccctgttccattgaacttctccaattcgaatctcgcccttgacaatgttaattatttcttgaagaattacagcgaaaaaaatcttgattgattaccaagctctaatttgtggaaaaattacaagtaaagtacagaatcaaaccaactagaacttttatcaacaaacaattagcaaatgagaagattaacaaataacacataacaatcatagataaaatagggatgaacagagtattaaaaaattagaaacaattaaagcaataaataataaaatcaacaccaagatatatactggttcaagttttatagattgatgtgatctatggctatactccagttttggaacaccatca

SEQ ID NO: 147136 - DNA, 518 bp, Cannabis sativa
acaaacaaggaattgagtaaaaaatgataatcgaacatacagtaagaaccttcaggataagacttgcagtaagatacaaaacgagtaacttagactaacacttagtctttaatattactttcaaggcctagtgacattatcatcctcatgccttgttcagctaaccttggaaattaaaagtgtcgattattgagttaacacttacccctagtcttcaagaattctcttaagtgttcataggaggctagcttttagggtgtcttttggatgccttgtgaatttctttacttgtcacacactccaagacatcacctctatatataaaaggcttctcttcattcgacttcatatcacctcttcatcattggcctagtggagatttgctagcctccttttcaaaaggtcccaacactactacaaaaagtataattctcgtcgatttttaagtgtcatttaaagtatttacgtcggtttaaaaaccgacgtatataccgtagttacaaatagttttttattag

SEQ ID NO: 147137 - DNA, 1021 bp, Cannabis sativa
  modified_base (437)..(440): a, c, t, g, unknown or other
ttcatgcatgatccaagtcaagttcattacggagcagccaagcgaatcctcagatacttgcaaggaacaaaattctacggaatatggtacagagttataagtgactaaaaatttgttggctacacagatagtgactgggcaggatctatagatgacatgaagagcacgtctggatatgccttcacacttggatcaggaatattttcttgggcatcaaagaaacaaacaactattgcacaatcatcagatgaagcagagtacatcgcagcagcaatgactataagccaagcgatatggctcaaaagaatacttgaagacatgggagaattaccagaacaagctacaaagatctattgcgacatcaaatcagctacaggaatggcaaaaaatccagtatttctatacagaccgcttaattttaatttggaaattagcannnnattagggtttaattatgaaatttatttatttattttaaattattaatttatagtgatttatttgaattcagaatgcatgttatatgtcatatatagaaatctcataatttttgcatactcagtgcccgacaacattggaacgcggtgattggctaatagaatcacatcctagtatttttagtaaagcggaacaataaagttagacattgggaatgtcgggaatagtcgagaattttagaattttccaaacccttagtggttatttatgtttttagggtggaagggcaaaatgatcattttgcctaagtttgagttttgtcttatgtgggtcttattaagcttattaatttgattttcttgatttatgttggctagcaaattaataaaagaaatttcctttactcatttattcaaaaataagaaaaattcatgaaaaagactctctctctctcaactctctccttctctctctcgaaattcaagctaaattcagcaggtttttggtggtctcaagctttaggtaagcctcttgtaactccttcatagttttcttgagtttgaagtgttggaattattttacc

SEQ ID NO: 147138 - DNA, 554 bp, Cannabis sativa
  modified_base (488)..(488): a, c, t, g, unknown or other
taggggattagggtttcataagctttttgggtagccataagctttttgggtagcgtgcctaattatttagggcgttacagtgtctgaaggagggacacgccgagcattcaaataaaaattttttgagatctgggcgcgcagcctcgtcttgtccaaaggtctgtgcgtgcggtgcacccaatttctacaccattgaaccccgattttcaaactttcataattttttcaatttttatcagaatcgagttctgtaaaaaataaaattacttaatttttcacaaggaatccagataaaatatttttagaatgaaaaataaattattttcatggaaaaatttcatgattcacataacaacatcaagtaacacataaaccgacatgaacacatccaaatcaacacacaaacaatatttatcgttttaaattcatatttcatgaaagtaaataattcatatttatcgttttattgggaatattttaccaggatntagatttactaacaagtacgttgattaacatcctaaatatgaactctctaaaacaatgaaataaac

SEQ ID NO: 147139 - DNA, 580 bp, Cannabis sativa
ttaaacacgtctttaattgtgaaatctggagatgtctcaacagaaacttgattgtagtgatcccaatggtgagctggaaccactcttctttccgaggtcgacaagatatgtcttacggcgatcgtgggtatacaggaattttctaacttgccagggttatgagcctcactcttattagttggatggaactataggaagcttccttatagcgagatggtcatctcacattcttaatcttcgagctgatctgacttttacacttagtttgcttattgcaagctaaggtatgtgttacttttctctggtgcctcgctattctcctttagcgacatatgatttcttgttaatacactaagtgccagttcgtacattaattcctcgcctaagaccttacagtcaccgggttgtaagtatactctgatacttacgcaattaatgagttattccataaaaagatatggcgccgattcacattccttgtaccttgacacgtgtcctctagccaaatttcggatataacaattgctactaaaaaagttcttttttttagtaaaaagagctttttaataattatagaggg

SEQ ID NO: 147140 - DNA, 574 bp, Cannabis sativa
  modified_base (33)..(33): a, c, t, g, unknown or other
  modified_base (210)..(213): a, c, t, g, unknown or other
  modified_base (260)..(288): a, c, t, g, unknown or other
tctctctcttcaatttcgaaccctatagtgatngagtacatgcccacacatagtaagttggtactcaatcatagtgtgtaagactgtgaataatccatttaagtgaaggagaatcaagctcaaatcttggttatactctgctacagaaatgatacaaaggttagagatctgagcagaaggagtcatttaattccactgcaaccaatgtannnnttcttaaactttatatgtgttaaaattttattgttttagaaattcannnnnnnnnnnnnnnnnnnnnnnnnnnnnagtaaatctagatcttggtaaataatccccaacattaatcaggtaataagttagattaggattctactaattaagttcacataaattttaaattcactataagtgagtaaataagcgtaatttataaattacagagatttatataacatgtgtgaatgtaatatgagctatatatggaataaaaatatttctaggttcggtgaccctagagacccgattggaggccaaaaatgtcacaatagttttagttaaaaatattgatgggattattgggataagttgattt

SEQ ID NO: 147141 - DNA, 692 bp, Cannabis sativa
ttgataaaattgtatattaaatatgtacaaaaataattatattatatatatagtgtataatatatatgttcagtcggttctcggtttaatcagttagtttgccattgacactaaaacctatcgtgtaaaggcagttttaaccgaaagtggtttttttcaatttttggttttttcagtgttggttttttcggtgttcggacggtcggtgtactcggtttggtcagtttcttagattttttgctcacctctattctcgtggtgttgtggtggttctatccgtgggtgtggaagatggaagctataaaatacatttcttcttccttctttatagttattttgtggttacttttttattttggttcttctaaaaatacatttgacgagctcactagaaaattttttttgaggtgtgtggttcttttatgcttttttaagtggttatatctgcttattgttttacatttgtttttgtgttgtgtttagtagttttttttgttctgattttttaagattaggcttgcaaatataactgttattgcattgggtggttctcaccagaattaatggttgttttccgattgttctggtgttcctgtggtggttctgtccattagtgtggaagatggaggcctctttttttttttggtgtttacagtataaaagaaaaaaattggccaagacaatataaaagt

SEQ ID NO: 147142 - DNA, 519 bp, Cannabis sativa
gaagcggggcggcattgcaaagtagttgggtcttccacaccgacattcattcttgtgattagcgtgttcaattgttgcacctgctgctcatcaaaaatgctcctttcggccatgtaattttgaatgtgtatgttctgctgaatcagatgattcagctgatcatgcgtgtatttcatggctgggtcaagaggcccagcaatgcgtggtggtacaatatcttcatgatcctctcgttcttccacaggaggatctctctgagttggcggttgaccatgagggtgcggtggtttgaatcgaagcaccgtggacaggaagatactgcgttgtggcgctgcctttgtatcataggagtattgcggtactccatgtgcctcacacaaggtagtgacaatatcagcaagcccggcttcacccccacaagatccctcaatcatcatatcaaaagttactctaattatgtcccccacattcaggttgtaacccttcataattgcttaaacaaatttaagcgtgtcgatc

SEQ ID NO: 147143 - DNA, 569 bp, Cannabis sativa
gacaatattgtgcacgacgacactattagctacaatattattaacttttttttagttttcttatcatatttagttattttattttgttaggaaatttttgttttgcacattagagagttttttttttcttctttttttcattacttattagtttagttctttcatcaaaacgagagttttgatttcgttatcaattttgtgtttacttatattatttatttatttagtaatttatggatttttttgttttatttaattatatatgaagttgttctttagagaaaaatttgtttttattattaagaattgcattatgtaaactgtattatgtaatttgttttatttagtaatttgttttgattgtttgatccttcaaattcaaaagtatattttagagaaccttttggtagccggttgtttagagtcatagcagaaattgaattttacattgcagtttcatagtatttgttatgtgcattagagatgtgggttttttattattattaatggtatattgactatattccccattcaatgcttatctaactttaatctcccttctcaacccg

SEQ ID NO: 147144 - DNA, 1189 bp, Cannabis sativa
  modified_base (393)..(403): a, c, t, g, unknown or other
agtaatcccggttaggggattagaggtttcataataattatttagggcgttacagtgcatgtggcgcctccctaatgtctaaattaagacaaaggatgtgcctttttgtcctaacaacttgtctttttcctatttaattaatttgaaaaaataaattatttattacaaaaataaaaattactattttgataatgcaaaattaatttttttgaacttacatatacaacttttatctcacctcttgtcagtgtttcaaggtgacgatttgaggaccacagacctataattctaagctctaataaactaaatttatttattgaatctcatcaatcaaataatcatatttattaattccatgattactccattataaatatagaattgaactcttannnnnnnnnnnattatatttactgagttttactgtagtattcattgatataatcaattctagtgattaattctcctaatgtcaatttgtaagtagttttggtcaaattactattttaccattctaattacttctttatcctttagtattgttaattcactagtgaaagtataaattagatccaatttaaatttgtgcacaattttttcattttagaattaacacttaaagggaaccaacattcgatccgttaggaaagtcgggattccataactgtagatcatatttccagccatccacattattagattcccaaaacaaaagttgtaagaatcatcttctctgagaaactttaacaaatgagtcaaagaaactaataacatgaacaggagttcattattactcaggatttaggccgatccactattaatcatcattatgatatgaattaggtttttatagtaaacgataagtttgataatgacaactttattcatattgatccatgtcatatataatatgtattatatacaataccttcacttaagagcatctccaatggtaaaactttacagaatgcttggtgaggtggacatattatgtggtaaaatattgagatactataccattggagagaagaggatgccattatagaaatttgtatggatgctatgttgtagctacaatgctattcattattttttaataaaaaattgaagctaaaaaattattgtaataaaaaattaggatatattaaataacaatgtatgagatcataattataacatttttaaagag

SEQ ID NO: 147145 - DNA, 836 bp, Cannabis sativa
  modified_base (297)..(301): a, c, t, g, unknown or other
aggtcccggtctgggtccaagtcttggtatgggttctagtctgagtttgggcttaggtttgggtcctgctacagtcccatgtccgagttctagtcccaatcttggtccaattccggttccgggtctgggatcaggtcagacctgaacctaggacccgatgttagacccaaactcggaccttgacatggatctagatacgaacctggactcgaacccataccctaacccatacccagaccgtgatcggaccaggactagaactagaactcagacatgggactgtaacaggacccaaannnnnacccaaactcagaccagaacccatatcgagacttggacccagattgggacctgtgtcctgggacctaaaccaagaccgggacctggacctgaagccaaaactagaccgaaaaaccagtgctgaaccataaccaagaccctgacagggatcaggacgtggacccagacccaagcctggactcggaccagcactcagacctcgacccagacccgaacccaaacccgaaccaagaaacgaaatcgaaatcggaactagtagtaggacccaaacccatacatggaaccggacttgaacttaggacccgggtctcggaacccagacccaaatcggaacccgagactcagacccggacctggatctggacttgaacccgtgactagaaccaagatttggacctggaccaggatcaaaaacacgaacccgaactcagactaggacttgaaccccgactaggtcctagactcggaccgagacctagcacccgaacctggatgggggacctggaccaggaactcgggcttcggaactagcaccg

SEQ ID NO: 147146 - DNA, 850 bp, Cannabis sativa
agatcttttaggccttataaacatgttatctaatcatctctgaattagactaacatgtaatcagcattgagtaataatctaaatgtcacaaaagctatgtgaatactttcgtttcatatcaaaacctagtttatccaattttagcattcccaattctcacttttcaaattttgaattggaatcataaagcatgcaaaaggtgatcaattttaaacatgtaattaaacacaaatatagataaatttcacaatcaagaaaggagaaatagcaattatctattaactaaagataatgtcaatcaacattcatcatctccccaaataggagtttagctcataaaatccataataacatccataatcaaatctaaaacagaaattaacatagaaatcaagagtttaagaaagaattagttggtgattgcgctttggatcgtcacaattgcttcctctcatcctttcacttttcaggtccaacttctgattcttttcgttctaaaacacgagtcctttaaatagaaattagggttgctacctctgaatggcgaaaatccaaaactatccgaaattctcgtgttttgcccatagtcgcgaccataggcaaaaaccaaaaatcgtgctttctgccaaacctcatagtcgcgactatagaaaagggtcgcgaccatggatgtggtggtcatgactattgtagggtttttatcagcttcaacagatttttctcctatttgccccctcttttcaacaattgatagaattgaaactctaatgcctcggggatctgaaacaaggaaaatcaagcgtaaaaccattctaaaagataattgttgcccctgattttgcctaatata

SEQ ID NO: 147147 - DNA, 586 bp, Cannabis sativa
aacctcttccatatcaatatatattccatatgcataaagtaaggaaaataataagagcattctaattgagtttatgatgagagttatatttttaaagtgaatcacctctgatcaagtcaaatatgtatgaagtaaaaaaaaactaaaataaaaacctatcaataatactattagaaacaataagacatgcttaaaaaaaaggagaaaataatagtttatgcggtatttttacttattatgtatatacaaattaagcaagcacatattagtgtaattattttatttaaactaaattacattatttcaatatgaaaaacatagagaactcctctactggagagcaaaatgaaaaaatattcaataaatttttatatattacatgattgcaacatccaaaatttatacatcaaatatccaaaattattaaacaaaatcccctatctataccaaaacatatataacaatataaactcatcttacttttaacatttaccattattatcttcatacttgctagctccaattagttagaaagtgacctccaccaaagacatactaattaccaaaagaagaattcttatctctg

SEQ ID NO: 147148 - DNA, 556 bp, Cannabis sativa
ataatacttctttctttgttttttttaattttatcccttttttttttcctttttctttttcaaacttgtaagttttacctatatattgtaaaatataattacaaaccaactctaatttttctaaaaatataaactcttttttttctctctctttttcattttcttttcttcaatttaagtgaaacagaaaaatcattacaagtttttttaaatggttatgtttaacaaaactatttttaaataaatacaattttagttaaatataaaatgttgtttttataataattattattaagtatttatacacaataatataaatttgttttaatattaaaatgtaatttcattaaattaggttgatttaaaaattttgttcttatttttaataactaatatttattcatatttagtcaaattaattcttataattccttacaaaaaaaaaatatatagttttattttattttaattatcttatacaaaataataaaaaaaaaatattacatccactcaattgctactcgtaggatgcacgtggctaaacactagtgtatat

SEQ ID NO: 147149 - DNA, 547 bp, Cannabis sativa
  modified_base (50)..(52): a, c, t, g, unknown or other
tgagacaaaataggagaaggaccccaaacatcagaatgaactaactcaannngaacactagcatgtttattgactcaaggactcaagctgacacaatgatgtttggctaaccaacatgactcacagtctaatgaagacaacttactatattggggacaaattttcttgagcaaaggacgggatggatgacccaaacgacaatgagcctcaaaagcgaaagcaacgctcgaacaagcaatagaggttggtggaagaaggtcaagaacatacaagccaccagattcatgtcctttaccaattcttcttcgtcataagatcatgaaacaaacaatgatcaggaaagaatgagatgaaaaaatttagattacgagtgagttgaccaacataaagcaaattaaaggaaaaagtgagaaaagaggtaaatgtaagattgatgacaaagtgagaaaaggtgtaggaataacagtgccagatccaagaacagaagatggtgatccatcagctaaggtaacaatagacgtgggactctgagactgaaaagttgaaa

SEQ ID NO: 147150 - DNA, 773 bp, Cannabis sativa
  modified_base (126)..(128): a, c, t, g, unknown or other
  modified_base (303)..(307): a, c, t, g, unknown or other
tgaagtattttattgtgaaactagttttgtttttaatttatatttcagtgttttaggaattgatttcttctttgcttttaattttaatcggtgagttattgcatgttacttgtttgtattcattannntatataaccggttctattttagttttaacccgtttgagttctttcgtgttatttgtttttattcattataacactattatagaactagttctattttaattataacttgtttgatttattttatgctatttatatttatttattatgttacagaactggttatatttcaattatnnnnngtttgagttattagtttttattcgtataattgattatatttttagttatatctgagacatttacttctggtgacttttccaacgacgttgacttttccggtgacgatgacttttccaacaacttttctggcgactttttcggcgacttttccgacgactttctagtgccggcgaattttctggcaaaacttattgttattttacaaatatgggattttctactttttttacaaaaatgtcataaaaaaaccatataaatgtaaaaaaaaataaaaataaaaattcataacccttttgtgttatttatttatgccataaaaaagtaaactatacccttatgttcccatatttatgaaaattccccattaaaaaaatgggccttttcatttttgcacttcaaaacaattttttttttcttgcatttttacggaattctacatagaatctcctattgcaactagcgctg

SEQ ID NO: 147151 - DNA, 614 bp, Cannabis sativa
aaatattcccaataactggcctcagagccatggtaatgattcactttcatgaaatatggatttaaaacgatgaatattatttgtgcattgatatggatgtgttcatgttggtttatgtgttatttgatgattgaatgtgttttacgaaaattttccatgaaaataattttattttcgttctgaaattattttatttggatgacttgtgaaaaattaagcaatttttatttttacgggactcaattccgataaaaaacaaagaagatatgggaatttgaaaatcgtggtccattgggtgtcaagggtggtgctcatgcgcaccagaccctcggacaaaaagacccagtgcgtgtggaattcagacattcccaatctaaagatacggtcgagtgcctcactcagacaggagaggctgcaatactcgcacgctgatgctgcacgacgctgagcaaccttggtaggacaccttgcacttgaccctcgtgtgcgcacgtaataggctgcgtgcagcttgttgcacgcccaatcctgggcatcaccccaaaaatttgatttttgtaggattttttcacaaattttgaattttccttttttcaaaccctaaaatcaaaata

SEQ ID NO: 147152 - DNA, 1137 bp, Cannabis sativa
  modified_base (565)..(565): a, c, t, g, unknown or other
atatttcaatcgttataaattacttgtcgcttactaaattagactcactgtcattggctaaagcgagatcaacattttggtacttttcttgagagcagaatcaagaatcgctcttcattctaaatttaaccacaagtacgatggtggtacagactcgtaggggcctggttgattcggtaaatccataggaggtggatcttgcattgcagaacctaggaaacacaagggttctaccagctgttaatcccgaacaaccatcaaacacaggccatggtgtgacgactcctgtggatgaaatcgtgcctggtgtgtaagagactgggaataccagttcagcacccagccaggacattcataacacagctgttccgcctgctaccaacgctcgaacgaccattggagatgatactgagatccaaaatcttcgttctgctcttggactcatgcagggtcataccaacaccctacatcatgatcaggaggaactccatgctgcggtaaatctcgcatttcgaagagcagaggcgcatgtttttcgagaggagagacaaagagatggaagcgntaagggctcatcatgcagagattgacaatcatagtcggtaagctactgtgttgatacgaaaagcctaccaaactgtcgggcagcaacccccgaatgtcatccccctgggtgaaatagacgaagatccaacgatgaatacttcccagactataaatggtcagccgccaaatcttcggtcacaggttccgcctatgggccaagcagtgggtgggcagaccttgtctagtagttcatcaggagaagtcatacttgatagtgctaaccaggctaacggtgccactccacccgtcaactaagcaaatcaatcactgagacagccaggcgcttccgtattcgataggttggggacgactcatgatctcagaaacgatctgaatagaaggagaggagtagacgatcaacttggcacaccgatcgtacaacctagaacccatgctcaaattatcgcccagaaagatattgacgtgactcatatcggccaaaatgtcaaacaggttagtccagatgtgcaggcaaacttagacgaactaaagaatatgttccaaggcatggccggacagagaaacaatgat

SEQ ID NO: 147153 - DNA, 914 bp, Cannabis sativa
tttactcttaggggtggagcagttatttggagaagtgtcaagcaatccacaatatttgactctaccatggaggccaaatgcatagctaccgctgaggctattaaggaacttgtttggctaagaaagttgtttgtttggctaagaaagttgttcacagaacttggtgttgttcctggaatggaaaaaccactaggtttaccttgtgacaatgctagggctatagcaaacagtaaagatcctcgaagccacaagaggagtaaacacattgagagtaaataccacatcatcagagaatatgtgggaagaggggacgtactggtggaaaaggttgatactgaagacaacttacttgatctattcaccaagattttgacagtaactatatttgaaaagcagagagagaatctaggattaattgaaatgtactaattgttttatgttagtgcaagtgggagttaattggattttgtgtcctaactaaaactctatttcaatgtattcttgaatattcatttaccaataaagaaacatatttatttcattacttgtttaatgtattatttggttcacacgtttatttcctagtcaaatctttgatttataaattcgttaaaattcttatcacattgatattcttaattactgtattgtcaacatagtagaaagcaatcaagattatgtgattaaataaattcctacaatttataaatacagagggtttcactgaaatgataatcaataatgtagtttacttacaccttagataagtgctatgtcttttttagggcattggtaaagtaaacttggattggaatatgaagtatacatcggaaggggctgatattgaacttagataagatatcattaacttaccgtaatatgtatctaggtcaatatcacctagttgagcttag

SEQ ID NO: 147154 - DNA, 647 bp, Cannabis sativa
cctccattgatgagagtcttgaagttttgtgaggaagaagaagatgaatagtgatttttgaaatttgggtgaggtttagggatttaggattggatttttagaggagaagagtgttttatgaaggggatgatgatataaaaagatttgggatgaagatttgaggttagatttaatagaaaaggctttttagagagattagatgaaaagaattaggtggagaagaggtggtttcggtgtggaggttagggttgagaatgaggggttttgatttttgaattgtgggaatttgaatttaaatcccgtgattgccatctcgccgcggttagaaatgggctcgccgcggcgagataggcccagaaaaatgtccctctgtaagcactttttagccgcggccacacatcctctcgctgcggccagatgtccgtgaaaaataggtcattctgtaaggaccttatggccgcggcggctgacatctagccgcggccactgggtttttttttcaatactaaattaacaagaaaattaaacaaaatagaaaaagaaagtaacgctaaaacacaaaaatagttcaactaaatcataaagaacacttgggttgcctcccaattagcgctgcctttatcgtcgcacagctagacgttgatcga

SEQ ID NO: 147155 - DNA, 545 bp, Cannabis sativa
gattatgttaaaaagtataactaagcccaccctaaatttaaatcctgggtctgccacttataatgtatttttttatttgacaaaatttattattcaatttttatttgacaaactttttatttgattactattattattattgcatatgttatttattgttcactattatacattatgtaatacaacaatcaatatatattaacaaataaaagtttaagactttccaccaataattacaaactttaaaatttgtatagtataagaattgttccatattagtaaatattaaaaaaatgaactattgtatagaaaaaagataaagaaattcaaattattaaattaatataaaatcttacattaaaaaaaaatcatatcttttgaaaagattgaactcatgttattgtacttgataaagaataattttaccacttacactattcttatattatcgattgtattgattattgtaagattaaataacttgaatattttgtacttttctagctacaattattgtgttaagtagaaaataaaattaattaaaa

SEQ ID NO: 147156 - DNA, 1031 bp, Cannabis sativa
  modified_base (940)..(945): a, c, t, g, unknown or other
tgacacttgtgatagcttactatgttatgatcatgataggaactttagattttaactgagaaagtaaatctgaccattcatatggatagaaacaacttatcaattttttgaggataagataggagaactttgcaaagtctattcgaatgacttaggcaaaatacctaatccttaataaatttttttatggtatctttaatgattccttaattttaagcaagtatttaactttcgtgttaatactagattgctattttgatgacttaatctagaaggaacttacagtttcagactgataatatgtcacaacaagatgtccctgagaaacaatagtaagaggttaaatgtacttctatgtatgaatttaaacagactcctactattgagtgagggccatctaagatgtaatcaaacaaggaacattaggagacagtcaaggaagatctctgaaatcgacctatatgttagatgatagggtgtatattagaatccttatatctacaccaactcataacctatttgagatggtggttactctggggatggaggaattattctagaaggatttaaaaacccatctataataatttaagctccatcagtgaagatacataactttgttgctttcgaaaagcactggaaagttattcaattgaataaagttcttaactgtgttatctctattccaatattggatagaattagagacaagtcttctgtatattcagatgcacttaataagcagtaaagaattcagtatccctagatgagtaatgcatatagtaaatgaagttgcataattttttatgagcacaaaggaagtaatggtggagaaagcagttgcttaccacagacttacagtttcagtaatttgggtttagtcaaatacactacacttaacctggatatcaagacaaattgattgattgaaatgcactannnnnnttatgttagtgcaagtgagagtttgttgggattttatgccctaaataaaacccatcacaatacaatctgatttgttatcaataaaa

SEQ ID NO: 147157 - DNA, 683 bp, Cannabis sativa
  modified_base (45)..(59): a, c, t, g, unknown or other
tatttcagtagactaatataattactgaaataagagctcttccannnnnnnnnnnnnnnccaagctcgaagaaaattattatttcacttctatgtcaatatataagctatagattcagcatctatgattggtgctaccactcaattgtactactatgttctcaagatgtaagtattggaccgatccatttggtcagctttgacgaacaagtcaaagaacataaataacacagttaagctaaccatctcaggattaagatctattgagctaagagatcaactaaatgatgataatattgactttaaaagatataacgctaagtttatgatatcatgtccatattcaatatcggtccaatccgatgtatactacatacacccaataatagcatactgtactaatatcctggaaaggaaataccacttatccaaggtgtaagtaacctttatcgctgattatcacatcaatgtagatctagtgcactgataaatcatgagacttaactttgaagcatataatcacaattactttccactgtgatgatgtcactataattgtgaataactatatgttctagatttgtgagagattatatattaaaccacaatcatgaaaataacatgaacttaaatgacttctaatcttctattgattacaaataagataatattaaaatgagtttt

SEQ ID NO: 147158 - DNA, 617 bp, Cannabis sativa
aaaaccctaaatcttgttttcttgtaagatcattacctaaaatcaccacaaagattatctctacaagatggattaagatcatcactatctatgaattaaggtacactttcactatttggcttcttctccttgaatcaacaaaggtatttagatctatggttatacacttataattatatgtaatatgtttatcgataaaattgaatattgttattgcacattttgtgagtgataaaaaaattaactagtggtatcaagagccacctttaattgattctttgaggatttaaggttcgtgttttaaaaatttggggatttttaaaaatctaaaaattaggttttgttcttccatttatgatttggggttataattttgtgattatttatttggtatttatcttccaaattgttatagttaattgatatgaatctattaaccattcaatttcttgggaaagagaactagttatattcatgcgatgggatctgttatttattttttcttcctagaattaattttatgaagtgattgttatatttataaaacactaaagaaatatataaatcacagatccaaacatattcctataagtgctttaatataaaaaatcctaaat

SEQ ID NO: 147159 - DNA, 604 bp, Cannabis sativa
ccttctgaattgttaaagattgtactggatgattttttgtaaaaaaaattatatttgtacgcttaaagaattttttttacaattttacgggtttctataaaaacaacacaaaaacaacaagaaaactacataaaaataacaggaaaataacatcaaaacaacataaaaataacaaaaaataacatacaaataacaaaaaataacaacattttaataagagtacaacatataaacaccatattctataaataatatcataaaaatcgtaaaaatatttaaaattctgtacaatcgtacttcgtaatttttttgttatttttgtgtatctgtgaaataatttcaataattattcatctatttgaaaacctatttatttaataaaaaaaaaattaaaaaaacatttgaaagaatatagtctacttattatgagcactagtacttgatttatattgagtgtcgactctaaattaaagtgagataagcttgtacttagagtccactcattttaaaggtcaaataaaaagaatatcttttaaaaaaatattattatttttataataaaggctccaatttttttcttataataaaggctccaatttttttc

SEQ ID NO: 147160 - DNA, 659 bp, Cannabis sativa
tctagcaatgccattggtgtaattagaactcgaaactgactttgagaaccaccaggagtcgtcatggtagccttcagtgactctatttgtaattttattgtggcatttttactcctaaatgttgctttctcctccttaaaggttgcattttctcgctcaagaactccagttccctcgaccatctcgcgcatctaggccattattgtggcaagttgttcattgacattggattgttcctgggcaacaaactctccttattctgccatctgaagtgtggtaatgatagattgccttgctcacagtcaatttgtcaaggccccacggtgggcgccaaattttagatgctaagatttacaatgatcggaatgaacgtttgtgggcaccgacaacctggaaaacaaagataaaggatgaccgtgaaaccttgggacactggggtggtgtctgtcgaaggcacttcgacgatcaagtcagtaaacttatggtgcaaagtaaaaataaaaataagaaatgcaaataaatacttcctgtgccaatggttatgcgatgatcgacggtcaaaccttgctcaccagaatgagaaagaatacatcaaatcatcgagaaatgataagtttagtcgtaaaactatagaaagagagtgaatattcgtatatcct

SEQ ID NO: 147161 - DNA, 733 bp, Cannabis sativa
tctacaagcagtattatctcaactagtgcggggaccatgagcctatataatcaagcttccaataagtagttctagaatttacttagattccttgctccactatagattcgaaattacactcttaattatatagaacactctatatgttctaagatataaatacgttattatttatccattgttaattttggggtgtttataaaataatcgatccaatccaatccgcaaagtgcagatatccacacttgtgcagattagattggattaaaaaattaaaaattcacacttgtgcagattagacgttaattgacatgtaaaagtaaccgatccaatccaatccacccatatttacataaaaaaaaaattatacataaaattaatattttaatgtaaaaaaatagcaatttaaaagtctaatacatataatacaattatattttaaaacttaatagattaaatgtatactccattcttatatataattttttttctacatacaatttaaaaataaattaaacatttctttatacattcaactttttttcttcctttaaatttattatttgttattttatttattttaatttatttgttggagacatgaaataacaataatgtactttattttattgctagttatgtgaaaaaatattttttttcataaatattacataatttaatataaaaaaagtaatcaatccataataaacgatccaatccgtacttttgcaga

SEQ ID NO: 147162 - DNA, 580 bp, Cannabis sativa
aaaaaaactcatataaatgtaagaaaaacataaccctatagtgttatttatttatgccataaaaaagtaaactataccctcaattcctatatttattaaaattccccttaagataatctatcccaaatccatctttttattagtgacccaaacccaagccttctaggtaaaataaccaaaacacatatctcaaaaccctaactaaactttgaaaattattattatcttaacatgtgtctaaaaaatcaatgaataattgcataaaatattaatttttgtaaattttttacatttttatgttcaattttatatatatatatataaatatttatggtattctataaaaacacaagaaaataacaaaaaattacatgaaaggaacaagaaaataacatcaaaatagcaacaaaacaacatcaacgcaacaaaaaaaataatatacaaataatataattaacaacaaaataacaagagtaaatcataaaaatatataaaaaaaaactgtattttatgtaaataaaatttaaaaattgtaaaaaatttaaatatttcatacaaattgtatttttataattttttt

SEQ ID NO: 147163 - DNA, 501 bp, Cannabis sativa
tagaaacacaatttttttcttaaataaattaaatcatcgagattattattaattttatttgttagtggagaatgtgacaatagacattataacatttataaaatatatagttttgcctaaagtaaatatgaaatgtgtagagctcgaccatacttaatcatatagctcgactataatgtgtagagctcgaccattataaattatatagctcaactgtatgagtagagctcgactgtatatggtcgagatttctaaagagttcaattgtcattagtaaagtctgactgtttatggtcgagatttgtaaacacttaacaaaagattagtaaattgttcaattatcattagcccaactgtatgtggttgagatttgtaaatactaaacgaaatttacgttatcgttcatctgtaaagtagagctcaactgtataggtcgagatttgtaaacattgaacaaaagattagtaaataactaatcacaaaatactaagggtcccattg

SEQ ID NO: 147164 - DNA, 637 bp, Cannabis sativa
taaaaatgaaaaaaaacaattaaataatcaaaatattaacaaaagcacaaacaggaaaaaaaacagtaaagaaactgaattttacattggtcaacgacaaatcaaaaatcttgcccttcaagtctctaagagttgaattttttgtcacaatggtgttgctccaattcagaatccttggaatcctagatgaaactcttttacagaaagtgtttaccatggcaagacaacattcataaaaccaaacaataaacacctacggacatcccaaagccctataccaaccatcatactagcctcccttctctgccttcctatttttcattataatcccatgctaaattctacctttgaatgaatcaatagtcaattcaaaggattccctaccccaacaatactcatcccaacgatcgttattaacaacatctagatcaaacctagatacttctttatcatgagtattactaagaagaaagcattgaataaaatacaacacagccagtttcaatccaagagactcatccaaaccccacctattatccaaaaaagcatcctcaatagctttgtggtcaatggtttttacaccacggaaacaaatttctaccaactgatttgattcctgtgaaaacaacaacttgtt

SEQ ID NO: 147165 - DNA, 884 bp, Cannabis sativa
  modified_base (846)..(859): a, c, t, g, unknown or other
gtcacctgacctgagtacttttttacttttgtcaaaacctttgagcgtagtccgcccagcaggccattcacttaagagtaaatgttcatttagtacttagcgtgatcatctgacccggtactttattggtagtattttcttaaatgttccccattttaataccgtggtactagaacgagttgcattttttcattacacctacctaatttgtatgctccagattcgagaagtttgagcacttgatatggtccttcccagttaagtctaagtacatctaccgtattgtctttggtgtttaagaatacccttcttaggaccatatctcccacaaagaattttcgagcattcacttgtttgttgaaatatcgaggtactatttgttgatgggccatcaacttcaagtttgcagtagctcatctctcttcgatttcattaagtgattcggccaggagtacatgattagtatcttggttatacatcaatcttctatgggatggtggctcgagttctacagacaccatagcttcatatccgtatgacatagcgaatggtgtctgtctggttgccattttctaagttgtttgatatgacaatagaacttaaggaagctcttctggccaatttccttccccatcttcgagttttttcttcagtgtatctttcaaggtcttgttgactactttaacttgaccattcgcttgaggaagagccagtgtagagaaagttttgatgataccgttgttcgcacaaaagtcattgaaggattggctgtcgaagtgcttgccattgtctgaaactgtcttgtacggcagtccgaacccgtagattatgttcttcacaataaannnnnnnnnnnnnnttgatgtaatggttgcgagtggttc

SEQ ID NO: 147166 - DNA, 632 bp, Cannabis sativa
  modified_base (342)..(345): a, c, t, g, unknown or other
tgttttttatttttttttagagggaggtaggtaaaaaaaaatacctaatattacaattctcttacaccgttactaccacttccgttaacttgtaaatatggttacgtggagagttcaaatacaatgcatttattttttattttatcttaaaacttaatatttttaatatcagaattttctcataataattttcacatgatattagtacttcaattcgataatcatgttccatatactacaccggtttactcagctatggtaatttagtattgcatttctcttattttttttaaaaaaaacaagttgtatttagtttttaatattaagaatattaaattttannnnaaaataaataaatgtaatgcattttggccctccatatgtttatatttatgagttaataacagtataagagaattataacattgggtatttttgctttcaaaaataaatattaagtatttaagtgtataaaatctgaaacattaagtatttataccgtaatttatctttccgtaattatatgctaaattttaacgttaaattttgccaaaataaataaataaataaatgattgtgagagaaaaaaaaaagtgagaacccaatagaatcaatttttccatgcatattaa

SEQ ID NO: 147167 - DNA, 630 bp, Cannabis sativa
ctaagtgttgtaccacacacacctttactacttgtacgtaatgtactctttaaacattatacgatatactaatacactttgtaccactaccgtacaagtattggtagtgtatgaatcacatcaagcatgcaatcacacatacatacattcgcatatatacaatatgttttatgctattcttacctcatttccaaattcaagtgagttggccgacctgaacagaaattctcgtgctagatggatgccctaatcacataacataatcgggtaaatgacacgccaaaaccctaatttgggaaactcaatcctctaacttaaggttttgttattgataactaatgccccaataccctaagcaacaagaaatcacccaaccaaagctctaaaactaacacgaattgatgaaatggatcgcttgggaaacctgttccagaaccggttaaccaattttacaggacctggcaaaccgtttaaccagtttgcaccaggtttccccaagcaatccaaaacctgatcaaaacgtgcctaaaccttaccaaactttccagaacacctatattgacctcaaacaatataatccaagcaataggatccagaaaaacatacaaaatcaaaaagtaccatggatga

SEQ ID NO: 147168 - DNA, 610 bp, Cannabis sativa
tatataatatattatatagttatagaacttattattttgaaaagtggttacttgtcatatttttgaaatatgataaaataatattttgtaaaaaattattataagtctgtaactatattattagctattttataaaatattattatttttaaaactaaactaatttttaaaagtagaattatagttataggtggttacaataatttattattaaacattattaaaatattatttttcaattaatctaaatgcacatttttcttgtctagttagttaggatattttaatgttttaatataaatcttaactatattttaattttagaaatgaatactttataattaattgaaatatttatagaatttgattatttaattataactaattgaaaataaatatagtttaaatttaatttatttcaaattaatttaattaaattagaaattatatttctaattacatggtggtggtacatggagtatggtgttgaattcttaaagctatatgaatggaaaccaggagagataacaagaagagtttttgaagagtagagatgtcctaatgtagtttatttcttttatttcaaaggttgtaatttgaaaaatacgca

SEQ ID NO: 147169 - DNA, 713 bp, Cannabis sativa
aaagaatttttctaaggtttcataaagtaactcatcttcaaaaaaatttgtgcataacaataaaagagttgttcaatgtagagaatatgatggttttggtcacatacaatctgaatgttctaataatttgaaaaagaataaaaatagtttgaatgctacttggagtgacaataattatgaaagtagtgatgatgaattagttgctttaacatctgttctttctagcatgtctcatcttttacaaaaaaaatagaaaccttgtttgcctaaacaacactgtttcaaataataaaggttctaacgatgttatagaatatgaatctaatgaatctgaattggacaaagattctttggcagaatcctacaagttaatgtatggtaagtggttggaggtttgttctaaaaacaagttgatgtcaaagactatcataagtttgactaagaaaaataaagatcttgaatccaaatgcaaaaattttgaaaatgatcttgagtttgaaaatcaagaaaatgctaggcttttaaaagattttgagtctaaagaagaatgtgaaaatgctcaatccaggttctttaatttttaaggaggtccaaaattctagacaaagaagtcatgctatgttggggtttgctgaatctcaatcatttgtgtaaaatcaatttgtcaaagctaaaagttcatcatttatctgctctgacccttcgttgcaagt

SEQ ID NO: 147170 - DNA, 530 bp, Cannabis sativa
ttcatgagcaactaagtttcgatttcacagagactttcaaccctgttgtcaaaccagtgacagtcaaaattgctctgtctcttgctttggcaaagggctgatgcattcaacagctggatattaaataatgcatttttaaatggtgatttgaaggaagaggtttacatgtcacaacccctggctttgaattgcctgatgctcctcatctggtatgcaaacaaaataaggctatatgtggattgaaacaggctccaaaagcatggttcaagaaattgcagtattgtttaatatcttttggatttgtttcctctaaatttgattacaatctcttcattcaacatacatccaagtatgtgattctcatcttggtgtatgttgatgatataatcatcactagtagtgatgctgaacatgtttcttcactgattcaggctctagacaacaaattttctctcaaaaatcttggtagcctccattatttccttggtatagaagttcaacacactgattctggcctgcatctttctcaa

SEQ ID NO: 147171 - DNA, 957 bp, Cannabis sativa
  modified_base (31)..(39): a, c, t, g, unknown or other
  modified_base (520)..(522): a, c, t, g, unknown or other
ggccttgtgtgagagatgggggccaatagannnnnnnnngacatactgaacccagctccccctcacataaactaccccaactgtgaagacccatttttctgattttgataactatactaggttaattaacattttcccccaagtcagagtgcaaaaattgggataacattttcccccaagtctgtatgggacttctgaagttttgtgtagacttcatccaagctgcttctgcctttggatggggacacgtgtcgggcgcgtctgtccaagactcgatgtgaggctaactggatgtccctttggttttcggctagttaatgttctgacaattaatattttgaaatctgatttctctcaccacggttgacagctgcacttgattatttttgatttcccatattcgctttttagagagacacgaggcgtccgaggtcttttgaaatgattacctcttcttgtgacttacctataaataccaaagagcattgccacataaactcattttcaccatctttctttnnnagtgagttcagagccaaaagagaggtttttcttgtttcaagtttgctgaagtgccttcatcgaaactggtcgttggtttgtcgttgcttgaatccagacatctgatccttgagtaagttctcgatttcctttattcttatttttgcatgtgtatttttccgaatgcaccttcgactttgtcgtagaacattcataggaaaccttaggtttagaaactctacaattcctctatgtcatggtttcatgtgattttacagtccataatgcttgctttctgaactgcataatgtcgttctttcatcttgcttattctaagcttcatgaaatttttgcccttacttgaggaaatttcaaacttcctgagttttgacttttctttgaacatttttgttctttaatctgttgagtactcctggtcggcatattttcttgttt

SEQ ID NO: 147172 - DNA, 844 bp, Cannabis sativa
ggcataaaacccaacagttatctgccgtccaactggacatacattgttcggccaggtgttgctgacacccttcctattggccgtccaagttcagggaacttcggcattcccattgttgtacttgttgttacagttgctcgtcattcgcaccagtatctgtccagcagtaggatgatggctcgaacaaaacaagcgatgcggaaggtcaacgaatcttttctgacagtttcctttttgtccttcttcaattagtttagattttgatgtttttccctgtatagaccggtttgaagatggcttatgctaattcccgagctaagtcgcctgttgctaagaacgctgccatttccaacacaatgcggacaaaagtggacttggccaagaaggacgtcgaggaagccagggttcaacttagggctatctggatggagttgggagaggtcaataagaaacttcttgctgctgagaacaaggtggtcgaactaaccaaggatttgcaagccatgccatccagcgaacagctcgaagctgatattgcctctttatcaaaggaagtaaccagtctttcaagaagagagggaggttcttcggactcttttccgcaggttggaagaagagaagaaagccaaggaggaggaacttggagccaaggttgagaagtatatgttagaggtcgagcaacagacatccaaagtatagattattggggggaaagtgaatgccctagagatagttggtctcaagattttttatgacttttggaaggccaatcccaaggaaaactttgattacttgggcgattacaaagacatgtttctcgagtactgcactgctcaggcggcct

SEQ ID NO: 147173 - DNA, 801 bp, Cannabis sativa
aaaacccatcccaccagagttcttatttttgcatagtttcctccaactaaaccagcccacacctttcttactactcgaactccaccaatacttagacataatgctttccagatgtggacaagttttcagtggcaacaagaacacagacatagcaaaacttggcaaagcttgcgctacggtttttattaaaacttcacgcccaacggcaaacaaaaaaccaccctcccagctttgaatgcgcttctgcattttgtcttttaaaaaccccaaaatggcatccttatttcttcccatgacacaagggaggccaagataagtactatgttcatcagcaagtctcattctaaggatcccacacaatcggtctcgagtagcaataggaacattagtactgaagaaaacagaggacttactgaaattaacttgttgaccagaagcgatctcaaatagctgaagcagatgtaatatattcgaagcctctctatcatttgcacgacaatagatataactatcatctgcagaaagcatatgagatataaccggagccccattagcaaccttgcaacctttaagcctaccatcccgctcgaacttctgtatcaaagatgagaagccctcagcacagataagaaagaaataaggtgatagaggatcaccttgtctaatacccctctcagaaacaatcggacccaactcatgtccgccatgaattattctatacctcacagagctaaccatagcaataacaagatcaatgaaacgcaaatcaaatcccactttactcatcatagctcgaagaaa

SEQ ID NO: 147174 - DNA, 1350 bp, Cannabis sativa
  modified_base (283)..(283): a, c, t, g, unknown or other
  modified_base (733)..(741): a, c, t, g, unknown or other
  modified_base (1171)..(1171): a, c, t, g, unknown or other
atcaaattttttcataatgcattatttttatatcccgatcatataaagttgatgtcatcattgtagttcctattgatatcctcaaatttctaattaaaataaattcatattatgcaaaaaagaagaaacattataaacatattaaatgaaataaaaatcaatttttccatcttcttccagccatattatctttacagattaacaataaacttttttttgtaaggagattaactataaactttgattctcaattcaaatgctatttttcaattctattttcatntatttaaaattctcattccataaactttctactaatatttttcaatcaatgaaaccgaaaggcaaactttaattcccgtaagaaaaattaaactttcaatctcaataatcaatataaacaacatcaaatttcaagttctcaaaatctatgaaaataaataaataaattaataaaaaacagatctcataaacacaaactcaaacattagaactccagtaaaacattaaaactcaaacattaaaatcacacacaataaaattcgaacccagaacttaacacacacattagaataaaaattaaaccataaatgagaatttatgttactattttcgaatttcggtatttattagcaataaatttaatattttaagtatttatatcacaaaatttttaatagtaagttaaaattttaatataattttatcaagtaattattattaattaaaatannnnnnnnntttttataaataatttaaaatattttatatatccaccgcgaagcgagggatgtttactagtcttcttctattttaaatctgcaaaaataaaagataacaagcataaaattactccaaacacgagtaaaactaaattaaaaatatactaaaattaatctaattttaatactaaaataacctaacagcttcaaacactaccttcaacaatatctcacacctaccacttcagttattgggccttattatacccattgattgttcacttgtatacccaattagtggacttagaacatagataaactctacgggcctgggtcaatctgagccacaatgcatgctgcctataaataaggaatggtatttaccattaaaagggttgaaaaacttacaaaaatactgttttttccccaaattttacaataatactgcnacacggcaataatttcttttttactattcaggtcccttttttttttctttcatactgttcaggtgcaatatatttacttttatactgtgaacagtaacaaatcacaaacggaacctccttcgtggttggggacggacaaatcaacaccgaaatcatggaaactgttgggttttgtgccc

SEQ ID NO: 147175 - DNA, 653 bp, Cannabis sativa
ttcttatcttaaatgccttgtacggttttcattcaaacttaatataattgtatttgcttgcattattattcacaatgtaaacaactatattttgatcaaatatacagtacttttgagattttccattgctcgtaatcttcttgtttaagtagttagtaatctaccaaactttatgatttttgagcggttgacaattctacctcgcaattgcaattataatctgccttgagaaaatttaaatatactttaaggattttatcactttgtatatttttaatttgctcgcatgaatagttatattatctatccatgttctaggtttaagtacttttatcaaggcgtcgtgatgcctcatttagtactttcctagctcgcgagaaccattactattcagttttatacgcgagttataacttttgattttccgctcccgtcagacaggttataaatcaaaaattatagttgtttgatccattattcgtcaaaaaggtttgatcaaggtgttataatgattcgacccctttctcgtcaaaaatgtttggtcaggtatttataacgtgtcaactccactttcgtcaaagaggattagtcgagaaccttcgaatttcaaaaaaaaaaaattgaaatggtgggtttgcattatacaatgtatt

SEQ ID NO: 147176 - DNA, 731 bp, Cannabis sativa
attttttcacttttaaaaacagaaaactgattaaaaaagtattaccaaacgccaccaaatttttttttagtttttattattttcttgaaatttgtgcacactcacgtgaactcccatttttatatagtatttatgtatttagaacagctccaaggagattgcaaaaaatttgtatgtcgtgtatatatcttccaaggaggttgcatttcttgcagcattttgtagttgcacggcatatatgccgtgcactgtagacacggcattgttttttttttaattttttttattatttaattaatatttatatatatttatattatttgatttgtaaaatgaagaattattttttgggaaattttaccatgcatatttttaaaagtaatgtatgaaactactcctatttgtttcggcacccaacatacttttttagtctattttttttatatatagtagtgtatattatagttatttaaaacatcctgtaaaatttaaaaaattaatacgtcgaaaataatgcactgttttaaaagtggcgcaatgatatactcctacctgtttcggcattcgggagacttgtttagtctttttttatggtcgtgtacattataattatttaatacatcctgaacaattttgaaaatttttaaaaaatttaacacaccgaaaataaaattcaaactttttgtcgcgtttcttttatttaaataattagttaaatataacaattgtgg

SEQ ID NO: 147177 - DNA, 572 bp, Cannabis sativa
attgaatcccattcccataacaacacactagcgtttggttggagataatgaaatagaatggaatggaaagaaaataattttcattccatttgaaatgtcattccaataaaatagcctttccaccattacattgggtgatggaaaaaaatttaataattttttatcaatttttttttatgtattttaaaatatatttcattcctatttttattcctattctcattcttattcatatgttttaattcctcccaactgaaagccacctaaattttaagggctttttacacaacattttgaaattttcaacttgtttattttggagtagaatttttttttaaagtattgaataagttttatactatatactgtgttaagtttttcatagttgttctacgattgttttttagttgttccactattgttttaattgtcctattttattgttttactttgttttataaaaaagtgtaggagctaatcaagacaaacaaaattaacagagtatagtgcagagcaaaagaacaatgccaagaaaagcttaacccttaatggttagcttgaatttatttata

SEQ ID NO: 147178 - DNA, 893 bp, Cannabis sativa
  modified_base (51)..(52): a, c, t, g, unknown or other
aacgtatttttatttttcaaaagtaaaatttttactttcattttgtgattnnaaaattagaaaaagtgttactaaacggcaccatatatctctaaatcttgatagcaagcaacaattactattatcaaagatagctacatcaatatttatctaaaatatattatctataagtctagaccagtgcttccactccgtcttgaagagtcataaaactcaaccacggatccattgaattttctggagcacaaagactacaaacactttggcttgtataaataccaatctttcctaatgaaatggtagcaaatgaagttcaggtatctatttacaaaaataccacttctaaatatagtacccgaaaaaatatgggataatttcaaaaaaacacaaaaacaacaaaaaaaaaaattacaaaaatatggtctgtatgaagttttcaacatttttacagttcttaagagtttatttacataaaatacggtcttttagtgtatttttatgttatataattgttattttattgttgattctttgttatttgtatattatttttatgttgttttcttgttattttcatgtggtttttttgttattttttatatttttataaatactataaaagtataaaaaaaaaataaaacataaaaatataaattttttataaaattagtgttttatgtaatttttcttggacaaatttaaatatcacaattatacgaatttttgcatttaaattaataatcacaatatttacctttcggttcattaaaccataattaagatacttggttacctattaattaaaaggctattttcaaaaatatgtaaaaaattattaaggttatgataaatatggcataaaaagtaaatgccactaaatatgacattatcta

SEQ ID NO: 147179 - DNA, 650 bp, Cannabis sativa
taatgcttttcttaaatttgtgagacatttcaagagaacaagtgatattttttaaaaaaataataataataaaaataataataactttcatcatcctaaatttgtgagatgttccaagagagtaaatatattatactatcaagatttttacaaaaaaaggatacatttttgtttttttaaagcggtgacatgacgttgtaattattctatcctatttttttttttccttttcacatttttaattaatattaaatattaattaatctaaaaaaaattataaaatttaaataacagataactagttttttttctaaatttgtgagatatttcaagagaataaatgttaatttttttagaaaacaaaataataacttccatctttctaaatttgtgtgaaattccaagagaacaaatatatcacactatcataattttttagaaaaatgactttgtttgcttttctttaaagaaaaaaaaaatgataacttaagatcactcatcacttataaaaaaaaatatcacggttttttttcttttcaaaataaaaaaaaaatgacaacataagaaaacaaataataaaaaattcaccagatatttatatctgataatttatttggggctcgtttagaacgtcgtattaggtcgtattg

SEQ ID NO: 147180 - DNA, 934 bp, Cannabis sativa
agattatttagcatcattgttgaggtttcaagcttgggtaagcttcctagttcattttctatggtttctttagtttaaatagcttctcttgcatgaattttgagatgttggattctaagttgttagagttgttggattttgtattttaatgatatattatggttgtttgagctgatttgaagttaattgatgcgttaatttagtgtttagacaaggtttgagtttcagaacccaaactttggtctctagtggtgaatcttgattctgtgcatgttgaggtgttttatggccttggatatgtttattggggtatgatatgagagtctagaacgttcgataaggttttggatttgaattggttaggttttcaaaatttttgggttacctggtgtaaaaccggttaatcgattttacaggccctgtaaaaccggttaaccaaatcagaaaccggtttcctaaacttttttatgttgtcgattcgggttagtttcagatccttagttgattaattccgtgttgctttagggtattgccatgttaattttcagtagaaaaatttttggtttaaaacctaagtccccggttatgatttagcgtgtcacttatccatgttatgaacgatgtgatctaggggcctataattcgccaagtaattattccactccgattggccgacacacctgaatttggaaacaaggtaagattagtaaaatgatatgcatatatgtatacatgtttagcgtacatgttagttgccgtcagaataacatttcagggtatcggtgatgtgtacatagagttgcacagagataacgacatacatattttaggaaaatatatagccatcagattagcatatcagggcatcgatgaggtgtacatagagttacaccaagatgccaacagatatatgctaggatatcagatagtatga

SEQ ID NO: 147181 - DNA, 511 bp, Cannabis sativa
  modified_base (48)..(50): a, c, t, g, unknown or other
ttgtaatttttatgactaatacatttagccacggactttttagtcacnnnataagaatgataatttataatttgtcacaatttttttacttttagtcacaagttaaaaagattttttgtagtgagtcatccaccaaaatggtagaaggtcattctattagaatgacattccaatactttaatatgcaaccaaacaaagaaatagaatgaaaattatttcatttccattccaatattctatttcattacctccaaccaaacgccaactaggggtgtttatccaaaccaatctacattgtttttctcatagagcatccaatctacactaagtgctgatttcatattttgaaccgaatccaatgcacaaatgtgcggaataggtcagttattttagattggttacttttcaatattaaattatatcatatttgtgaaaaaatattttttctcacataactagcaacaaaataaagtattgttattttatttctccaacaataaattaaaataaa

SEQ ID NO: 147182 - DNA, 1007 bp, Cannabis sativa
acctttcatataggggttccattcagttcactgcagcgactggtcctgcctacacagcaggggcaggagatatttgcactgctggagtagggatttgaggagtaccctgctgtctcaggcgtcagatctcttcatctcgttcattaattcttgcttgcatttctgcaaacctattttcctaatcttgggcagcctgggtagcctatgacgggttaacatcatcccggctgcgtgccctgcctctaggacctctacctcagccacgaatatttaggggaatctgaactccctgaccaccactggatccaactgagttaccctggctcctggcgtttcgcctggcgtccatacgaacagaacatcctgcgtaaccaagagctagtctggttagatcgtgatcaagtaaaacttactaattgccgctgatttggaattttaaaaacatgcacctattctactatcacgctactaacatgcttcctaataggctttccttaaatcatactattaaaataaactactaaagcaataaaagcttactgaaccgtgaaacgaggtgatcgctgatgatgattgtacatgtcgtgacgatcttcgaaagacaacttggcggctctaataccaaattgtaacactctaactaatttaggcatgttaacgtgatttttaacgttttttgcaactcattgctaatcagagagattatcgaaaaagaatggttaattaaaattttatttatttaattaaaaacataatgtaatatacatataaaattctatgatctcgtttacaaaacatttacaaaagtttaactatatatttacaaaaatttgtcgcctagcaactatacaataaaagccctgatgtcccaaagattatacgctctaggcctaacagccacgacatgtacaacctccacctgctcgctctcacgactattcagccttagccttgcacttacctacacatggaaatagcaactatgagtcaacaggctcagtaagaaa

SEQ ID NO: 147183 - DNA, 1061 bp, Cannabis sativa
  modified_base (857)..(866): a, c, t, g, unknown or other
gaattccggttcactgcaggaaagaataaaaaattcatatctcacttaaaacaaccccaaatcataccaaactctccagacctgctccatatatcccaaagaacaaaatcaaggcaacaaaacacaacaacaagcacatagacaaaacccacaatgtgagagaaaagtttgagctcttaaactcaaaccttgaacaaacctccaaaaccaccaccaaaaaagttataatcatcaattctaaccattatttgacttcaaaaacatcatcaaacaacaacagcaatcacagtagctaataactcaattcatgcaaaaattattaactttaaacttaagaacaccatagggaaaactgctagagaggttaccttgggttgaatcactaacaaacaagctgaaattcttgaattgcacaaagaaatacctcaaccctagctggatctcgaaggcacgaaagagagagagagagtttggagagaaaaaacttcttttttgagaatcttgatttttaaattaaattagtaaattataaatgggttttatctacatataaccagcctaaaaaatcagaataacaatcccaattaaagtccactataggagaaaactaacttagggaaaaaagactattttgcccccacttaagccaaaaaatcataaaatcacttaggggtattttgggaaattctaaaatcccgactattctcgacattcccaatatctaactatatcgccctgttatactaaaaatactaagatttgattctaatagccaaacattgcgttccaatgttgctgggcaccgaatatgcaaaattatgcaatttctatatatgacatataaaatgcattctgannnnnnnnnnatcatcataaattaataatttagaattaataattaatttctgtaattaaaccctgattatctgctaatttctaaatttaagctaagaggtctttaaacctatcccccccttaaaaggatttcatcctcgaaatctaacttgaataagtctggatattgggctctcatgtcagattctaactcctaggtggcttcc

SEQ ID NO: 147184 - DNA, 585 bp, Cannabis sativa
tatattggagaaatctagaaagatctactttttggaagagatttttgtattccttgcataaatacatcctttaatttgtctaagactcaatgtttttttgggagatttagctagattttggagattatatatatagatatataaagtgaatgtaatttctttgaaaaattatagatggataaacacaaacttagttgcacatattttattgaaggtttgacatttgagaggttcatcttcattgtttgaatcattgtgttgatgtttgtcccaagttaaattttgagttagctttttgatccaatttgattttgtaataacctcatgggcctatctatgggcctagtatttgaatataaatgattttggtaaattggtagctttgtattgtggtgagttgagtgctaatgaaaattgattgtaggtgatattttattgatgccatctttgtaaaattgaatgctagccatactttacttgtttgcttgcgagagtaagaattgatcataaatgtttcttgcttaattgattgtaaatgttgcttattcattgacggctaacgctttctcattttgttcgcataaa

SEQ ID NO: 147185 - DNA, 1713 bp, Cannabis sativa
  modified_base (929)..(929): a, c, t, g, unknown or other
attttatatagaatagatatacaagcagcccattcttctctcttattcacgcctactgctaggctcttcaagccaaatgaagttaatatattcattttgggctgcatctcctttgggtcacgtaaaagcccaatatgttaattgttagcccactataaataattatcaatcaatttaagctttagtgatttcaatgaaactttgatgaaattctagctccataatttgacccatgtgataagttcaaaatgtgcatttaaacattttacaaaaatacagaacattgagattaacacttataaaatgggaaagtaaataaaattgataaaatattacaaaattaattaaaaattaatcaaagaataataaaattaatattcatgcaaaactaaataaaatcaaataaaagtcactaaaataaattaaaaatacttgagaacaaacaaagctaatttaatgccaaaaaaaaatataaataactctatttgcatagagttatcaatcacacaatcaattttttattttattcctcagttagaaatattttaatattcgcccacttggtcagcatttagactaaaacattcaaacacaatgttcctcattataattaacatatgaatcatagcgatatacactcattatgagtcgagtattatcttccatgtattacaatatatttactatataacaatgtactttacgtggcaatgtacttaagcgaataaaccctaaatcttatgtttatttaggtcctctaaaattttctcaaatgtaaaattaagatgctcataaatacaagaaagtaacaaaataagagtttcattaataataactttatttgtacaaattacataaggtacaaagtcccatgttttctacatgatccttgaatttatgaggtggcaagccttttttcataggatcgncaatcatcaattcagtgctaatgtgttgaatgaccactttattttctgtaatacgttctatactagcttagtacttaatgtcaatgtgtttgcttcgacttccacttttgttgttctcattcatgaaaacagtagctgaattgtcacagaacatctttaacggccttgctatggaatcagaaactctaaggcctgaaatgaaactttttaaccatacaccatgtggtgtagcctcaaaacaagaaacgaactcagcttccatagtaaaagtaggagtcaaagtttgtttgttactcctctaggacacagctccaccatcaaacataaacatgtaaccatatgttaatttacatgaattagtacaaccagggaaatctaaatttgagtagccaactacttttagattgtcgattcgtttgaacatcagtttgtaatccttagtaccctgaagatacctcattacgttctctgtagctttcccgtggtctatccctgggttactctgatatctttctaacactctgacagaataagcaatgtcaagtcttgtgcacacctgatacattaagcttccgacagcagaagaataaggaatgtgcttcatttcttctctttcaaaatcattctttggacactggctcaaatttaatttatcaccattcacaatttgatcaatgcccagtgaaaaatctttcatctgaaatctttctaaaactctgttgctgtaggcttcttgagataaacctaagatacctcagtatctatctctatgaatcttaatgcc

SEQ ID NO: 147186 - DNA, 503 bp, Cannabis sativa
  modified_base (53)..(56): a, c, t, g, unknown or other
  modified_base (118)..(120): a, c, t, g, unknown or other
gaatgtgtattacgaaattttccagaaaaataattttattttctttctaaaannnntttatttggattccttgtaaaaaattaagtaatttttgtttttacgaaactcgattccgatnnnaattgagaaagatatgaattttggcagtttgagatgccatgggtgtcgagatggggctcaatcgcaccaggcactcggacacacccttgcgcgcgcgtgctttggacacatcctgtctgaatgcatgctgcccaccggtctacacacaggctccgcgcgcgcatatgctgcaaatggtcgagttttctcagctgggaggctgcattttcccttgctccgcgcgcgtatggggctaattgtagccttgctgggctgcacgtgcaaccctcctgggcagcaacaccccaacaaccaattttaatgagattttttcccaatttcgatttttccaattttcaaaaccaaaaatcaaaataaaatattattttttaatatatttaaac

SEQ ID NO: 147187 - DNA, 1114 bp, Cannabis sativa
ctaaatactatgttttagttaacatttcgttgtgacgaaaagtcacatttagtcacaaaaaaattatgttgttactaaaagtagcagctttttgtgtaatgttttgtcaaaccatgaattactaaagtaagggagcaatataagacaaaactatccctaaaaatttaaccaataaaactataatgtcttaaaataacatagtaaaagacataaactataagtacacttgtcaatacttcttttttttattataattttataatatatacatataaccaaatacttatgcatgattttcttagatttgggttctgtggctgtatgcagtgcttataattattttctaaagtttaattatgaataattaagatagtttgagttagatttgtgggttgtggtgttgtttgagcaagcttttgattttaagaactcaagctttgctctctaatggtagtttgtgcatctgattgttttgggatattttattgcttggtttatgttcattgtggtatattaagcaggtctggaaggtttggtgtggtttggtatcgatttgtggttgtagtgaaattttgagtgtttcttgtactgaattggtcgaccggtttagggagacctgtaggaaccggtcgattagttgggccccaagaaaacccacagaactgaaattctggttggggaaccggtctaccggttagggcatttttgggaaccctagtttttcccgtttttgtaatatctaggttattgccatgttatccaccgataagataacttttagtttcaattttaagtcctcgaaaagtgatttagcgtgtcacttaccaattttacgaattatgtgatttaggggcctgtaattcgtcgagcagctatttcacttaggttggccgacacacctgaattcggtaatgaggtaagattagtataatggtatatgtgcttacatgtttagtgtgcatgttggttaagcctgttagattacattataatagcagtatcaatatatttatttttatattggatattgataaatgtatgttgggttaagtgttactcgacagtatcacatcggtacgactagcgtacagagtataggctaatattatggtcg

SEQ ID NO: 147188 - DNA, 648 bp, Cannabis sativa
aaaatataactacaaaacaacaaagcaccgaaaatctattacatacacaattttgagttgccattaatggaggagacagttgcaaaaaattagagcattgaaaatccaagcaaaaaagagtgaattttgaagtggaagaaggacccgagctcctagctcgaattttgttattctcttcttcttattttctcttctcttctttttaacttggatttgaatattttgtaaaagacaaagcatttccatggaaaaacatatcgtattattcattttattttctgttttgagcatgagctaagtcctttgagacttggatagctatgaacccctctgaatttgataagagagaaaactctttatattattctgctgggaaaatggctcacgtagagagtaaaatgccaattagttttcttagggttacaatatgtgaatatatactagacaaagaagatgacagcccaataaacatagtgggccgaaaataaagtgggccaaaggaaaagatggaccaactaattctattaccccccctctcaagatgaactgtatatgttttttaagttcatcttggttacaatagattgaaaataacttggtaaaaggggcttggtaaggatgtcagcaatgttgtttttggtggtgaca

SEQ ID NO: 147189 - DNA, 620 bp, Cannabis sativa
cctttagtgctttttaatccttttgtgtgggaggggccttttgtgtgggaggggcaaaatggtcattttgccccataagcctttgtccttagtggacttaatttttggtgattatgttctttaggttatgtttatttggctgaagtaaataggtaattaaaatcatttttttatatcttatttttacaaaattggaaaaaatcaaagaaaagcaaaattctattttctctctagctctctctctttcgaccctctttgagcagctggtttttggttattttttctcctctttcaagctggttttagcaaggaattttgatctcaagttgttggtaagactcttgtagctttttcttatgtttcttgagttttaaggaaaaaatgttttgcatgctttgaggttttgttgatatagttgctgtagttgtttgttgttgaattcagagacttagtgatgagtttttatgttaatttatgcatgaattggtgtttattaggttgttttatcaagctttagagttttgaactcaagtttggctcattagtggtgaagtgttgtttagcttgctgtgattgttgtagttgattgctgtggtttttcagaggattaattatgctta

SEQ ID NO: 147190 - DNA, 797 bp, Cannabis sativa
tatatgagatgatagtaacatacataatatattaattagcataaaatttgggagttataaatttatgcatgagagttatatatattgttggtatataataatatatgtctaactaatcatatttagtgtatattataaaaataatagtgataatgatggaaaagatgtattcatcatttttttaatggagttttggaattatttttcccattagtggtttttatctcattttatgagatgagaaagtgaactatcagagttacacttatgaaatttatcttgtcatagcaagaacaaatggatcaaaagtggattcaaacttgtaaaatgagtcataattggaagagcaattttagactcaaattaaagtgaatcatggtggattcaaaaattgtaaaaagataacaaaattggagaagcaattagaatcttaaatgatcaaagtagtgaacaaaattgatgagaattttatcaactttggtataattttaggttaatctcaatgaggagataaccttaaaattatggtaaaaaataatcacattatttgtaagtgatgatgtgagtttgacattttagttttgttgagaaaactaaaaatgtcaaatagtatttttttaaagtgaccttaaagagtcatttccagagaaaataacaaaagttgtattttatatacactttatggtggaattttaggggtgagccacaactttaatcaaaatgtgatgagacattgttgattagtttatttgatttagaattcaaattttaaattaattttggctatgtgcatatgc

SEQ ID NO: 147191 - DNA, 3658 bp, Cannabis sativa
ggcataaaacccaacaatcctctccctcaataggaggaggttgtaatccctggttgcttgggtttttgggcgaattgggctggttatgtctgttgccctatcttttcacacattgattgaagtggcctcgtgggatgagactctctatctcatccttcaaccgacgacactcatctgtcgtgtgtccgatgtctttgtggtacttatactatctgattggatctcttttatgcctcgcgtgcctcatgggctcaggtttactaaatccaaccttgttctcatgcgcgagatatatattttcccaagtttgactaagctcgatataaatggtgtaaactggcacgtacttgtcgtgcttcttttatttcttcttatcttaaatgaacccttagagtcgtcctttctctttgagctagaggcccctgggttatcagctttagtcaagatagtacttgttaaaatagtgctgggtttgcttcccgagccagtttttaacaagttcatctcttttcgagcttcttcctttcgaacaaacacctgagccctctcgttgaactcaatgatgtttttcactggacgaccctacaagttgtcccacagttcgcctccagcagtgaagaacctccgattatattttcggaggaagatgaaaaagacgtgaggtaccctcacgtcggcccattggtaatcaccatctagctcgctaataagaggataaaaagggtgttggtggacaatgaaaatttagtgaacatcctttacagggaaacactgaagaagatggggcttgaaaaagctaaattaagaccttgcatggtaaatctttgtggatttactgtcactagtcaaggaataatcgagctcccattaactttgggcgaagcaccattatccaccacaataatacaagatttttcggttgtcgaactgtcatcggcttacaatatatttatgggtcgaccaacattaatcggactaagggcagttagttcgattaagcacttatcccttaagtttcaaacaccagtgggtgtggagcagtgcgaggtgatcaaatgttggctcgcaaatgctatcacatagagctgtagcacaggaaagttggtcaccaggtaatggcagtcttgactgaagaaggcgagaagaaagatgaagatcttgatcctcagattcaagatgaaagaaattaattgaagccaatcgaagaattggaagaggttgttctgaacccaggaagtcccacaaagtttgtttacattgggaataacctcaatgaacaattgaaatagcagccaataagttttttaagggcaaaccaagatcagttcgcctggaaccatgaagatatgatagggattgaccctaatattatttttcatcacttaaatgtcgatccaaattacctaagaaagagacagaagaggaggcccttagatttcgagagacaaggggcactcaaacaggaagtggataagttgttggtcaacgacgttatgcgcgaggtgttttacccctcgtggatagccaatcctgttctcgtcccaaaacccaacggaacttggagaacttgtattgatttctctaatctgaataaggcatgcccaaaggattgctttccactaccaatgattgaccagttgatggatgcaactgctgggcacgagcttatgtcattcatggatgcatactctggatataaccagataaaaatgcatgtccaagatcaggaatatacaagcttcataaccaacatggacattattgctataaggtcatgccatttgagttgaagaacgctggggcaacatatcaacgattattgaatgaaatgttcgcaaatcaaattgggcggaacatggaggtttacgtcgatgatatgttagtgaaatctgtaaagagtggaagtcatactacagacctcgcagaatgcttcaaaatattaagaaagtataatatgaagcttaacccaaaaaaaatttcctttggagtttcttcaggaaagtttctgggattcatagttaacgtgaggggcattgaagaaaatcttgagaaaatgaaggccttgatagatatgccatcaccaaccaagcctaaggaagtccagccttaacaggaaggatgatttcacttaacagattcatttcgaagtcaactgataagtgtctaccatttttcaatgtattgcgaggcaacgagaaattcgaatggatagaggaatgcgaggaggcttttaagagcattaaaaagcatttggcgacaccttcgattttggtgaaaccagtaactggagagacattactccattatttagttatcttagaagacgcgattagtgcagcaatagtgcgagaagagggaaagcaccagcaacctgtctactatgtcagtaaaaggttactgggggcagaatcgagatatccccctcttaaaaacttgccttatgcctaatccacgcatctcgcaagttacggtcttacttccaggcacacccaattaaagtgttaactaatcaacctttgagacaagttttatcaaaaccagacacttctgaaagattgataaaatggtcaattgaactggggcagtttgacataacttatcaccatcaaacatccattaatggccaagctttggcagatttcctaattgaaggaataactccagaagaaaatccacttgttcagcgagacacggatacttggaggttattcgtggatggagcatccaacaagcagggctcgggtgcaggggtgatattaattttgccagaaggctttaagtttcattatgctttgagatttcaatttgacgcgtcaaataacgaggctgagtatgaagccttgatcgctggtttgaggatagcagaagcgttgaaggttaagaatctcatatgttatagcgattcacaactgatcgtaaatcaggttctcgaggaatactaggctaagggcctaaaaaggctaagtatctagagagggttcgaaagaacttagaaatgttcgattattgtaaaatcgagcaaatcccaagagaacaaaactctaacgctgatgccttagcaaaactgacctcctagaacgacttggatgaactaaacttggttccagtggaaatgctaaatgagccaagtgtatgtgaaaaggaagacatcgagatgatagatagctcacccacatggatgactcctataatcaactatctactcaacgaacaacttccaactgacaaaaacgaggcacgaaaactcttgtattcagtgcctcgctacacgataatagaaggcgagttgtacagaaggggatattcgatgcctctcctttagtgtgttcttcctgcagaagcaaacgagatcatcaaggaaatccatgaaggcttttgtggggatcatgcaggttggaaaagtctatcaaaaaagataattagacaaggatattaatggccaaccatcaacaaggacacccatgaatttgtcaaaaagtgtgaaaagtgtcagagattctgacatatacctcacgtaccaccgacagaactaagaatgatgacctcgccttacccatttgctgtacggggaattgacctgattggagcacttcccatagggtgaggaggagccaagtacgcagtagtggcagttgatttcttcactaaatggaccgag

SEQ ID NO: 147192 - DNA, 741 bp, Cannabis sativa
  modified_base (63)..(65): a, c, t, g, unknown or other
  modified_base (156)..(156): a, c, t, g, unknown or other
ttgactaaaaaattatttcgaatactaaaacagatagagatgtatcggtgtatcccttttaannnggtgcattatagaatttccctatagtatttactaggttattattacatgcattacacgtatatttagttatattttttatttttatttttntttttatttttatttttgttatgtgtatttttaaaattttataaattaaagaaaattaattaattttgtaattttgtgttacttttaaatatttaaagttttaaaaatttgaagaaaataaatataattttttttgaattaaaataaatataaattttaagaatagtaaaattgaacatactgtccaatatttaaaaataataatgtcacaaataatatattaatatttatatatatataaattaatataaaattagtataagtttaattaacttaaaaaatattaaaatttatatatatttaaatcattctaaaattaataatactaatatttattaaactaaacctactaacaccgttaaatttaacataatattcttatattcttaaatattccgttaaaccaacaaaaatcattagatagccacattttttatataaaaatatgttatttaatataaattaaaaattagaaaattttaatttagtaattgattacatgatttatttaggcatgtaaatttttttttttttttgagaattttcaatgttattaaaaccgacaatcgtttacaataacagaga

SEQ ID NO: 147193 - DNA, 866 bp, Cannabis sativa
tttcccgaaagggaaaggtccgtaaaggggcaaactccaaaaagagagtcttggccctcaggatcgagaggactgaaagagcatttctgtgcaccaggaacccgaggaaagaggaagagggcactgaagataccctccaattgatttaagacaccaaatcaacgaagagcacggtgacttgcaggatcacctggacaaaaagaaacatataccagcggtctctgcaggaatgctgaacaaaggaattttggcagagttgacgacattgcgaaagacatcgctcgggtctcccaaagacaaaaaggggatgactcagactttgactgtgaggaccgtgagccatgcgcccgacgcattttggaggcagagctccccaaaaattttaagatgcccgagatggcagcttacaccggggattcagaccccaacgatcatttgtctcgattcaactgagtaatgatggttatgagggtcagtaatgacgccaaatgtttatgctttctactaacattgagcggttccgcggaggaatggtttaaaaagttggaaccaagatctgtggattgctggaacaagttccaagttagtttccggagacagtttgtcgcagcgagaaagattaatttcgaagttagcgccctgactaacatcaaggaactacccatagagaccttgaataattttataaagaggttcaaggaagaagcctcgaaaaccaagaaagttgatgacatacaacatcttgcacttcttcaagccggaatccgtacaggaaccccattctggaacgaattgtgacaaggagctgctaacctccaggattttcagaagagggttcaaaagtacatcaacttggaagaagccca

SEQ ID NO: 147194 - DNA, 681 bp, Cannabis sativa
  modified_base (433)..(438): a, c, t, g, unknown or other
aaaattgggccctagaaaaaataattttttggaccttttttttttttttttttttttaaaaaaaaaaataaatgatatttttaaaaattattaaaaaaaataaatgacatttttaaaaaatctcattccttaattttttttttcatttgagcttataataagagtgggccctaggcgcgggcctagcttgtgtgacagtcagtagtctcatgatccgtaaggggaaacaccgggtacgctgtgcaatcctacgccgcctggggaaggtcgagtgggatgattctgagactgtgtaggtatgggactgtatagttgaagatagcgtaaatggattgattggtactatataaacaaggtgcatcttgttttctggttgcccatctcgaaagaaccccacagttaagcgtgcttgacttggggcaatttcaggatnnnnnncctcctgggaagttttcttaagaagcgtgcgagtgaggataaaacacactggaaatactcgtattggtctgtaggttcagtcatcagtccatgaagcagttagagtgacgtattcgtgtataagagtcattcttctgtgggtgaaagggcacaatggaggcttgaagcgaggacgttacaaatggtatcagagccttgacccacttggaagtgtagtcgacgaggacgtcggaccccgtaagg

SEQ ID NO: 147195 - DNA, 582 bp, Cannabis sativa
attaaaataaatattattatttttaaataatatatttttctctttaatattatttaaaaataatattatatttaactaattaatatagttttatgtaataaaaataatagttatatactattaattatacattttataattgctatatttaatcaaaataataatttcacaaattactattttgcccttaagaatttatttcccataaaaattaattttcactcaaaattcatttatcaaataaaacattcctctgtacagtgttgtatagaggtgactcggagaccatggacctatatttcaaagctctaataaacccaagattactatcaatctcataatagaataatccaatttattaattctattaatactccactataaatatagaattatactatttgacaatatagaattatatttatagaattcttacctgtactccattgatataatcaatataagtatatcaccttccaattattagttcataattagagttggtcaaaatatcgttttacccttctaattatctcttgattccttatgtaccattatttcaatgtcaacagttaatctata

SEQ ID NO: 147196 - DNA, 935 bp, Cannabis sativa
aatttgaaaaaaaaaaaatttaaatttaaatcaaatataattaattgtaaattttgtttatatgtatacataaaatgttgatcaatatataaatctatatttatatatctatatatatagtagagacataaagcggtgacatggtattttaaaattttttaaagctattttttttttctcataattaaaatataatatttttgtatttttttttaattaagatatttaaaaaataataatcactttttcaaaacatattaattaataataaaagaataaactaatgaattttttctaatatcttaaaaatatttaaaattcgagataaaatataagatgaaaatatagatttagaaaatacgatagtgatgactacaagtgaactatggtaatgacaaaggatgcaatacagtgatgacaacggatgagatacggtgatgaaaataaatgagatataatgagacaataagtgagacaataataacaatagttttaaatgatagggatatgaaaataatgtattatggaaaatgcagtaatttttttctgtaccatcttatttatttatttatagaaaaataatttcttttaacaaaacaatgtaaaatactacatataataaattttaaatttcttaataaataattttaaataataattaataaaattgtgcatttagtttttaataaataaattatttacaataatatgaaataaaataatatatttataattttactatacattagaattatatttttaagtaactatttattataatactaaaaaatattacattagccgcacgaagagtgcctatattgcatagtctatatatatgtgtgaagtttttatttactttgcagaatatagaaatagtattttttttatagaaaaaatttattataaattaaaaaaaaaaacaagtgtgagat

SEQ ID NO: 147197 - DNA, 980 bp, Cannabis sativa
gaggtacatgagggcttttgtggctaccatacggggcaaagccttcaaagaagatcttaagacaagggtacgtttggccgataatgagaagactcaatggactacatcagaaagtgagaaaatgccagaagttctccaaaatacctagagctgctctaaatgaactcaagagtatgcaaacaccctggctatttactgtttgggggatcaacctcataggctcattacctaaggggaaaggcacagtttaatataccgtagtggtagttgattacttcacaaaatgggtcgaagcagagctcttagctaccatcacatcgaagaaagttctcgagttcgtggtcaagaacatcatctgtcaatttggactcccacagaagatagtgtcaaacaatggaacacagtttaacattgacctctttattgatttctgtatcagacatggaatcattaagaatttctcagcagttgcctatccacaagctaatggacaaatggaagcagtcgacaaaactcttaaggatacgctaaagaaatgcctagagcaagcaaaagagaattggcctgaacaacttcttaaagtactataggcccattgaacaatagaaaagacaacaatcggtcagactcccttcgatctaacctacgagtatgaagccatgatacccgtagagctcacacctccatcccatcgaagacttacatacaaccaaaaaactaatcatcagctgctggctaaattcctagatggaattgaagagatcagagaaaggtctaagcttagaaaggcgtcgtatcaataaagggtcacaaaacactacaaatccaaggttaaagataggaaatttaagcctaaagacatggtgttacaacaggtattcttgaatacaaaagatgtagtagcaggagtactcaggcctaattgggaaggaccatatgtcgtggttgaagcacttgaactcaaaacttacaagttggca

SEQ ID NO: 147198 - DNA, 824 bp, Cannabis sativa
  modified_base (689)..(693): a, c, t, g, unknown or other
actacatagttgaagagggcttaactggattaattggtactacctatatcaaaaaggtgcatcttgctttctagtagcccatcacgaaagcactctacgattaagtgtgcttgacctagcataatttcaaaatagatgacctcctaagaagttttctcaagaagcgtgtaagtgaggacaaaacgcgttgaaaatactcgtattggtttgtagggtcagtcgttagtccaggatgtagccagagtgacatactcgtgtctaagagccatcattccgtgggtgtaagagcccaatgaaggcttgaagcggggacgttataacggaagctttcaaggaagcgatatggcttcacagaatactctatgaattaaaacaaatcaaaggaggagtgactatgtattcggatagccaatcatccatccatctttaaaagaatccaattcatcatgaaaagagtacttaacatatagatataagactccataggattagagagaagatagaagaagggctggttgatttagataaggtcaaaactgaagataatcctattgatattgggactaaattcttaaccttaaacaagttcaagcattgcttgaactacttgatcaatctcaaaagttagtatactgagattcttggaacaccaaccaatgacagctgcattctttcttcatcatcgtcannnnnttaatttgaagtaactaggtggaatttgtacgtggtatagttcctctaaataaaaagtctctgtaaacatcatttttgaaaagttgttcactcgcggttgccagtcctagaaggagtcttgtagaatgata

SEQ ID NO: 147199 - DNA, 548 bp, Cannabis sativa
attattgaaggaaggatgttattgattctagaactcaacagcttggtagcaatcttgtaaatcacattgcaacaagctataggtctaaaatctttaacagagttaggacaattcaccttaggcaccaatgtaactatagtagagtttatttctttcaagatgttacctgaattcagaaaagaaagcacagcagcacatatgtcctctccaatgagctcccacttgtcttgatagaagccactagaaaagccaactggacccggggatttatttgcaggtatgctaaatacagcctttttttatctcatcctttgtgaattcctgtagtaagtaatcagcctgacttggggaaagcatagggccattgctgagaatattgttttccactaccttcctctgctctcttttggttccaaggagacttttataaaagtctaggaatgctgctgtaataagttcaggatctgtaactctgttgccctcttggttttctatggataggattcggttttgccttattctatgcttaatgcaagcatgaaataagg

SEQ ID NO: 147200 - DNA, 745 bp, Cannabis sativa
  modified_base (713)..(719): a, c, t, g, unknown or other
aatactccctgatgttccaaaagcctcagccttccgtttgtgatcagggttgccactgtcagtccccttactgacattaccactagcaagagagttgatgtcgtgacggaattcttcaacaattaaggctagctctaccattttcttgtacaaagtgtcacgagtagtggtaactatcaagtccagactgattgtgtcattcagtcctcacacatatttctattttctggtgaaatctgtgagcaccaaatcatcagcaaacttcaatagccgatcaaactccaaagtgtattcagccactgacattttcccttgagtaaacttcacaaaatcttcctgatgtgaagtccttacagcaacattgtaaaacttttattcaaacatattcttgaattcctcccaggtcattacactgacatcccgagtttggctcacgatatcccaccagacatgggcatggtcttgcaacatgaaggatgcacagttcactctctctgttcccattactcccatattattgaggatacgggtaacagtgctcatccactgctcggcccttattatgataatacctccagaaaagtcggaggctgcagcttcacgaacttctcaaacacagaatctcgatgcggcattacaaacccctagttacccaccagtggcacaggtactggtggtaacactttgtgacagtcagtagtcccatgatccgnnnnnnnaaataccgggtaagctgtgcaatccc

SEQ ID NO: 147201 - DNA, 1460 bp, Cannabis sativa
  modified_base (53)..(56): a, c, t, g, unknown or other
  modified_base (131)..(136): a, c, t, g, unknown or other
  modified_base (352)..(357): a, c, t, g, unknown or other
  modified_base (719)..(720): a, c, t, g, unknown or other
  modified_base (867)..(880): a, c, t, g, unknown or other
tttatatgtgtttaaattccattgttttggaaattcatatttaggatgttaannnncatacatggtagtaaatctagaacttggtaaaaccataatccaataactagcctcaaagccatggtaatgatttnnnnnnatgaaatatggatttaaaatgatacttgtgttgatttagatggtttcatgatggttgatgtgcatatttgatgattgtatggaaatcgcaatgtatgttgtaaattttttgttttgttctagaaatatttttactggaaagtacgaaaaattaatgaatttatgcttttacaaaactcaatttggattttttataaattagttatgattttttgannnnnnatgaaaatatctgaaactgagcaacacctatgcgctcgcggacaagggttcacgcaacttcagacacgcctatgtccgaatttactctgacaagggttgtcctaagcccctcctggccgaggttttccccccaagagactgctagcagcccttccctcgcccatttgcagcctgttgtgtgcccagggagtatgcattgcatactcccctagtgcaatcttgtttttgtgatatcttttgattcaaaaattatttttcattgaaacaaaatttaaatttttgtagaattttgtgtagaatctgaattttcaattaaaaatctaattatcagaataaataaatttttattaattttttaattnnttaaaattagttttagatattagttgtctttgaatttaaaaatttgattttttccacaaacaagccttatagttaattttgaaatttttgattattttaattataagatcagatactacttattttattattaaaatttgaaatgannnnnnnnnnnnnntaaaatattaataaaatttaaaataacctagttaaagtttcaaatttggtaaccatatcagattttcaaaatttgttatttttgaaatatatattttattaaattaaattataagattagaaaaatgttaattttgatattttatcttattagatatttatttttttttaaattaatctttagcaaaataacatgaaattttgaaaagtttgttatttttgtttgaatagaaattttaaggtttctaaccataaaattttcaaacttaagatattttgttttatttaataattaaacaaaattgataatatcataaccatcaaatatcttatttttcaaattatttatttttgttatatttaattcattaaattataagattaagaatataatatagaaatatctaaattttaaattaagatattatattatattatcttagtagatatttaattaatttaaattatttaaataaactaaaagttttaaaattggctagatatttgaatttcagttagaatttaagatatttaggagatttgttagattttaaatctttttaaatattctctaacaacct

SEQ ID NO: 147202 - DNA, 724 bp, Cannabis sativa
  modified_base (34)..(38): a, c, t, g, unknown or other
taaaaatttgatgataaaattacaattataaccnnnnntaattaagtgtttggtatagttattttgcacaatagtatatcgattttatgtgcaacagtatattaaaaaaaattgaaaggtagtatattagtttaagattgtggtatattattttaatgtgctatggtatataatgaacgaatgatagaaattaaaaaatgtggaatattagttttagtttgaggtatagttatatttcactgagaaatattgtctttatgttcattagtatatcatgaaggaaagaaaaagaaaaaaaaatgtggaatattaaattaagtttttggtatatataattttttttttaatttattatataatttttcattatagtatttctacttatgattgtagtatatattttgtgtatgctattatatatcttgggggaaaaaatctcatttaatagtattataatttaagtttgtgatatattcatattggtcttaggtatatcgtttgtatgtgatatgatatatcgtgaaggaaagaaagaaaaataaattgaatattagtttaaatttgatgtatatataattttgactacattatatatattatatgcattacattatctcattaaaaacacaaataaaagacaaacaaaaaagaaacttataaaaaatttaagctcgtggtatattattttacactatgggatatctatttaatctacaaatatatc

SEQ ID NO: 147203 - DNA, 1386 bp, Cannabis sativa
tccttttttgtatttttttgtttttttcccaaataaaaactatataaaatattatttaaaaaaacatctataaatataaaatatctttacaaaaattaaaaaaataaataaaaactatataaaatataaaagataaataaataaataaaaaagatagattgttttatttatcttttatataatttagaaaaatattgtatatttatatttagattcaaagtagagatagatttcactttcaggattgattatgtatttatactactctcttctctcttccttgtatatataaatcttctttctctaccaaacacgtacgaattgggctgatcgctattcactactgtctccttccttcctaattctattgattattggtgtaattgcagtttggtacaccctcctctcgctctctcagctttccataactatttcgcaattttctgtctttattctttgttcgtaactttccagaaatttacaaagctagttctcattaaaatcatgcttcagttcaaagagaaacactctctatataatcacattgcaatataattttatgtcataaaaagaaattgcaatttgtgtataaatcatatttaaatttaacacacataaatataaataattttgtttaagatgagtttcgcttattaaaattagtgaccaactacattaatttactatatatgcatgtattattacttttatttcttttcattttctatatacattttatagtttttattgataaattaaaaaaaaaaaaaacaaaaaaaaaaagagagagagaaatattttcttttttcatttattctgtaatcccctgaattaagtttctcttcaattaattggataatgtttattttgtattgtaggagattgatcaatttaatcctcaaaaatggccttaactatgaagcaattttcgttgatagtgggcttttctggtgtgttgtcattcatttttggagttgttgctgaatacagaaaggtaataataacaatgagtaaatgtgtgtatgtcatgtcattttctggttcctcttatatatatttactatatatgtgaaaataatattatttgttgggtgtgttgacagcctgcttcaggcactccagtcccagaaataggtgttgatatgtgcaaatacccatctgattgggcaacagtggctttggggtatctatccatagcattcctcatagtatcaacaatatttgggatttggtcattgttttatccatacaaaggaaagtccattccaaaaggtaaattgttgaggagcagtactacctttatggttttcttcaacactggtttgttcacagcaggaataggtgcagccctgttgttgtggcctacactcacagagcaattccacc

SEQ ID NO: 147204 - DNA, 639 bp, Cannabis sativa
taaaaatcattttagttcgtgattgttacttttgtatttgtattattgtttttgtattctttgctctttgctttttttctcttgattattattattaaaaacctcctatacaaatgaaatacattaagaacaacttaatggatatactcagtgacattaacgatgtgatttatatggcatctttagtattgaatttataatgagatgcagacataattttcttactggcttgaggattttctcaagtttttggttattctaaatgaatcattttataggaataaactgcattttccccagtgacttggttccttttacaagaagaccacttctcttatttattgatggtgacagcaatgaaacatttgaggcaagtaatcacctgccatgtttgaggacactttttcaaatgcatccgttctcaattatgctactttaaatattcagccaatatttttgtttattttaaaattgtattgctgattgtgttgtttattatatagagttcaattttagcatttatacttatttagtttttattttaaatatatttttaatgtaatgataaatattttttatctttgttttacagtttaatttagacgcgtaattcatacagtaacgaggagatcaatacag

SEQ ID NO: 147205 - DNA, 663 bp, Cannabis sativa
tgggcacaaaacccaacaaataatgcttgcaacatgcttgactgaaaggatgaaatagttgctgaaggtcgttagtgttctagcgatccgaacatagaggttcatgggattactcttggacctgaattcatgaaagtgtgggttgacaaagttatcttaccaagtgcctatttgtttcatcctagccacttgatgagtactatacaagaagttgtcgcttcttttgttgcacatggccatcgtagaaggttgttccaagatgttaaggttagtttttttatctaatttaatggtgtttgactactctgttttgtactatctaaaaactttgatgttcatttaactagttagttactgattctgtgacttttaactaatcctctagttaggttcctatgtttctctgttgtatattcaatttttgtgttgagataaaaaattgagaccactttcacagtatcctaactctaatttacacacaaaatgtaacgttttaatatataacatgtatatttttattagcatatatatagagagaaaataagaagtggataactagcactagctagaattattacctttaaagtgagcactcttttagtatgattatatattatacttaatttttgtttaccaactgcttgcttcctcatatttgatttt

SEQ ID NO: 147206 - DNA, 809 bp, Cannabis sativa
cacatcagtcaagagaggataatgaattacatccacctaacccctaaaaacctagggattagaccatgcatgtcctatgatacactcgttgggaatgtgtacctctattgaataatacagaaagaaatgtacctcggttctagtgatcaccccacaaaaacactataaatacccccccaaactcattaaggcaggggtcgagaattctgggtttcataagaaccaaggagaaaaccaccaagaacattttctgtaataaatactctcataaataataaaaactcgtggactaaggctcattaatgccccaaccacgtaaaatctcgtgcattcacttcttacaactttcttatatagtattattatatattggttgccgaaaacctcggtcaacatatatatttttaaagaaaaagaatttttttttattttttattttcaaaataattaatttttttttatttttttaaatatatatttacgtggaccaataaaattatgccacgtgtacactgtctccacgtagacattccaccatagtagttaacagctaaaaatggatggaaatattaaactgttaacagaacgagtttagtgagttttaccaccaaaattttaaaattagagattagttgcaaaaatctagtcacttaaagaagttatgccgcaaatcactctaataataataataaaaggagagagaaataagttcaactagggctgtacagaaattttcgtaaaccgcccaacccgaataacccgactaaaccgaaaaaaaatacaaaccgacataacttgacaaaattcta

SEQ ID NO: 147207 - DNA, 522 bp, Cannabis sativa
tgtgttttgaaccgcaattattaaattaaaaatcgtaaaccgcactgcgcggtttgtcaaaaaatacaaactacaactgcactgtaaagaattttaaactgtattttttatgcagtgtggggtggtgcgggcggttcggtttgatgaacacccctaattatagcttggattttaaattttgttaacctaggggatgttttgtaatacttttgtttttcaaatttttaatcacaaaaatgaaagtaaaatttgtaattttaaaattttatttttaaagagtaaaaatgtgttttataaccacttttgttgtttaattttaaaaaaagttaacaaaagtgtgttctataacttttattttcatttttaattttttaattttatttaagtcaagtctaggattgggtatggggtcggagtcatggtccgtgtctagaactggggccgtggaagagaccaacctgatagaaccattctccaagctttctcatcttgagattcgatgaaggccctcattctaacttt

SEQ ID NO: 147208 - DNA, 846 bp, Cannabis sativa
aaggttagtgggatgaatatttgctttatatatagacaatatgttacctcctagtgatgataaaagtttcctatttaaggtgaaataattcatatctcaaattattatttgagataaataatataaacaacatatataattttaattaattagagagtagctacatcatctctaattaaataaattatgtattattcatctcatgttactcttatgtttaagtgggatacatttaactcaaaccagcatctgtgttactcttatgtttatgtgggataaatttaactcaaaccagcatctgtaaaatgatctggaatgagaataaattaagaacattcatttacttttatttttagaagcctaatgtatgtgtaagagtatgaataagattttacattgcatttgttttaggattattaagtagtatcaggataactaaagttaagaccactttgttttttttttcatacgaagtgataaggtatatttaatatactaaagattatcttcatacatatatcattgagatgaactgatattttagaaatttagttaaccacttaagttatgacttcattggttatattgattcacgtaaatcaacatttaattacgtccttacgattacaagtaagttgtatcgtggagaatcttaattattatttctagtgtagaagacacattcatttattgttttgaggatgcatctcatatggtgtattgtagagtttcatactaggcctagagttccgaattacatttataagccattgacaaaattttgcgatatatttagctacaatatttatggctaagaactataagagtatgttgggttttatgccc

SEQ ID NO: 147209 - DNA, 1191 bp, Cannabis sativa
tctgagttgtcccttttttgccttagggagaccctagcaatgactttgcgcagcgttgccaactcagctagaattccttcatttagtgttcccatggagaccgttggtgcatgtttattttcgcctaggtgatctcctagatcaccgtgtttttcgttgattttttgtcttaagtcaactagagggtatctccagtttttcctacctctttctccagactcctggtgcacaaatacgctgttttggtcctctcgatcctgagggccaagactagctttagggagcttgcccctctacggacctttccctttcgggaaatctgagcagagtttctgcaaatcctgcacctttttctttctcttggggattgaagtgggattattcccatggttttcctcagaagagtaccgtatagggcttggttccgtggtctttggtttcctaagtgctcgggtgaggactcttctgatgtttcttcgagtcctgctaggatggccttagggtgtatgtgaattcctgccgtctccatggctttttgcatggtgacgatcacctcttgcatttttctattctgctctttttgggatgcgatctcggcttcatgattagtagccttttgcctcaaatttagtaactctgtatagctaccttcatcgtaagagtcatactcgtcaaagttctcttcgtactcttcgtccttggcctcatctcgctcctcagagcccacgttcactcttgaggctactttttttgtcctctgggttttgaccatcctgagggggacggggttgatgtgtattgttgcgagtttccaccattgttgacctaacttttctgattattgtctgtttaaagacgctttcttcagctctcaatgaaaacaccaaaatttttatcgagtttttcggcaaccaattcaataatatatgagaagagctgtagaaagtttaatgcaggagatttttacgtggttggggcattaatgacccttagtccacgagtctttggtatttatgagagtgtttactatagagaatgttcttggtggatttctctcctattttctctcttcgattccttgaataaaatcaatagacccattttcagtctgtttgtggggtatttatagtgtttttctgaggggatccctaaaaatggatcacttgtctttctgtgttagcttcatagggg

SEQ ID NO: 147210 - DNA, 981 bp, Cannabis sativa
tatttaaaaatgaaaggaaaaactattctaatgcaagtgaaaaaaaaattattaatttcttatcaaatttttatgttttctttatttattccacttgtggaaaaatatttttattaggctaattaagatttttgcctctcgaactttgatgtatactaaattatgtcccttttatttttagaacaatgaagaaaattttattccaacaaccactgaacaatacacacttcaagcagcaacccaacaaatcaaagactattcagaatagccattacatatttatctcttaaattacgaatcgacaaggtacaagagtgaaatctagccttaagacaaagcttggcatgtttacttaacatctgaaccgagtgacaaacaccttcaaaaacacaacaattacaattataccaaataaaataaacaattgttgttatgatagtcgaagctaacaatgcagttagctcattctccttctccaccgaggcattcaacaaatcactgaggttagaaggccaaacaaaactaccaaaccaggaggaaatctctgccatcaacaaatgttaaaaaatgcagctaaagaagggatgacaatgagattcaggaacaagctcacatatcgggcattaagacaaaatccattaaaattaatattactagcaaatttttcattaacagcttgccaaagtataaaatggtgcttacaatttatgccagactaacttatgataagtcaccttctcagctgagataagcgaaagatgaaatttttttagctttcaacttcctagtaggggtgagcatcggtcggtttggtcggttttttctatataaaaatccaaaattcggttttcagtttagattggtgcaatcctaaaaccgaccgaccaatccagaacctatcttaaaaccgaccgttttgaacctcggtttggtcggtttaaaccgcccaaaccgaactttttttcttaaaaaaaaaataat

SEQ ID NO: 147211 - DNA, 580 bp, Cannabis sativa
tttacacattttcctataatcatattctctttcataatattccctattatcaaattattttgaacacctcgtaccaaacgccttaaattagaggaacaaaaattatacaatcaggattataaaccaattaacaaattagttagttaactataaataagaaggtacatatctaaccagattgggttaagcttctttggcattcttctctctctcttttttcgttttcttgctttcttgcttgctttggtttgtaccaattctcttctacaagaatttaatgtaccaatccaaaattaacaactacccacaaaatcaatttacttaaactcttaaactcgaaattagactacaaaaataatcagatctaaactaatattacacaataacaactaattagttaaaccaaattcaaaaacagtgaaaacaactcaagaatactcttaaaaatatcagatttaggttctaaaattcaaaacacaaattaaactaagtcacaaactatgagcctgtaattggttgtattttcagttttcagtttttaaaattgtatttttaaaagtaagaatagaaaatagttttt

SEQ ID NO: 147212 - DNA, 1636 bp, Cannabis sativa
tgttatcaaacgtttgtttaactcttgaaaactttattcacatttgtctgaccatacgaatcattgatttttcttagttaactcggttagtggcatagagatcttagagaatcccttaacgaaatgtcgataataccctgctaaactgagaaaagttcaaacttctgtcacagattttggcctcggccaattcttcactgattcaatcttactcggatcaaccataattccatcttttccgagaatatgtcccagaaaagatacctcttacaaccagaattcacactttttgaactttccatacaacttgtgatccctaagtcgttgtaataccattcgaagattatgctcatgctcctcttctgactgggggtacacaaggatgtcatcgataaacactatgatgcatttgtcgaggaactccttcaatactctattcatgaaatccataaaggccgcaggagcatttttcaatccgaatgacattaccaaaaactcatattgtctatatctggttcaaaacatagtctttggtatatcttcttccgaaattataagctggtgaaaactggatcgtagatcaatctttgaaaatacagtcttcccctaaagttgatcgaataaatcatcaattctgggcaacgcatacttgttcttaatcgtcagcttatttagttctcgataatcaatacacattctaagggaaccatatttctttttcacgaacagaactggagctccctaggacaatacactgggtcgggtaaacccaatatccagcatcccctagatcaatctgctagagcaattctgtatggagctttagaaacaggttcggctccaggtgccaaattaatcacaaagtctatttctcgttgtggcagtaatcccaacaactcctcaagaaaaatgtaaagaaaatctttaacaactttgactacctcaggcccaaatatttcgggtcttctggagtcaatcacaactgctaaaaatcatacacatccactgtgtagtagatccctagcccttaatagtgaaataatcgggatccgagacccctaaaccggcccaacataaacaaatggaccttcaccttcaggctgaaaagtcaccattttctacttgcaatttatgctagcctaatacttggacaaaaaattcatcccaagtataatgtcaaactctgttaattccagctctataaggtcagcactcaactccctatcttctattctaactggcatagatctaatgcgcatattggagataactaactccctgctaggcattagggttccaaaccctctttcaataaaatcacatggcctacccaaaacatcgattacccgtgtagccacatatgagtgtgtagctcccgaatcaaataacatagtataaaaggagttgttgacaggaagctgacctatcaccacagaaggactggctgcaacatcagcttgagtgatggaaaacacccgagcaggtataggctttgcctctggcttctcctcttctttctttgcctgaaagaaatctttcttgaaatgccccaccatgccgcactaaaagcatgtcttcttgttgcactctctgggatgatgtttcttacaatgtaggcactcatggtaagagtaac

SEQ ID NO: 147213 - DNA, 772 bp, Cannabis sativa
gtatgtagtttgtttctattatatttgtgtgctgtttgattgcactggtgttagtttactatttttttgttggaaaggccgagatctagtttttatgtagtttctcagttttttactatttatcgatggtttatatatagtatgttgacatattgtcgatgctaagcaagcaaagtcagggaagaccattattaatggtatgttaatagtttatcgacaattttctaaaatcagtttttagcttgaattattgatggtttttcaattaaatgtcgatagttttgtctaattatcaatttctcaaatttaggactattgattgataggatatctattgacctcaaaaattggccaactaatagcggagtcgtattgaactgatgcttgttgcgtgttacacaattagaactagataataaaagaacacaaggatttttatagaggttcggccccctgagttagcgggtaatgacctactctcctttcagttgtattgataccgaaagataatactatttagatcactataagttggatctgatatagctctcttaaggttataatgcatgaagcagtaagtaggtctttaatgagagagatgaatttgtggaggtgtgtgagagagagagagagagatgtagagagccttttggacgtgtaataggaagagataagagaggattagggtttcagatttagagttgagagctgatgacttagggtttgagacttttgacttaggattttaaagataggctaatgctctttatat

SEQ ID NO: 147214 - DNA, 854 bp, Cannabis sativa
tgttcggactgtattctctgagcatactcgaagtcgattccacgtgtcaccatcatgtgatgccacgtcagagtgccgaaattgggataacattttccaccaagtctgtacgggacatccgaagttgtgtgtagacttcatttgagctgcttcttcatttggatgggtgacacgtgtcaagcgtgtctgttcgcgactcgatgtgaggcggactatgcgtcccttcggttttcaactaataaatggtctgacaattaatatttcgaaatccgattttctctcaccacggttgacggctgcactcgattattttttatttctcatattcgcttttaagaaggaaccaaggcatctgaggttcttttgaaatgattaaccctttctgttgcttgtctataaataccaacgagcatttgtacacaaattctttttcaccatccttctttgttaagtaagttcagagcgaaaatagaggtttttggcttcaagtttgctgaagtgccttcatcgaaattgctcatttggtttgacgttacctgaatccagacatctgattcatgagtaagttttcgatttcctttatgtttacttttgcatgttaactttttgaatgcaccttcgactttgttgtagaaaatttgtaggaaaccctaagtttagaaaccctgcgattctccttgtcatgggttcatgcgatttcacagtccataatgtttgctttctgaactgcataatgcctgtctttcatcttgcttattctaagttttgagttttcgttgaacattttttattctttaatctgttgagtactcctggtcggcattgtaagaaatattttaccaagacctagattt

SEQ ID NO: 147215 - DNA, 526 bp, Cannabis sativa
aaatttgctaaccatattatttttatcaaatttgttatttttgagatgtattttattaaattaaaattataagatgtgaaaaatgttagttttaacattttatcaaattagatatttttttaactaaaatttattttggcaaaaataacataaaattttgaaaattggttagtttaggtttgaatagaaattttatggtttctaaccataaaattttcaaacttattttacatttttttaataaaattggtaatatcctaaccataaaaatatcttatttttcaaattgtttattaaattataagattaagaatataatattaggaatgtctaaattttaaaattcaagatattatattatattatcttattagaaatttaattaatttaaatttttaaataaacttgaaaattaaaaaatggttaaatatttgaatttaagttagaatttaggatatttaggagatttgttaggtttttgaattttttcaaatattctcttacaacctaaattttaaattctagt

SEQ ID NO: 147216 - DNA, 556 bp, Cannabis sativa
ttcagcatatgctgaaacaagcctctccccgtctaatgttcaaatatccttcttttcggatgccgattggggggcttgtcaagacacacggcgctccatttcgggctattgtcttttccttggcacctctcttgtgtcatggaaataaaaaaaataacaaattatttcccgctcttccgctgaaacagaatatagagcgatggctaatgccacttttgaactcacctggatcatcactctcctcaaagattttggcgtcaaccttactactccagccctgctttattgcgacaacaccgctgcaattcacataagtaaaaatcctgtctatcatgaacgcacaaagcatgtggaaattgacttccatttcatacaagagaaggtccaacaaggctcgatcaagctacttcatgtctcctcacaaaacagcctcgctgacttcttcaccaaggcactcttaccaactcacttctccaacattgtatccaagatgggcttacttaacatctacactccatcttgaggggggctcttaggattagttttggattaagtt

SEQ ID NO: 147217 - DNA, 558 bp, Cannabis sativa
atatataaatcttaatttaacttataatttattataactacactcttctaactacaaattaaaaatattgtatctatcactatcattatttttttaaaatatatatttagacataatatataaaatatatttaaaagtaattaattctttaattaaattcaaattttgtcaaactattttctactataatccttatacatggagagattaatataaaatacatataacaaagaaattcattcttttattgtatatataaaatacgtatatatatatatatatataattacatctaaagagcacaccaatgtaaccgcactagttaacaaaaaaaattctcaaagatcaaaatttcaaaccccttatttcaaaaattaaaaaataaaaatacattacttaattaaaaaaaattaatatacatatattgcgcttgacatcacttaattaaacctgattaaaaggaaaattaattatacgtgcattacatggaatatcaacctagtatatctttatatattaaaagtgtctatttaacgacatttcttggtttaacagaat

SEQ ID NO: 147218 - DNA, 618 bp, Cannabis sativa
ttggcatcttctccccataactcagtatcatagtgaacaaggatagttggtaatgacacttgtactcctgctggtaatgtcaaactcccaagttgtgtctgcttgtgcactcttcgaaccagcaaaattacaggcggataaagccttaaaacttcgtacaaaatcatagtaacctacatgtatatccatgaaaaaatattataacaaaataaataacatatgtgtacgcatagatatatgagaacactgctattaagtacagtagtggtgtctagcaccacctaattaaaagtgacactttttatgattggttagtgatttctcataaaaattattatattaaattatataaaacttgatactttattgcaccaatagtgatattacaccttggaggttcatagacaccaatagtaacttttaccatttctctctatatatatatatatttatgtacttacaactttgaggtgtgctaggccatcaaaatccggactattatcaccaaagacttgcaaaacctcatctctagcgcgagcttgccaatgaggaaacctacttaacatgatcattgtccaattgagtaagacagaggtggtctcttggccagcaaagtaa

SEQ ID NO: 147219 - DNA, 613 bp, Cannabis sativa
ttttttagactattatatgggattgttagggaagtccttgcctaacaggagacatgttcaccagtctattgttaacttggggcctaaacttacttaagttcatcatgagattctctcttctccttatactattgaagaagtaaaagatgctgcattttcgatccctgggaacaaggctccaggacccgatggctttggtagtgccttttaccaagattgttggcaaattgttggtaaagacactgaggaggctgtattatctttcttgaactctgggcaaatccttaaggagataaatgccactaccattacactcattcctaaatcggtttgtcctaaaagtgtagctgattttagacctatctcctgttgtaatgtattgtacaagatagctactaaggtgatttgcaatagacttaggaaaattcaacctgatcttattgcagaaaaccaaggtggctttgttcatgggaggtatatagcacataatatcttggtatgccaggacctggtaagactctatggaaggaaaaattgtaagcctagttgtatgatcaagatcgatctaaggaaggcatatgatacagtggattgggatttcttggaggagatg

SEQ ID NO: 147220 - DNA, 821 bp, Cannabis sativa
  modified_base (411)..(422): a, c, t, g, unknown or other
tgtttttgaaaaatatgtttatttccaagataattagatttaaacatgttttggatagtgacacatttaggtcgaatatgacctttctcccacaaaatgaaaaatgggaatgaattgtcttctattccctttggaattgccaaacttaccgtgctgcttcttttctgtaacagcagagcattttgctgaagtgacagaaccgtgcaaggtagagaaagttcttccagaaacaaaattatcagatttgtcaaatttggtattgtaatcagattgagtagaaacataacctagaccagcatgattagcttgactagacatttgaatcttttcaaaaatgttggaacctggattaacattttgacaatctttttaatgttttcaagttccttactcaaagaaataatttcagannnnnnnnnnnncaattcagattcacaacatttaattttttcttccagctcattgatgttgttacacaagtcttcattatcttttactagggaacgattctcagcataaatttccaaccacatactaaacattaccttgtaagattcggatccaccttcttccttgttgtcatcgatcaaggtattattcaagcaaatgaattttcctttttcttgcaaatttctttacaaaatacttgttagagaaaccttttctttttcatcttcactactttcaaaatcatcactccacgtaatattcaaaccctttttatttttctttaaggtattggcacattcagattgaatatgaccatactgttgggttttacgccctaaataaaactatattccaatgtaatccagattatt

SEQ ID NO: 147221 - DNA, 578 bp, Cannabis sativa
  modified_base (196)..(197): a, c, t, g, unknown or other
aaaaaagaaaaaaaaaaaagattgtagtatttcatttttcatttattttggctcctagaataaatgtaaaagattgtctatttttgtttaaaagtcctgaaaagctgctttgtggtactcttatggtggtttgtccaaataattcataacttatctttgtttcaatgtttattcaaatgtttgtcctaaattgatnnatccatttcgagtgctcacctttccattccaactccatgagtgaaatccttagccatgaataaatattttcaaacacctgtgaggctaatggagttgagacttccacttggtatatttttttcgaaagcatctatgtgttatggtttgcggtaagaaggttcaggtttggtgcacacactcacactctagatttattcaaggtaattcagtatagttcttattggcatgttactaacattttgcttgaatatttgtgttatttttaaaaaatttaacctgaaaatattttgttgacactatttttcttcgcttgaattgctagagactagcaataagctagttgagggttgtgattaaggctcaaattgatacattttaag

SEQ ID NO: 147222 - DNA, 702 bp, Cannabis sativa
  modified_base (630)..(630): a, c, t, g, unknown or other
tcccagtctggttccatttctggtgccgggccacgagctgggtcctaggttcaagtttgggtttgggtcaggtactaggtcccagtccttgttctatttcccaggtcgctatcctcattctgggtctaggtcccgattattgtgtgggtgtgggtcacggtctaggttcgggttcgagtcctactctcggttcgggtttacgtctctgtcattgttttgatctgggtttgggtttggctttagctcctggtgctggtcctagtactagttcgattctagttcaatttgcaattcaaagttcgagtttgggttttagttcgggtcagagttcgagtcatggtctgagtttgggttggggttcagattttaatttaggtccagatcaggctccgggtgtaggttcacgtccttggtcttggtctaggttgggtccgagtcccatgttcccatcccgatctgagtttggatttagttctgtgtctaagtccttggttttgatccttgactaggttcgagtttgggtccgggtccgggtctagctttgggtctggttctaggtgtgggtgtttgagttcggggcagagtctgtatccgggtttgcgtctaggtctggacctcgatctgggtctnggttcgggtccaggtccaagttcaggtcccaagtgcgggttcaagtttgggtgtgggttaggatctcggtcc

SEQ ID NO: 147223 - DNA, 717 bp, Cannabis sativa
  modified_base (458)..(469): a, c, t, g, unknown or other
gttggtagggtttgtttcgtaccctgattaccactgactgatataccacaaacaccctgtactttcccgtacttgtgctcgtatcactgtaatgtactctttaaccatattaactatacaaatgcactctgtaccataattgtacaagtggtggtagtgcaactaacacataagcatgcatatacacttaacatatatatacactctgatattcatattacacattatacacagttcttaccttctttccagattcaagtgtgctggccgatctgaacggaaagtctcgtgctagatggatgccctaatcacataatgaaaccgagtaaatcacatgattcaaaccctaatttgggaaacccgaacccacaaccctaggttctgttatactctctatgaattactctaactcatgaaatagggaaacacccagctacgacactgaaatggacgagaannnnnnnnnnnngaaccttgccaaaaccggctagccagttttacaaggttctattatattctcaagggattacagtaactcagaaattagggaaacacctaactacaacattggaatgcacaagaattgagaaaatgaagcattcaggaacgttgccaaaatcggcaagccggtttacactagttcacccaaaaccccatatttcttgctaaaaactccaccaaatgcaaccatactttccagaacacctatacaatgca

SEQ ID NO: 147224 - DNA, 681 bp, Cannabis sativa
tgcagcccccaaagagcagtgtgaacaaccaccctgttaggctccttctagtgtctaggtttgctgcaaaatctgagtccacaaaaccagtgatttcttccttgtattgattctccttactgaacacaataccagtgtccagagtacctttcaggtacctcataatccatttcagtgcttcccaatgtttaggacataggtctgaaatgtacctgctgaccacactcattgcatgagctataagttaggtcttgaacataccatggagtatataagactcccaacacaactttcatagggaacattgctcatcttggctctttctgcattatctatttttgggtgactgagatgcagacaacttgaagtgagcaagtggtgttgcaactggtttgcacttgtccatgccaaacttgttcaatactttctgtaggtaggcagcttgagaaagtactatcgagccagacttaggtctctttatgtctatcccaagaattctctttgcctttcccaaatctttcatctcaaactcatcactgagtttcctttacatcttgtcaatctatgacttttctttgctaaagatcaaacatagagtagcaaataggtttgattattgaaatacacacatgagtcatacttacttttagtgtatccaatattcaacatataagtgtcaaa

SEQ ID NO: 147225 - DNA, 569 bp, Cannabis sativa
gagaaatctgcaccaagagtccaaattccaattgcatcttcttgtgtccttattgttgaagctatgaagagacttttgaaagagtccaactgctgcttctacttactatgttcttcattggcctactatgtattaagaatagttgatgggattcacttactgttcgtttcttatggtgtattagataatattgatttgtatagtattattttaaattatattgtatatttttatgtaatattatgttaaattttgatttttatataaaaatattgtatattttatatgcacacaatactaaaatgtgtaccaaatggatgctatgatatgaatggaacgtatctaagaacttagacgaagacttgccttccataacgtgctttgggatcattgatcaaaagaggaagtttcaagtgcaccatgcaactacatatagaaatatatataaaaaaattacaggaacaaaactaggggaattactctatatactatttttttaactttttttcaaatttacgatttggatttttagagtggttgcaacgctagttgcaatagagatttctgta

SEQ ID NO: 147226 - DNA, 583 bp, Cannabis sativa
aaatgttgtttttgccgtgtcccagtataattgtaaagttttggtccaaaaacagtatttttgtaaaattcccttacaaaactattaaatttgcgggccatataaaacctgccttataaaattattgacacaggacccctttttatttatgtttgggccatacaattttgataaatatatatcaaaatagcatgacacacatttattgatagctgagcctatagttattttattttcttgaagggtacaatggttcaaaagtttgttgtgggattaaataattggtattgacttatttattataatttgttttttccttccttaaaagatccacagatttagtcggacgtgtattcattatcacccatacaatactttaacttcactcacaccacaccataccaccatctctacctagctacacccattatgacattaatatctcactagtactatatgttatattattttatgtaatataacatgtagattaaataattaagtgtgacaaagtattaattttgtcaaattataacatgcattatggagttacaaaatttgtgtagaatgatctcaaaatagg

SEQ ID NO: 147227 - DNA, 1278 bp, Cannabis sativa
gatttaggattttctatattaaagaacttttaggaatatgtttgcatctgtgatttatatatttcttgagtattttataaatcctaacattctgctcattgacgaacttataattaataatatattaattttgttcctttatttgttttgtcttttatcactttgcatgcaattcaacttatataacaattattttttttttcaaatagtttgaagtacatgcatggtttgagtattgctttggtaagctttcctagtttgtgttagtgataaatacaagtctttgtctaatagttttacctatacaatgactatataatttgacctaattttctgctagaacagatcaccattattattttatattttatttatattttaatcacttcatgtatgcatgtaattttgtttttattatttttatgtggaataaaagtatttttaggtttggcgaccttgggtactcgatcgagggctaaaaatgtcataataggcttattgatagaattgataggaatattgtaataagtggatagcataagttttggggtaattaggagtatgtgggatttgacttagcgccctaaaaatataaatttcttagtagctaagaaattgtaagataattataaataataaagtttttattaacattattattatattattaatattaatattaatattattattatattatttttatataaactaatcagttagtgataagtttaatatatatatacattattataagtttataatagtaaaacaaaaatagaacaataacttccatcagatctgttagtagagattgcctcaactccatcaacacggagtgcctgaactctttcatcactgtctgatgcaactcgtttgtcacagattttctcacctctgctaatatagattcacaaaactctggaataaaagattccttaacctcgtcaaagatagattgcttcatagtgacgaacccctttccaatgtctttagagatgtcgactttgaaagagtcaaatactcttagtaattcttgacaagtagtgtctaattttttatccctttccttcatttcatctcttaagatatagttgcagcatgtagaggctgaggttcctccccggttggatgatgggatggaagtgtcttttgtatggtcatatgtcttcctaaacataggagggtgtagaataatctcccccaaaatcagaaaaatttcaagatcactttacaaaaaaaaaaaaaaagtagcaattaacaaaattgtattggcct

SEQ ID NO: 147228 - DNA, 607 bp, Cannabis sativa
  modified_base (568)..(579): a, c, t, g, unknown or other
aataccaagaacataagttgcttcctaacattgctggctcgcatgatagtgttaaaattattcaagtgcgcgaccggatctgtagtcccatagtatgacgagacgtgtgggttcttaaatcctgggggaattcagcactcataatatttggatggaaaggctcaggctccttgtctgagttgtaaccaggaaattttccatattccccatcttaatacctcttgaatttatcttccaaatcaataattcgcaattggataggatcctcttgcttttgattgagttgttgacgaaggtcaggtttttttggttcaattgattatgcaaatctggctgttgtggatcgtagttacttacagaccttgtccttgagtaactttctgttctactagtgcccgtattttcttgatcagtattgcgacaagttctatctcctccttgcgtagatcgactacgagttcttgtacgtccagaactggaacttgcctcttcacgcactggccttctctttttagaaagggttgatacatgccccctactggggtttgtattgttgggttttatgccnnnnnnnnnnnncattacaatctgattagttaccaattta

SEQ ID NO: 147229 - DNA, 519 bp, Cannabis sativa
tgaaccatgcagcataaaatgttatttctgatctttattaataagtaaatctgatgatatgaaatgggttttatttagggcacaaaacccaacagagtctgcaggacttgtcagttgagaggagggcattccgggaggaggcctagcagaggggggctcaggcggaggcgaggcaccaggaggagctgaaggttcaaggcgaagctgtggcccaggccaagcgggagttgcgggaagccaaggaagctatggacgagctaaatgccaagttaaaatccatggaggatctgcaccaagcggatttgcagtcgacggccaatctaaccgtggaagtgaaggagctcagggactttaaagatcaagccttaaagaaggccaaaagagatgagctcctgaccccatcatctgcaaacactgcgtcaaacgcttcgacgatggcatttacatggcctggcagtcaaatggccagaacatcaagctcgacttttatcccaagcttgaggaagtccttgttcgctt

SEQ ID NO: 147230 - DNA, 582 bp, Cannabis sativa
atattatttattattaatttattaatggaaaaatatattcaaactatcttatttaaaacttcctttttcttacgttattactttatttatttttttatgttttttcaaattaaattttttaataaatctatatctatatctatacatttattcgaaaaataaaataaaataaaataaataaataaatatacataaaaaaaattaaaacttacgtacaaatcttaactatttataattattaacaatttaaaaataaaaatattaataatttcaaacctatttaaatttagtttctaagtttaagaatctattgagtgaaggttctttgtactgtctgcaaaatttaaaaattgtggcaaccacatgtgagtacagaacactttccaatgactataaaattttatttttgattacaacttcaatagagacactagaaggagaaatagttaatatttcgatcaatggatttcaattcataactctaaatttaactcatttatacgtgttaatgataacacaatactctcaggtattcatttaattattaattgttgcccttgattttgcccaatatacgtggac

SEQ ID NO: 147231 - DNA, 660 bp, Cannabis sativa
aacccgactgttctgcaccagcaacccacaaaaccagtcgatagacatgtcttcaccaacaccagcagcaggaacgcatgacagattccaacaagaacgagcaaaattacaactgaacaacacatgagaagtcgtttcaggcgcaagattacacataggacaggttagatcgacatgtacatgtctttgtgaaagctgtactttggtggggagacaacctgcaacaacacgccatagcaggtgttgaaccttggctgggacattcaaaagccaaagcttcttccagacgctgtccacaccagtaaccgaccattcaccattggatcgttgcaacaatttgtacgcactacgaactgagtaaataccggttgtttcttcagaccaggaccagcaatcctccatactagagtcacacaactgaatggataaaattaaagctctatcatgaggattaaaaatatcattgattatctccaaatcccaatcttttcgatccatctgcattaggctgtcaaccgttcttccttcaagactaggatgaaaagtggtgacaaatttgttgtccaaaccaggtagccaagggtctgccataataaaggtagattttccatcacctatagaccttgaaacacccatctgaagcagagatttggcctccaa

SEQ ID NO: 147232 - DNA, 541 bp, Cannabis sativa
aggtttagtagcttatactaagcgttaaaatttctctgcataagttttttgtgctagttcgatgcattgtacagtatgggtgccccccaagtgaccatttaaacaagtctcttgctcacttgctattcaccaagtttcacagactttgcctgggttctatcttgcgagggtaccatagtacgcaggtaaaactaagagaataagtttaaaaagttactctgtgagcaagtgttcatagacacaataaacagaatataaatattgatattttcattaattggtctttgttgctgtgcaacttacatgaattgaatctacaagcctatattacataaatttagcttctagatgtcaagtggctacccctgcttgcctagtaaagtagaggccaatattgaagactagtgggagaccacacccaaaaagggtcgtgggtgctcgctttttgtactctaatgttgggtaataaaactgctactttggagtagagttttgtaagtcggttattggtagtatttgtgaaggtgctctccattctagt

SEQ ID NO: 147233 - DNA, 568 bp, Cannabis sativa
tatgaactacgttcgatttgattcatcccaaaggatacgtaggcaacctaattgtaaagattagctacaactacaaatcctcaaaatctcaaatgaggtcattcaccttattaaatcttaaataaagtcattcacctcattaaatcccaaataagatcattcaccttaaaaattttgcgtaagatcttttacctcaaaaaaaattccaagtgaagtcatttatctcaaaatctcaaagtgagttaattctccacaaaattgtcgaagatacaaaatcttttaacactctccgaactatgtttgacttgattcctaaaaaaagatatgtagccaacttagatgctaagactaagtgtagtcgccagtaccacaaaatgatatgaaacaaaaatctcaaaactctataaaaggtcatccacctatgagtttttctaaatttttaaatagcaaagaattccttaaaagagtcacataccggaattcttatattcaaattctaaaaatatcatattccgaactagaagtggcttgatctttcacaaaaaaagtatgtaggcagctcagttag

SEQ ID NO: 147234 - DNA, 683 bp, Cannabis sativa
tacaccaagatatcatcaatgaatgccaccacaaacttatccaagaaaggtctaaatactctattcatgagatccataaatgcagcaggtgcattagtaaccccaagggcatcaccaaaaactcaaagtgtccatagcgtgtcctgaaagtagtcttagggatatcttcttccctaatcctcaattgatggtagcctgacctcaagtcaatctttgaaaataactttgaaccacaaagttgatcaaataattcatcaatcctcggtaaagaatatttgtttgtaattgtcatctgattcaattttctatagtcgacacaaagtcgcaaagttccatcagctttcttggacaacaagactggagctccctatggagaagtactatgtctgatataacccttatccattaactcccctaattgttttttcaatttagccaactctgtaggtgccatgcggtaaggcgcaatagaaactagttgagctctaggaatcaaatcaatgcaaaactcgatctccccatcaggtggtaactttggtaaatcctctggaaacacatccagaaaaccactaaccaatgatatccaagagaactggtataaatccctagactcatcctcgatcacaaatagattcccataacactctaagtttctctttccacctaagcatgcccttaagata

SEQ ID NO: 147235 - DNA, 512 bp, Cannabis sativa
agttaaaattctgcatagtccatgagtaaatcttattcagatttctgagtatttttcaggacctctttcatatgagtttttttatcccttttttaagcttgtttgccactatttataagtacatagtaggcagttaattacaaagttgaccagaatatgtttacagcaattatccctaaaatcgtgggatttgattacatatcacgaaatgtaaatgcggtttatgatttgaaaatcgtatagttgtgatttttccgcttttactgggtcaaaattgtcgtgtattaaacacgtctttaattgttgaatctggagatttctcgacagaaacttgattatagtgatcccaataacaagctggggccattcttccttccgcggttgatgatgtatgttatgtgtcgattgcagttatttataaagaaatcttctgcctcgccagggttgtaagcctcactcctgttagttagatgtagctataggaagtctttccatagcgagatggtcatctc

SEQ ID NO: 147236 - DNA, 716 bp, Cannabis sativa
  modified_base (420)..(427): a, c, t, g, unknown or other
actaagtcttcccatttttttccaatcagaaaggattacaagcttaccaagctagctcgactttatgtagacaatatagttcgactacatggagtgccttcaagaattatttttgatagagatccttgattacatcaaggttttggaaggccttgcaacaagccttaagaaccgaacttcacttgagtactgcccatcatccacagacagatggaaagtctgagaggaccatacagactttggaagacatgctttcctcttgtgttttggattttggaggtagttggggagaacatttgtaactagtggaattcacatacaacaatagctaccaagccagtataggcacggctccttatgaggccttatatgggagaccctgcagataactattgtgttgggcagaactagatgagcatnnnnnnnntggaccccagattatcactagtaccactgaaaagatgaagggaatccaagaaagacttaaagttgttcagagtcgttagaaaagctttgacgatctccatcgacgggaatttgagtttgatgttggtgattatgtcttcttgaaagttattcatatgcatggcgtaacaaagattcggagtgaagggtaagctagccccgaggtatatgggaccttttgaggttatcaagagaattggggagatcgcttatcgattaaacttaccaggacagttgagacatgttcataa

SEQ ID NO: 147237 - DNA, 873 bp, Cannabis sativa
atttttctaatggctaactataaaggaagtcttttggctcctagacatagattttatttatcgaaggaacaattttaactattctaaaaaagataaaagtcatgaaaatatttccttaagaatcaagagtgagaggtttcatgtatgcttcggtaagcattagaccagacacctgatgttaagtgggagttatgagtaagtatcagtttaatctagaaaatgaacattagaagacaatcaactaaatcttaagatcgaaagagtaactatatgttagtcgataagagttgtatttaatactcttagactataccaaattaaatttctagactgacgataatgctagaaagtctacttatgagatggtgattactttggaggtggagcagtatttttagagaagtgtaaaaactaatttagagtctcagtgagacagaatgttaaagtggcccatgtaacgccccgatttcccgagacgtcacactcgctagtccattgaaaactatttataataaagacaataaaataactcattattttaaaataaaaacacttgattcatttataaatttttaaacattaacttttacaaaagtaatcgagtcataatcccctaacatgtaatccacgcatcgagctcgccatcctcactgtttagttttgtctttaccacacagagtacctgtgagctaatgtccagtaagaagagctatgtaggacataccccctcacccaactagataatataaccataaatataacagtttcacaacattaaaatcatccatactgtgcttgcatacatatatcaacatatgacgtcacgcattattctcatacgatataacatcatatcacattataaactgaatg

SEQ ID NO: 147238 - DNA, 525 bp, Cannabis sativa
gtaagctcatggtgggttattagagagtagatgcttctttgtcgttcctaattgtaattcttgcttttcattctttcattgataaaattcaattgtcatcactcccttcattaacctctttcaattcctcatcgttttttgttcacttaaacttgaggaattcccatcttattatcaacttgaatcttgttcatttctacttattttaacttgcatcaatttctcttgagctgacacaactttaaaattccccaatcacttgcagttaactaccattataaagtgaattaatgtaaccaacaatgctcataccaggtacccataactaaactggaaatacacatttcctgaattctctactaataacaattaatcaaagattatttcgtgatcctaaaatttctttttttgtgtttggtaaagatcttgatgatcttttcaacatacccagaaatatactgttgggtttttatgccctaaataaaacttcatttcaatgtaatccattttattcaacatcaataa

SEQ ID NO: 147239 - DNA, 553 bp, Cannabis sativa
attttgaaaattagagcagtaactaaagaacttaatgagattagcatctgcttaagaacttgccgtgtctgactactcatgttcattttgcatgaatactaaagtagtatgagacccaaccccaacacaacactcaacccaccgatccgacaaaaagatatgttattttctaaagagtattgctatcaggcagtaatatggaactggatattaaattgtaacattagcgatattacacttcacaagaatactagacactgtgagtgcagtcaaatcaagtggtacaatccattttttagtttttgaaaggagatacaatcagttttgattgaactaattttattacattgcacttacacaaatacaggtctccaagaagtatttgacatgaatatgactctttattaaaatttaaaggtaacaatttttttctcattttttttaatcccatatttaaaataaaggaaaattaccccatatagtattttttaaactttttttgtttttttcaaatttacggtttgagtttctaaaatggttgcagcgctagttg

SEQ ID NO: 147240 - DNA, 690 bp, Cannabis sativa
tcggcagaggggcagggcacgtggtcggggtaatgctaacctgacctagaagtgccaagaggaaagagttcagcaacctgacctagaaagaaaatatgagcgttactgagtacaaagcgcagtttaatcagttagggaggttggcctcgggaattcggccagctgattttagtaaaaagggaaagtatttcgatggagttaatgggaagattcgtcttacctgatgattactacggatgacaaaaccacctatgctgaaatgctggaaaaagcactacgtgctgacggcgcaattggatgtatgactaagtctgctaggactccagtggttggcggggctcctacccctcctacataaggctttagcaggggaggtagtggttcggccatggataaaaaaaggaaggcatccactgcaactggtggttcaggtcagaacaagagtttctggggtaaccagagtcgaggcagtcatcagggtaattctgagacccgttatacgtacctagagttccccagttgtaaaaggcataacctgggtgagtgtagagggcaagggtgctacaagagggattgccctcaacttagaaccaaagcaccaaaagctccgccgagacccactcctgctagggtgttcgccattactcagcctgatgcagaagccaccccttcagtggtgacaggtcagct

SEQ ID NO: 147241 - DNA, 2094 bp, Cannabis sativa
  modified_base (186)..(186): a, c, t, g, unknown or other
gggcacaaaacccaacatgttcctgtttcgaaagagccttctgcggttgagagtgaaatttctgtcaagcttgatgctttttctgagaaatttgatggttttgaggtaaagattgatttgctacgtacttcccaacagaagatttcatctgatttggttgagttgaaagagtttgtgtctgcacantttgtttcttttgctgctcagatggcttcaatgcagacacagttctctattgttttcaccgattcttatgctaaggtatgttatttttttaatggttgtttttcagtttttttaagttgttttatactgatttaaattatattttaaaaataggacaaagggagtgactcttccaatgatgatggtggaagtgataatgaagaagacattgatttagatgaatttgaagaaacagatgacaatgaagaagaaaatgctgtaggtgatgatgaagatgagggtagtgaaggagaagagaaggatggtgaagctgatgaaaattctgagtccaaagaaaaagatgataagggcagtgatgatgaatgcactgatagtgagaagaaggtagataattagacaatgtaactaggttttagttactttgtgtgttttattttgttgtaagtccatttaggcaatagatttgtaattctatgttgttgttatgtcctttcttatgttgtagtctttttttttttttttttgcaactaatatttagactatttatttgtatttcttatgttattttgatggctatgtttatagattatgttgtttgccattattgttggtctttttttattttattttttatgtcttttattttgtttttttagttgttatgtagttttttcttagttgtttaacacttttagaaaaaataactttatttttttttctctaattttttttttcttgtattttttctgtatcaagaatttcgttgatttcaatgacggatctactcaaatagatgttgaggcaactgttcagtccggtggaaaagcagttgagattatggtaatgttgattttgtgttgtgtaatggttgtgtaatggttgttattatttaaatttactctaattattttttataatatatatataaacaggtgtcttcagatggaattggtggtgattctggtaaccagattacagtttctgaaaatgttgagcttacagattgtcgtgttgtttgtgttgaggtttggttgttttatggttgtttttagtttctccataatttttgtattaacactgactttttttttgaaaaaaatatcttagatggtacaataggtctcactgttgattctaatattcaacttgttgaagataacccaattcctattgaaggaactcctcttgttgacaagaggaaatctaagaaacccatagcgttgacgtctccgtttatggagtttgactcttccatttctagttctaaagatggttctggttatggagttgttaagtatgtggctggtttatgtcctcttggtgataaaattggagaagatgtagaccataaagacgagaatgattttgacttatggcttggtgaaggacggcgatcaaagaaagatcagtaagtgtttcattttagcacttttgttgtgttttttgtttattttgttttttactttactatttatgtttcaattttttgttatctcttagccatgacaaggacaaggtttacttgaagggtaaggataagattgttcccccctattcgttttggcgcggaagatgttgcaaccaagatgtggttccacaagcttgcatatcctggccaatgtttaactaattctgtaagtttattatttttattttttattgatttttttaaaaatgtcagtatatagttttcttcatgatgtttgttggttgtttttgagttgttgatatatacttcgttttctgaatttttgacatgtctaatttttttattgtttagcatttggatatgattttttactatttacgtaaaaaaggaaagtatgcaaaggagccaaaggttaagttcacaaccaccgattgcttattcttcaaaaccattcatgctttgtatgaaaaatttattg

SEQ ID NO: 147242 - DNA, 951 bp, Cannabis sativa
attattagttagttgtttgattatatatgaataaaatttattatgtccatcaattgattaccttcattctctgcacaacttgttccttaaaatgttgaggtacatcagaaaagtctaagtagttccccagcaataatgtgctcacttcaactcccaactcccggatgaaagctttggttctccaagccaactacttttcctgttgcaggatcaagcgtaaggggcaatggcccctgattcgcacgcctgtgagtctctaatggtatattactagcaacaccacgaccttcttttgggcggtggtgctgcctcgcaagttgagggtatcctactaggatctggtggatcaaaaccataaccgtctcccccgtgagaagaagctatatcagctgacattatgactctttaaaagcaaagttgtatgactaaattagtataaatatagattagcaaaaatatttatagtttgaattacaattaacatcatcaaattcatcacttataatattattacaaacaaattaataacataagtaaactaatagccactaccacactcgttattttcagaaacaatatcgtcttcacgtcgatcaattagcaacttgtcaccttcgtcatctattacatcatcaacgtcaccatccacaacattttcatcagcctgatttatattcaaattttgtgtagtatcaaagtccttccaagctaatccatcaaccggatgacgcatcactcgttcatccttagattttccagtatgatgccttaccatgtattttgttgtatgtcttgaaccatataatcttttcaaccgaggtgtcaacagaatatagcgcaacaccttacgaggcaccttttttccattagcttttgttgaagtaatccatcgactacttccacaaattggacaagcatctttggtttcatgctctttataaaataagcagc

SEQ ID NO: 147243 - DNA, 578 bp, Cannabis sativa
gaagcaaggtcttatttggaaagtgggtgatggctcaactattcgcactattgaagaccattggcttcctcacagtaggattaagtcatattcctctctccctccctctgagtctactctttcttttttcctctccccatcgggggcttgggaccctattaagcttcaccagttttttgatgagcagactattgatcatatccttgatgttcctatatctggtaatggatgtagtgatgatttaatttggagtaggaattcttctggtatattcacggtcaaatctgcatatcacttggcggttacttctagagatattccttcttcctcatcttttgatcagtgtaaacgtttctggtctaaaatttggtcttcctcagtcccttcaaaagttaaacacctggtgtggcgtgtgttgtctaattctgtcccagttgcatccctcttattttttcgacacattatatcttctcctgtttgtcctctttgtcattcggaatgggaaactgtggagcatgcgttcctggggtgtgtgaatgtaaagaaagcttggaaacattctccattgtttcagtttt

SEQ ID NO: 147244 - DNA, 579 bp, Cannabis sativa
  modified_base (460)..(465): a, c, t, g, unknown or other
cgcctcaaaatgagcttgaattgacgccatcctaaacaattcagtcaactggttcatgatatctgcaactgtgagagtattggcaaaccttgtttgtaaggtatcgaccatgctagacaacataaagtatcgagctttgttgttagcatttttccaacgctcaaacttttccttgactacctttgtcgcattctcacctagctgctcaggagcctcttcaatcaacaaaaatagggcattttcaccaatgagagcaatattaatgttctctctttaattgacaaagttagctctagagagcttgttgtcaatcgacagtgacaccatggggttgttcatagtcatattgggtactacaagtatcaataaatagaaatcaagtaacgtttaatacaaaatcatacacatttagaaattattagcacttagcaagtacgaatgacaagtgaaaatactaaannnnnnaatcctaaataatttccaaggattccaacaagctgataccagtatctcgtttaggcgagagtcaaagataccatccattaaatagagtagtctgttggaaatattttaccacga

SEQ ID NO: 147245 - DNA, 544 bp, Cannabis sativa
  modified_base (501)..(507): a, c, t, g, unknown or other
atcaaggctgaacatcagagactgatatgtttattgcaacctttgacacttcgtgagtggaagtgggaggatatcactacagactttgtgattggattacctagaaccacgggtatgtacaattgaatttgggttgtgataaatcaattcacgaagtctgcacattttctaccggtaaaaacaacatttacagtgcatcagtatgcaaaattgtatgtggaagagatagtgatattacatggtgttccaaagtccattatatgagatagagatctgaagtttacttctatgttctggcagagtctaaagctggctatgggtaccaaactaaaattcagtacaactctccatcctcagactaatgttacagtttgaaaggacaattcagatactggaagacatgttgcgagcctgtgttatggattttgagggctcttggagaaaatacctacaacttatagagttctcgtacaacaacagctaccagagtacaatagggannnnnnnctatgagttgttatatggcaggaagtgtagatctccc

SEQ ID NO: 147246 - DNA, 639 bp, Cannabis sativa
tcaaaattctaacaaataaatgctaacctgtatttctgtccaaactttatttttttccaatttttatacaacaaccctatcatctgatggcatataactcctaaagttgatacgagcttggcgtagcttttgcctcagtattgtcctttgtcattaacctcgagggccactcttttgccttgatttattagcttggatatttcattcatttcagtaggtcctcgtgtagatattattgttggacactctgcctcagggtctgaatcagatcctgaacccgagttagccatatctacaccattaacaaacaaaatttaaagttagctatatatataacaggtaatccatacaaaatattaaatgcataaacaaattatgtattcagcataaataaacacaatataaagtaagctatatatcaagttaccaattggacacgttttcttctctttttttgtttatgtttgcttgaatcacaatgcacctatattccctcattgatatcatttctaatgtattcagcattgtcttccttaaggttaccatcaattcccataacttgctcatgaattggttgtccaacaatgaagtcatcataacataagtcagcattcccctcatccttttcattctctaaga

SEQ ID NO: 147247 - DNA, 827 bp, Cannabis sativa
cctattagaattttgttttatatggattttaattaagttttaaatcatattttttaaataaaggataagttgatatgtatcaaataaaactcatttattcttcatttttacaataatagaaaaaaattgacataaaccatttctctctcaagctctccctctctcttcgaaaccccctagaccaactagggtttggtttgatttttctacatttcaagcttgtttcagtaaggaaaaagtggtcttaagctttaggtaaatttctagtatccttttctttgatttcttgaagtgtaagaaaatggatttttgcatgaaatgtaattttggttgttgttcttgctgtggtagtttgttattgatttcagaggttaaattatgtttatataggttgatttgagcatgttttagtggctgtaagtaggtttgatcaagttttgagttttagaactcaaacttggagctttaatggtgtttttcaattctgagcttggatagttgttttattgcttggaagtggtttattggggtataatatgcaggtcttgaaggtttggttgtgtttggaatcgatttggttagggtttgagtttgtttggtttttctggggaaaattggcaaaccggttttacaggtgccagtaaaccggttacccagattttgcagtagggttccctgaaaaattcagcttgtcgattcacgttagttttaggtttctggtcggttaattccctgctagtttaggatattgccatattaagttgttgtagataaggttttggtttaaaacctaagtcctggttgggatttagcgagtcgcttattcg

SEQ ID NO: 147248 - DNA, 812 bp, Cannabis sativa
ctcgatcccgaacccaaactcagaaatgggacctgggacctaaaccaaaaccagacgtagacccgtgacaatgatctagatcttgactcgggatttgggtaacggcacctggaacagaccaatagtcggggtctagatctgggactcagactagaccccgactactgacctataccttgaacccaaaattagaacctgaacaagaattgccgaactaggaccctagaaaaagactaggaccttgactaggacccggacccagacctagaaccgaacatagacctttcctcagacctaaactgagactgtaactcgggcctggacacggtcgtgtgcccagaccggaactgagacacggacttggacctaaattgtggacccgatcccaaacacagacttggacctagatagggatccggatatgaacttggactcgaaccaagaccctgactgggatcgaaatgctggacctagatttggaccgagatcttgaccgagacccaaacttggacccacactcgggactcaaacttgaacctggacccgaacctagacccagatcgatgtccagaccttgacacaaacacggacacaaactcgaacccaaactcaaacacccacacctagaatcagacgcaaagctagacccagacccagaccgaaactcgaacccagaccaagatcagattaaggacatagaccgagaacttaatccagactcagatcgggattggaacttgggacttggagccaacctagaccaagacctaggacgcgaacccacactttgaccaggacttgaactctgaccc

SEQ ID NO: 147249 - DNA, 658 bp, Cannabis sativa
acacttgcaaggagttagagcggcttatggccaagttctggtggcactcagattcaagtagcggtaagggtattaattggatgagctgggagcggatgtgtcgccataaaaatgcaggggattgggatttcgaagcttgagagactttaatttggctcttttgggaaagtaatattggcgtttgctggttaatgctaattctttggttagtaggctttataaggctaaatattatgctactggtaatctgttttctgctgtattgggagacaattctagtttcatttggcgtagtattcttgaagcaaattaaagatcttatccacacctgtgctcaaagaacaattgctagtgggaaaaatgtctccattctaaatgatccttggcttccacataattcaaacaagtatgttgtctcacggaaccctactcttgtgaataattcggccagcttcctctttcaagtcggtactcgagcgtgggatgaggatgttgtgagggacctgtttgttgcccgtgatcaggaccttattttgtccattcagcttagtcattcggcagctaataatggttggagttggcgacttgagacttgtgggaattattcggttaaaagtgcatataaattcttacaagaatctaagggtgcttagtgccg

SEQ ID NO: 147250 - DNA, 1029 bp, Cannabis sativa
ctttcaacttactcctctctttctttcttattttttttttttatgaaaagataatttattttatattaaaaaagaatgactattaagtggggcacaaaaaatattatatttggctgaagagccatagaatttaattttttaaaaaataaaaaaagtattatttaattatctttgttggtagccttagaatagtaataaattaataattagtgaataaatttaatagctttaaataaatactttaaatgaatgcaagatttcttaaaaaaaaaaaaggattgcaggaccagtcacgctgtgtgactgcatccgcatcctatatatatatggaacactttttaataggtaatacctattgatgggtactaaaaaaattaataatataataatctaataaccttttatagcaagttaccaacaatatttttttttaaaaaataattatatttatcttttataaaattagaaagaatgattacaactaatagtatggaaaaattatatattatttttaaaaattaattgaaactactaccttgttattttattaaattgtgaggacattaatcattaatttatcattgtaaaattaacaatcacttacatgtatattaatgtatttttttcatcaggagacagaaaccttatatgttattattggaaaaatcagtagacaaagataaattgaaaaattcagaaacataacaagcagtaggcaaagataaattgaaaaaatatatactaatgtattaatgtgtaagcataacaagtagtagacaaaaataaattgaaatttttttataaaaagataaatatacattgtttttctttttaatctttaaaatagtttttattaaaaaaaaattgttagttttttatacgtgtgtttcacttctttaacaacaattccatatataatttttttttcctattaatactttcattcatttattttaggaatgtagagagaataaaaaactcaaacaaagaagtgggaaaataagaaatattaattttttaatatttaat

SEQ ID NO: 147251 - DNA, 725 bp, Cannabis sativa
gaggtcaacattttggtgtttttaatgagagcagaatcaagaatcgctcttcattctaaatctaaccttaagtacaatggtggtacagactcgtaggggccgggttgatccggcaaatccacatgcggtggatcctgcattgcaaaacccaagaaacataagggttcttccagctattaatcctgaacagccgtcgaatgtgggtcatggtttaacgactcctgtgatgaaatcgcgcctggtgtgcaagagacgggaataccaattcagcacccagccagggcatttatagcacagccgttccgcctgccaccaacgttcgaacgaccattggagatgatattgagatccaaaattttcgtgctgctcttggactcatgcagggccataccaacaccctacatcatgatcaggaggaactccacgcagaagtaaatcttgcgttcgaggaacaaagacgcatgtttgccaagtggagagacaaagagatggaagtgttaagggctcatcatgcggagattgacgatcgtagttggcaagctattgtgctgataggaaaagcctaccaaactgtcgggaagcaacccccgaaggtcatcccccttggtgaaacagacgaagatccaacgatgaatactacccagactataaatggtcagccgccaaatctccggtcacaagtttcgcttgtgggccaagcagtaggtggacagaccttgtctagt

SEQ ID NO: 147252 - DNA, 978 bp, Cannabis sativa
  modified_base (73)..(73): a, c, t, g, unknown or other
ttttttttttttttctttttgcctcttttaatggaataataagtttttttttaatattgatgaaactggtttntaaagttagtatcgtttttaaattataatttttttttcattatcttgttgatgaaactatttttttattcttttaatgaaattattagtttctttcaatattgatgaaaattgtctttaaagtttgtattatttttagattataattttttatatttttttttcaagatgatgttgatgaaactagttttttttctgttgcttttaatgaaataatttgtttttaataaaaaaaaaaataataatttaaataaaaaacaggtttaatttctgtaaaaaaaaaaaaaataaaatctataggtcattttttatttattttagtgttttattttttataaaagaaaaaaaaaataaaaagaaacacaaatttaaaattttttatggcatccctctttatgtaaaatgactttttcttatatttgtaattttttttaaaatatcatatttagtgtaataaaatttttatggcatatatatatatatatcaaaatttatctcatttttctcgtatttctgtcaataaccctaaggaatatatacctagaaaccaatagaataataatatatataaaaccataaatttataattttttttcaagatactcatctgtctcttgtttttcttttattactttctcgatatttggtcgagatatactcaaaagattaggaataaatatgcgtgcaatttaaataattataaaatcctaacttggatatgatatatatggttttggattttgtacgatacgatacgatttcacccaaaaaaaaatatatatatattaaatctaaaatgatctagattttaattcttttaataaattaatgcaaacacaatacttttttttttttttgagaaattttccatattattataactgaaagtcatttacaataatagag

SEQ ID NO: 147253 - DNA, 880 bp, Cannabis sativa
ttgtcattatatatttaatattaaaaaataaaataaaaataattaaaatcaattacccttaatggcattccttacaaaattagtaggggaagttctccccttgttttctcccttatttaatcaagttctcccttttctaattttaataatgtaagtaaacaaatgtaagggaatgattaccttaccattgatttccattacttattattaaacatgtcatataatatagggaatgggaatgggtcaaaaaatgggaatggaattgggattgggattgggaatgggaatgggccagggaatgggaatggaaattggaatgagaatgggaatgggaatgagtgagagaatgagaatggtaacgggagtgggaatgagaattggaatggctcagggaatggtaattggaatgctaatgggaatgggaatgggaatgggacagggaatgggaatggggatgggaatgggaatgagaatgggaatgagaataggaatgggaatggcaataggaatggcaataggctggggaatgggaatgagaataggaatgcgaatgcaaatgggaatgggaatgggccgtggaatgggaatgcaaatgggaatgggaatgggccgtggaatgggaatggagatggggaatggaatgggaatgtgaattggctgggatttgggttttgaggtttggagtttagggtttagggtttagggttggggatgaggggttagatgttagggttagagggtaggggtttatcttgtttactaaaattttttaaaaatgacaattttaattatttttattatttttattttattttttaatattaaatatataatgacaattttgtcttttaaaatatatcttacaaaataactaccatat

SEQ ID NO: 147254 - DNA, 754 bp, Cannabis sativa
  modified_base (198)..(199): a, c, t, g, unknown or other
agcagaagatgaactagctaaatatagaacaaataaaacaagctcacattaatatacatgattaaacaataaattcaaaaattggttaatcccatttcaagatacctaacatactttaatatcaagtctttggacagtaatattaactgtaaattgtactcttggtgtagcaatcaaacattgacaataaaactgtgnnaacaatagattaatctttggactaacgtattgctcacacaaagtaccttataattgtcacacatttatcgccacatgtatatttaaaatttagcaaaatattcacttacctttggttagtcaatatatgcatcaattacaaacacacaaccatcttaatatttaaataaattaatctacacaaaagattttactttggcaacatattatttctattaatttactcaaatattagacataaaccaacaccaaaattttaattaaattatttaaactaagatgtaaatatataaatatatatactaaattgtacatcaatatgtattacacaataccaaaatatttacaagcatatatataggccaacagaaaaataaaattacaatcagatataccattaaatctgattttaaatgtgtaaatgcaatacgtgaattcggcatttaacatagtgccatatatatatactagtaaaatactacgtgcgaggcacgtatactaaattttatgctaggtgtctcttgctttatttaaaaataatacaacaaataattaa

SEQ ID NO: 147255 - DNA, 547 bp, Cannabis sativa
acgcagatgttttttctttcaaccaacatctcgcagaagaacgaagaaaaacagtcactctagctagatcttctggaagaaaaactcgatcaagcacacttaaaaaatgcggctttccagcgccgaactgcaagatacttcaattctaaggtcaaggcaaaagtcctgcgaacaggagacttggttcttagaagagtaatgccaaataccacgaacccagcgcatggggtctttggggataattgggaaggaccgtatctcatcatggaaaagattggtgacgctacgtaccgactcgcagcactcgatggtactgcgattccacgagcttggaatggcaaaagcctaaaattctattatcaatagtactcgcattatttaaattgtgttcgctttgtacttatacttagtcattttttataaaaatcctaagtatatgggggtatatatatcataatttactattgattataaaaaggaaatgcctcatacttgttaattcttcaagtttaaataaattttttcaagtcttgtgagattttctact

SEQ ID NO: 147256 - DNA, 846 bp, Cannabis sativa
  modified_base (774)..(781): a, c, t, g, unknown or other
tttccttcaaagggataccgtatggggctaggctccatggacttatgcttctaagtgcttggtgaggactcttccggtgtttctttgagtctcgtagggatggctttagggtgtatgtggatccctactgtctccatggttttttgcatggtgaccatcacctcttgcatctttttattttattctttctgggcggtgatctcagcttcatgatcagcagccttttgtcttaagagcagtagttctgcgtaactgccttcgtcgtaggcgttgtactcgtcaaggttttcctcgtactcatcatcattggcctcatctcgttcctcagagtccacgttgactctcgaagccacttcctcgccttcagggttttgagcgtcttgatgacgacggggctaacgtgtgttgcgagtttccaccattgtaacttgagcttataagactgttgtttatctagagacgcttccttcagctctcaatgaaagtaccaatatgttgactgaggttttcggcaagcaatttaataatatatgtaagaaagctgtaggaagtttaatgtatgagcattaatgagccttagtccacaagtcttttttatttatgagagtattacagagaatgttcttggtagatattcctcttagttgttctctctaattcttatgaacccagaattctcgacccccatctcagtgcattgggaggtacttatagtatttttctggaatgatcactggaactaaatcacttgtctttttgtgcaggtttgatagnnnnnnnnattcctagtcgatgcaaaataggaaatacatggcctatactgtaggcatcttaggggttaggtgg

SEQ ID NO: 147257 - DNA, 1398 bp, Cannabis sativa
  modified_base (1291)..(1292): a, c, t, g, unknown or other
gcagcttcccaccgagcaataactcctgctgggaaaatacacggcatgatgacacatctatttaggtacacctccggataaaagtgttgtcgcctccttatcaaaagaaatgccacatacaaatgctaaaaacatgaaaattaaatatgtcagagattaaataaaaagagttaaataaagtctttaaaagcaaaagaagtaaaaaattcttaaaaacttacatcgtccccaagccatgtcctcagagtatgtagttcgaggaaccaagccgaattgtgtctaccggagaagcactctctcgggtacttgttcccaatctggccgagtacccaactgtgaaaagtcctgagcagcttccgatcaaccactctaagtgggtccgcattcacgagtgtcctcgcagcacttctttttcatttcagtgtactcatcgaaccacctaggtcgctttctcttcgtccggttctccacgagttttggagctgtctctaacacttgtacctcagaatcttgagtatcctcgatgctggtgatttttcgtcttctcaggtgtacagaacatgtcatcttcacccggtctgtaatcatttgggagaatgaagtcattttccggcgactgagcctcttcttctagttgtggttgtggctatggttgtggctgtgactgtgaatctactgccggtcttccaggatcttgtaggagcctcattatggtcttcaactaatccataatcgttgtttctcctcttagcagagcggtctgcccttccctcaaagcaatctgccccctctccacagtcccaaaatggcagggtatattggatcgcgagcctctgaggtgctgggaatagaagctgacgggggaacaggaggatcttgtgatgctgcagatgggtcaacaccagactcatctggaactgaagctgcagatgggtcaacactagactcatctgaaactccagacggtgcacgtggtggagacggtggaggtggggcagagtctctaaatattcgggctgcgtctgcttgttcttccaatatggaggaaagcttttcggcctggcttcgcaaagcatccggtgttggttgcccgtcctcacccaacacaagttcctccaagtcaacaaataaaggcggctgacccccagtgatgtaactcacaaactcaatctcatttagccggggacataacatggagctcccaagggtgacacactagaccgaataaaccctatgtccagtaacccttgaagctgaatcttcaactctttaagctcagctggagccattnnataaggagccttggaaaccggttcaactccgggtgctaagtcaataacaaaatcaatctcccgctgcggtggtaaacccagaagttcttcgggaaaaacatctaga

SEQ ID NO: 147258 - DNA, 839 bp, Cannabis sativa
  modified_base (42)..(54): a, c, t, g, unknown or other
aaataccctagaaataaagatttcttagtggctaagaaatannnnnnnnnnnnnaataataaagtttttattaacattattattaatattatatcattgttatattatttttatatatacataaaaataatcggtaatcttggttacagtatatataatattatttatatatattatataagttaaagtaacataaacgaaacgaataatgaaaccctcgttcttcttcgttcgacaaaattttcttcccctatatttattttcttcgattttcaatccaaaacctaactatctaagctccggtagtagcaagatagcaaattcttgatgagggaaagcttaaggtatggtttaatttcgctttaagtttaaaaacaattagttttgtataggggttttgtgaattagaatagttatgaaggttctgaccttataggattgttcttgggtagtcatgggactagtttcgatgttttgttgctgaaactgaggtgattttgggttagaaatcgaattttaaactttttaaagcttagttcgaacgttaataatgtttttcatttaagaggagctcgattttaatttttgttgcgtaaggatggtaatatttatggtattatatgtgccttgtgaggtttggagttatttggataagttttagtagtatttcggtgagtgcaaaaattcagattttcgtgtttcatagtttttagaaattcataggagatcagattttgtatttttgtcataacttttgacttctgtttgggacgttcaatataccgtttcaaagcttgcaatgaactctccaatatggtgtatattttagagccaaaata

SEQ ID NO: 147259 - DNA, 523 bp, Cannabis sativa
tctctctctctctctcaatggtatttagcgtcattttttaaatctcgcatatacattaggcgagtgttaccaacagacgcaaattgtaaaatagattttcaaatttttttgctttattgcgtcggtttgtttttttaccgtcgtttataaatagacgcaaatcatatattattagtgtgggttataaatagacagttttaattattgggtactattcacgtcggtcaacgctatgaatagtagcattgaccgacgtaaatagtgtaatttgtagtagtgattgcttgggttttgttatttaaggtatgtagaacaggcctggaaggtttgaaagagtttgggtttgaattgagtgagaaatggatttttgaagtttcctgcactgaaccggaattccggttcagggaagccttcagcatccgatctaccagatggggcttccaggaattcccagaaccagaattccggttgtagaaccggtctaccagttggggaaaaattgggaaccctagttcttcccatt

SEQ ID NO: 147260 - DNA, 623 bp, Cannabis sativa
tcgctagattatgatcatgaagacatataatagatcattgcaactaatacaaataaataaattaaaattattttagcattaataacaagttaatttaggaaacttacaaaaatactgaaatttttacaaaacaactgtggaatacaaaacagaacaactaaaaacaacagtggaataactaaaaaacaacagtagaacaacaatgaaaatttaacacaatacacagtataaaacttacacagtgtttttgaaaaaaaaaaacacagtagttttgaaaaaaattccacccaaagtaaaaaagttagaaatttcagtatgtggtgtaattatcccatttaatcttgcttagacaacaactaaattaagttaaaacaataatcataacactttttattttttttgaagaaatggtaatttgattaacgcaaatcaggtaaaacaatagcttgcaaatccatagggacaaaccccctaccataactacaacctaaatataaacaagcatgcctagctaaataattagtttatatttagtttacgatatacatggaatttaagttttagaatcgattttattaacaatttcggtattgtgtgacttgttaatagaatcgattactaat

SEQ ID NO: 147261 - DNA, 581 bp, Cannabis sativa
cgaatgagaaaagaaaaggtattgctttcaatgcttctgaaaaatattgtttctgatgatgaaaatgatgatgaaatggcattgttagctaaaaacttccaaacatacatgaaatctgttggaaataaaaagaacttttcgaaaacctcaaaaggtaacatttcaggtaacaatccctctaaacctttttcatctaacattaaaaaaggtattcaatgtagagaatgtgaaggatttggtcatactcaattagaatgtgccaaaaccttaaagaaaaataaaaagggattgaatgttacttggagtgatgaaatcgaaagtagtgaagatgaaaaagaaaaggttgctctaacaagtcttttgtcaagaaatttgagggaaaaaggaaaaaccatttgcatgaataatatcttgatcgatgacaacaaggaaggagctagatccgaatcagatgagtcagaaattggtgagaactctatggctgaatgttacaaggtaatgtttggtaagtggttggaaatttgtgctgaaaatcgttccctggttaaagataataaagtcttgtgtaacaacattaatga

SEQ ID NO: 147262 - DNA, 588 bp, Cannabis sativa
acttaatttaatcataaataataaaaaaaataatatatatataagaaaaaaatcaaaaaaaaagatttttaataaaaaaaatattaaaacacaaaattttatagctgaaaaaaaattataggaaacccctacggagtcggttatttagtaataaccgcctccgtagggttcctatggagtcggaggcggttttgttataataactgacgtcgtagggtccctacagcatcagttgtttttaacccttttagtgtcacttggaacaatgtcggtagcgaattttaccaaaaccgacactgaatggccttaaaaactgcctctaaagcctaattttatagaagtgcgtcatcatatacggcctacttccaagttcgtattcaatataattacttgttgtctcctcaatctaactttttcgcataacaaaaaatgtgtctaatatagactgatcttctatggagatttaaaaaaatactatatttgcagagatttaaaaatagaatgggttttattatattttgtggatataaagggagttcatagccactaaaatatagtatattgtaagagattagaattggcttttga

SEQ ID NO: 147263 - DNA, 1171 bp, Cannabis sativa
  modified_base (30)..(32): a, c, t, g, unknown or other
  modified_base (94)..(100): a, c, t, g, unknown or other
gcattccattggaatgtcattccaatactnnnaaatgcaaccaaacaaaggaattgaataaaaattatttcctttctattccattccatttcannnnnnncaaccaaacgccacctaaatgtgtaatatcaatacactttgccattccaaaatatatatatatatatatacactttgattcaaaaaattaattagtaaataaataagcattttgaccatttcaaaattttaaaagcaagttttgaaagatttagatcttttttattaataattttattttattatgattttgtatttaattatttttgaaatgttaatttatgacttttaatattcgagattttctggagggtgctttattttcatttattttcttttaatatttgttgaaatgttcaatttatttcttataatttatatatttatatatttactaggttgatgttatgtaatacacgtaaaattagtgtgtgttttttttttttaattaggttcaactaggtaatgtttttttttttttttgaataaaagatgattttattaatgcatttcttgctcaattacatcaaagatgttactcggaatggaggaaaccgaataactaggtgatgttaagtgcaatacatatatgtttaattttttttttaattaggtcatgtattttttttttttttttaatttttgaaataaagtttgagattttgatctttaagaaattttttttagctattgctacgttggtgtgtcatttgaatgtgattatatatatatatatgtatttttaaaatttttaattttttttttattaggtaacgtaattgatgatgcatatattgcaatttactatattcttaacaaaaactcacataactaaatttggatgtgtctgtatataggttggattcataaatttgatataaagatctttttattcgcaaactttacgaaaaatatagtgtgtgaatcggtttaccacaactaaaacagaaaacaatcaatttcttattacaactatttcaatttaaaatataaaataaataataataaagttaaaaatatggttcaaaatatttatgatattttaaattaaatttctttatacaaaatatctacataattttttttttattttaaatttaaattaaaatttatttatataaaatatctatat

SEQ ID NO: 147264 - DNA, 1353 bp, Cannabis sativa
  modified_base (59)..(66): a, c, t, g, unknown or other
tacctgtacaaagcatttggttaaaataaaacaatcacaattgcacgatgattataaannnnnnnngaaattcattaaagataacaaaggcacgtaaggattaaatgctgtccagtcagcccgttgtctgaaaaataaaaaataattccaagtttaaagaccgcttgatcggtcatgatgttttaaaaaaggccctatggctgaataagatatataaaaataaaaagataaaagaagaagtgtttaagcagctggactcccaggctcttggtttggctcttctgggccggcaggagctggaggatctattgtttgaacgggaggtacatcagcattttggccggaggtagaagcagtcgtctcggtttcaccataagccacttgggaagcgcagaactcaaggtacatgtccttagcttcttcgaagtagtcgaagtttgcctgaggattagccttccaaaagtcgtagaagagctcaagaccgtctatctccaaggcatgaaccttctctttcagcttcgtcacctcggccgtaagctcctcctccttaggttccttctcctccttcacccgacaaaggaccgctcgaagagatgtcctctgatcctgaagattgttcactttagtaaacaaagtctcgatggtctcctcaagtcggtcagtagcctcaagatcttttgacagcatagctattttcttctgagcgtagaaaagcttcttgttggcttcacccaactccgtccgaacagcttcgagttccgccctggcatcttcatcatccttcctggcaaagtccacctccgccctcatggtgttggacaaagtcgtgttcttggaagaagcagacttagcccgggagtaggtgtaggccaacttcaaaccaggctgaacagagaaaaaaacttgagtatttggaccaagtaaagagagttaaagaagagtgtcaaggaagacttacccttgagaactcctttatgactcctcccaccagcagctccagagaagagccattctcggcaccggccagctgctcactaaccttagaaaccaaccggttcatgtagtgagcgagcatctccttgccctttttcgcttccagaagcaccgacaaaggtggagtagaggtccgcagcagttcagaagcacctctcggttggtcagacttatccgaactccgtcctcgagactccttggctgggcaacttttggagtggagggctttgcaaccatcagctccttggaagaagttccctcaccacctttatacttcttggccgggggagatgcgctggagcttccaccaatcctcttcctcagagcatcgagcatcttttgagacatgtctgcacggaa

SEQ ID NO: 147265 - DNA, 1320 bp, Cannabis sativa
tcaagaacaagtatctgttacccataattgatgatttgtttgatcagcttcagggaaagactgtgttttcaaagattaacctacgattcggttatcatcagctcagaatttggcaagaagatataccaaacactgcatttcaaactagatagcactatgagtttcttgtaatgtcattcggattgacaaatgctccagcagcctttatggatctcatgaacagagtattcaaggatttcctcaataactgcactatagtatttatcgatgacattctcgtatactctcagtcataagaggagcataagcatcatctccgaatggtattacagcgactcaaggatcataagttgtatgcgaaattcaaaaagtgtgaattctagttgtcagaggtatcttttcttgggcatattgtcgtaaaaaatggaattatggttgacacgggaaagattgaatcagtgaaaaattggttgaggccaaaatctgtgatggaactgtaaatttttatcagtttagcagggtattatcaatgtttcgtcgaagggttctctaagatctctatgccactaaccgagttaactaagaagactcaacagttcatatgctcagataagtgtgaagcaagttttcaggagtataaatagcaattgataacagcaccagtgctagctttaccatcagatcgagaaaagtttgttgtttactgtgatgcatccgggtctgggatgtgttctgatgcaagctgaaagagttatagcctatgtatctcgtcaactgaaggattatgagtagcgctacccaacgcatgatttagagcttgttgctgtagtatttgctctaaaaatatggtgacattatctttatggtgaaaagtgcgagatttacacggatcataagagtctcaagtatttctttacccaaaaagatttaaatatgaggcacagacgatggctggaattggtcaaagattatgactgcaaaattctgtatcaccccgggaaagccaatgttatggcagatgcactaagtagaagaggtcccggacaggttttcatcactgtgatgatagctcctcaactggtcttagaaatggttaaagctgaaattgagtttgtagttggaaagttgcacaacttaacacttcaatctgatttggtagaaagaattagaagggcgcaattggaagatcctgagctaaaaaaattgagatgaagtattggcaggtcgacctaaggacttttcaatctcgaataacaaaatgttattgtataaagctcgggtttgtgttcctaatattggtgagcttaagaaggaaatcct

SEQ ID NO: 147266 - DNA, 880 bp, Cannabis sativa
aaatttaacaatcttaatagttgaggagaaatttttaacggccaaaaaatttcaaggggtatgatttagtacttgtgaaagttcgaggggaaaaattgctaattagtctttaaaaaaagggattttttcaataataaactaaaaatggaacaaatttacatttatgacctaaaaaggaaaataaacaaaaatagaaactaaaagttgttaattacaaaaataccggccaaggaaaacggagacatccatcttcttcgtgacccagccgacaaactttaacaacccattctcaaccattttccttccaaaactaggaagatctaaaaaaaatgtagatctcaaggaaaaacaacttagatcccaaaaatccaaatacaaaaacggaaagaaaaaaaaatcatccaacctccattgctgtacaaaaaaaaatcaaaaacaacattcagtcaaaaagcaaatcgcgttaaaaggtgaagaatcgaagagaatgagatctggaaatcattgaaactcacccatgattgaatcagataaagaattgaaggtaatacaatttttgcatgaacatcctcaaatattttattctacattaattgaaatttattattaagtaatgaaaaccaaaataaattgaaataataatgaaatattggtgaatctgaacaaaaaataacaacgatttgcatgaaaaaaacattaatgcatataaatagatgctacagagttttattctgtaaatagttgttcatgggttgttttccagtaaaataatagttgattgggatctgcaaacgagaaaagatgaatctattcttattaattactgaatgcttcaaaatagttgtttaatagttgatttgacagattaaaatagtcgtcc

SEQ ID NO: 147267 - DNA, 665 bp, Cannabis sativa
tgaagtctgtcctactccccgtgatgctttccctttgatcttttcaagcaaagtctaagcatgaatttttttacaacttcaaccttccttcctagaagcctaagcttgtatcattaaaaaaattcaacatgactctcgcacacccaacaatgtcttgcccttaagtgtttcaaagcaaaacctcaggataaagggaattgcccgcgcatggacacaggtctagctttcccctcgggaaaccaaaagcctctagtgctgtaaaaggcccatgctctcacctataaggttcatatcacgaaaggattgtttgggaccagtagtacaacttggttttcattcgagaccccatggttttgtcttgcaaaagcctaaaagtggtcgtacactttcaaggaactcccccggaagaaaagtgtgcttctcaaaggcaaaaccacactcaactctcctccttagaaattggaaaaggacacaagttagactccaagcaaatgatcgagaatttgagtccaaaattctcagctcatttgggggctatggtatgtcgattactgataactgtaacttcttacgtttatttgccaaacatgatcaacccaagtgtacactgttcggttttatgccctaaataaaactcattttatataatcaaatttacttattaa

SEQ ID NO: 147268 - DNA, 665 bp, Cannabis sativa
gggatattacaatcataatcttactttggtaccaaaataatcacatatttaataaaatatgtctatttaaatattatttattttttgggatattacataaactgtatgccaaatttaagaagcttgagttttggctattttaggtgtcttttctttggcacattgtcagtaaagatggattcaaagtggatccagggaagattgaatttgtcaaggattggccgagaccgaagaaagttacagaagttagaagtttcctgggtctggtaagttattaccgtcaatttgtcgagggattttctaagatctcaacacacttaaccgaactcaccaaaaagaatcagcagtttttgtggacagacaagtgtgaagcaagatttcaagagcagattcagagattgattacagcttaggtattagccctaccatctgataaagaaaaatttgtagtctaatgcgatgcatccaggcagggtttggggtgtgtactgatgcaggccgactgggtcatcgcctacgcctcttgccagttaaaggaatatgaacagcgatacccatctcatgatttggaacttaccgcggtagtgtttgctttgaatatttggcagcattatctctacatagagccttaaatacttctttacccagaaagatttaaatatgag

SEQ ID NO: 147269 - DNA, 857 bp, Cannabis sativa
ttcatgttaattatcatgattgatttgttgtttgtgtctaatgtttattttgtgttttgtttttttatcagatggagagtgaatcagattcgaaagtcccatccgttgttgaaaaggttgagcctgctacgaaggctaaagagcgaccaaaaaaaacttcacgtaaagctaaagtatgttttatgtttgtattgaaaccggtttttaataattgtatatgttttttttgttattatgaaactggttttaattttttttaattatgatccttctgtcgaagaagaaaaacctgttgaagttgaaacgaggaaatctccgcgtaaatccaaagtatgctctatattttttgctggttattcattttttttgtttatttatttttttggatgaaattgattttttgttgttttgtttaaggctgataatgttgtggaagatattcccttgaaagctccaacaagaagatctccccgaaaacttaaagtatgtattaaattttactgaatccgattttacatttattttatgtttcattgttgattggtatttttattgtgtttaaatttttcaagtatttgtttctcgaaaattggtttttatcttttatatgtttgttattggatttgagtatgttatataaaaccgattttctttgtttgtttgtgtttttttaatttgttctgttttgtttttgtttgtttttttcaggttgataatcaagaagttaaaggtgatgttcctgattctgtttcttacaaaataccgtagtaaaaaagtcagtaagaaggctactaatgtccttcaagcagtcagtgatgatgattttcagactcagaaggttgtggcggaagttgttt

SEQ ID NO: 147270 - DNA, 761 bp, Cannabis sativa
  modified_base (647)..(660): a, c, t, g, unknown or other
tttaaacctcaaaatatcaaagaattaataataatcctttacaaaaattaaatattattaatttaaaattgatatttaagattaaatatattaaaaaaaatattttattttaaaattagggaaaaattccacaaaaattgaaaatttggtgcatgagcacctgctgcccacgaggaggctgcatgcagcctcctacgcgcgtgtagttaggattaaggggggacgtgctagaatcctcggcatttgcaggatttgacatcggcgagttgcagcatctaagagcagcgtgtccgagcattgggcgcattcagacaggaaattgtctgaagatgcgggcgcgtgttccccttcttgtcggagtgactagtgcgataagcgcaatcctcgacacgcaatgcaccaaaaaattcaaaccaccataactctctcattttttatcagaattgagttccgtaaaaatgaaagttgcttaatttttcacaagaaatccaaataaaatattttcagaacgaaaataaaattattttcatggaaaaatttagtaaattacattcaatcgttaagtaacacataaacaaccatgaacacatccaaatcaacacaccaaccatattcaacgctgtaaattcatatttcatgaaagtaannnnnnnnnnnnnntctgaggccagttgttgagaatattttacaagggtctagatttctaacaagtatattgaattaacatcctaagtatgaattttttaaaataatgaaataaa

SEQ ID NO: 147271 - DNA, 529 bp, Cannabis sativa
tcatctaatatttttataaattaatatgatatatttttatttgaaaatattttttgtgttagttatttttatatatataaaaaaaatcaataacatgatacatttgaaaaacaaaagaaagagaaaagaaaaaaaagatatgagatatttctttagaattaaaataaagacggtacaaaaaaaaagtaaagattttttttaagaaaataaaatagtaaaatctgtaaagaattttttttctttctccaattattttttaaaatatttttaaaacaaaattctgattgctcactaagtgacatcccaacgcgtcaaatggcgcgtcctctcccatcagcagcaggtagggcccacacacatcagctattctctctcctaaagtacctgacaccgtataaaagtaaaagaagaaaagagtaaaataaaaaagaacaaaaaagattgtatccaatttcccaattatttttaagatatgaataaagtgaaaactataattttttttttcagctttaattaatataattttttt

SEQ ID NO: 147272 - DNA, 560 bp, Cannabis sativa
tctccagggcctgatggaatgaccgcagattttttttagaagtgttggccgattgtaaaggacgatgtcatcaacatggttaagtaattttttcatactagttcccttcctacagaccttaacaagaccattttggtcttaatccctaaaaagaagcaacgtatggatatgggagatttaagaccgattgcgctatgcaatattctgtacaagattctgtccaaagtggttgctaatagactttagagtactatgtcgtctctcatatctgatactcaaagtgtatttttgcaaggccggttgatctcggataacatcatgattgcttacgagattatgcatcatttgaagggaaacggagagggagggatggttatatggcactcaagctagatgttagtaaagcctatgataagcttgagtggggttatctccgggcgatgatggtaaggatgggctttgatggtctctggattaacttagttatgcaatgtgtatgttctgtttcctatactatttcacatggtgggaaggagttggggcccattgttgctcaaaga

SEQ ID NO: 147273 - DNA, 739 bp, Cannabis sativa
  modified_base (667)..(670): a, c, t, g, unknown or other
tgcagttaaaattctgcatactccgtgagtcaatcttattaagatttttgagtctttttttcagggcctctttcataagagtttttttgtccttttttgagattgtctgccactatttacaattgcttagtggcagtttcttacaaagctaactaaaatatgtttacagccattatccataaaatcgtgggatctgattacatatcacaaaatgtaaatgtggtgtatgattttgaaaaccgtataggtgtgattttcccacttttactgggtcaagaatatcgtgtataaacacatctttaattgttgaatctggaaatgtctcgacaaaaacttgattgtagtgatcccaatagcgagctgtgaccattcttctttctgaggtcgacaagatacgtcttacatcgactgcgggtatacagaaatcttctgactttccaaggttatgagcctcgctccttttaaatggatgaaactatagggagtttcctcatagcaagatggtcatctcgcatacttgttctttgagccaatctgacttttacatttagtttgcttattgcaagctaaagtatgtgttacttttctccagtgccttgctattcaccttcagtgacctatggtttctcgttaatacactatctgccagtttgtacattgattcctnnnntaagaccttacagtcagcgggttaaaaatatactctgatacttacgcaattaatgagttattccataaa

SEQ ID NO: 147274 - DNA, 691 bp, Cannabis sativa
tgccctgtattttgtaaaaaaaaatattatgagactttacattagcaactgtaatttcaactgtgttttatactcgggatcccgatctataagattatataaataatatatagtaaaattaatttcagtttagcaagttttcaaatacgggcattacactaaatttttataaatgtaaaagtttagggggaattcttaacaagctatatattttagggaccaaaatcagtattgtcgaaagtttttatttttgtaaatttaggcaattagggtatcacttttgacatgataagagtatttatgtttatgacatttatgttttgtgttggtttaggtttaatttagtagcttttttattatgatttttcagaactaaacttgcaaatatagctgctattgcatatggtgttgaggttgtgcagaagatgattagtttttttaatcctttttccttttgttttttaatttgttttagtgttgttttatagttattctaccataattatttatttgacgtcgatttcactgttttactcaatcttgctaaaattaatggttgttttctaggtgtgttcgtgttgttgtggtggttctgtgtgtggatgtcgaagatggaggcattattcttgatatttgatgtctacagtatacaagaaaaaaaaaagatcagaacagtataaaagtaattttt

SEQ ID NO: 147275 - DNA, 987 bp, Cannabis sativa
  modified_base (622)..(623): a, c, t, g, unknown or other
ggaagaccattcttagccacggggagagtgttaattgatgtgcaaaagggggagttaaagttgcgcgttcaaaaagaagaagagactttcaatgtctttaccacaactgaaattcctacctgttgctgagtggaagttgtaaatgatagtcgagaagtaactactaacaagaagaaagggaagtccaaagtatgatttcgaacttttcgacgacgtatgaaaagactaatgtgtgggaattgtaaaggtgactctcaatctagggatagctttgaaatttgcagcattggaggacagttctcgtcatttggtacaagggcccttatggatgcaaggggtggattgtatcccagttgaattttgcaaccaccaccaccgccgccatactgatgtggcgctcaggtaagttcccttttctctctctttaatgtcacattggggacaatgtgtcactttagtttgggggtgaacttaaatttttagttttagttttagttttagtttttagtgatttgtttgttttgagtcaatttgctgaatgtgagtcaatttgaaagtaggtaaatagcatggtttggaaagttcatttattttttttcgaaaaatccgtgtgcttggtgannttacattcttgactaatttcaattttgtgatttaaaagaacatggaatcataatatgtaattttctagcaattgaattagtttatgtctgctaaatttgatatgtgcaaagttgtttggaaaattctagaacttatttgcttgctatttgaggcaaactaataaattatgcataactaggaaagtgatttaagcattctttgaatcgattgtgtctttcaagccatccctataattttatcctagttaccccttttgagcctcaacctattctttgttctacacattttgagtctaaaaaagataaacccatgaatatccaaaatttgacccttattagaccataagtagatctttagtttggg

SEQ ID NO: 147276 - DNA, 837 bp, Cannabis sativa
ttgtggcaacatactcagcctctgttgttgataaagccacaacaggttgaatctggactttccagctaacacaattacctccaatcataaagaaataggcagatgtagatctcctattatctctatccccagcataatcaaaatcactgtagccttcaattatagtgttggcattctgtttcttgtatactaattcaacttagttgtcccaagtaggtatctaaacacccatttcatggccaaccagtgaacttttcctggatttgccatgtacttgctaagtacactcataccatagcctaaatcaggtcttgtacttaccataagatacatgactgatcctactgcattagaatagggcacatccttcatagcttcaatctccttttctgttttaggactttgctccttagaaagagtgtactgactagtaattggttccttaacaagcttagcatctctcatagaaaacttatctatggttttctcaatgtagtcttcttgtctaagaatcagtttcccttgtccctgtctcttaggatagaaatcccaaggatcttggtagcattaccaagatctttcatttcaaattctatcttgagcagatttttgaccatatcaaccctatacctttcttggcttataataagcatgtcatatacatatagcagtagatagatgacatcctttatagagcttcctttatagtataaacaggtgtcatggtagctcttgttaagctcatgctttaacataaaagcatcaaacttcctattccattgtctgggagcttgtttgagtccatataaggaattaaccaacttacaaaccatatct

SEQ ID NO: 147277 - DNA, 719 bp, Cannabis sativa
  modified_base (57)..(57): a, c, t, g, unknown or other
tacgtggatatggcatacacacgatcccgttattagtgtattcagcctcaatcccangatccttgcattcagcattgatctcctgatatttctatttatacgcattgtaatgagaggggaaactcttccccaagcttactagccctataaatagtgatgtatattcactgggcaagagatcggttgaaaagcagtggagctaagattataccctaaatatattatctaataattatatattcagagatactgttgtaagatctataagaaaaggaatctttctccttgatcttaagttaatacaagtaacgaggattaggctattatcgaactgctcggggctaaacctctataaaattcttgtgtctttttattgctttatcatatatttgttattataaatcatttatcgcttataaaatagactcattgtcattggctaaaagcgaggtcaacaaagggagatgtggataaaggagatgtagattgtagagtaaaggtaaaaaaaaacatagataaatcaaatcttaaacattttaaaaattaatcccattaattaattataaatgaaaaaaagaaaaaactcatttaagaagttaaaggatacattttgggcttcattccattccttaataatacacctacctcacaatttctaattaactacataatatatatgagcatgcattgcaggcttgcaggctctctaattctcatta

SEQ ID NO: 147278 - DNA, 1577 bp, Cannabis sativa
  modified_base (242)..(242): a, c, t, g, unknown or other
actcatgttgactggactgctaattacgtggaccacactgtggctccaattgacttttggaacataaaacagtgcaaatcggtgtagaagtggattcgagaccacggtggtcacactagtggaaaggtacatttactacttcaattttttgacgcgttagaatttgatttgggagatatgctaattaatttttttggtgtactaagtaggtgaaattgactaacacctatgtgttagtaccnagttttgaatccggtgcagttgggcaaccaacaaatgacgcaatttacaaagctttttttgagttgaaagatgaggtcttctaccttgatttgaaggtgaacagcacaaaagagctgttactgaaggtagtctcaagttaccttggcaagggtaatataaatgaagtgttcgagatacctgagacgagcagagttcagcgctcgctttctttcaaggggagaccgagaagaaggatgatgtgggtgtggaccaaaaggatggtgaagggacgaaggataaatccaaagaggatgtcgatgatgcactgagtgtcccttcacttaatctatcagaaaataatgtcgttgttccaattgagaaggttgtttctgaagagtcttttgaagaaatcaacttttggggagaagaagtcccagttattgtgaaagaggaggttgagcagaccggcaaggatgattttgatgatgctgccttggaaagattcaaagattctggaggaaaggtgattgggcccttcactgtcaaaaaggtttatttgaatcaaatgcacgagttctttcgttacattttctctagcgccatgatccgaggtaatctcctgtttattgaatattgtttatgtagttgatattagtacatttattgtatttgattatttgttttgtgtttcagtgaagtgttagcccattttgggaaggttgaggttgatcgtagggattttaaatgcatgagaccggagtccgatatctcaaacagtgtacgtagaaatttctatttggttgctttctatttttaagttcattattttaattattgtaatttgttgtgttatggtctagaaagtaagactttgttgttggtggttttaaggcacattccctatttactattgcctaactgttttgtgagttgcgacagtttggttagttatgtttgttatgtatataaatagacataagcatacttgaaagttgagttaactgtttcctgcttaccgcatttgatttggaatgctttgctcatgaatcttgttattttagttcttcattttggtactgcgattgtatgaatcacaacataatggatactgtttgtgtaaatggcaactcattgattgctttgctcaaataatgaattgtcgagagaggaagcgcaatggcattggatcaaagagaacttggtttatgcccacaagaatttctgtacgaactttgttatttaaaaatcggcataaacattttgtatttgtgctttaatacaatgtcgactatgctttcatttaaaatgtactctattgtgtgtgtttattgtgtagagggagttacttggaagaa

SEQ ID NO: 147279 - DNA, 723 bp, Cannabis sativa
tagtcttattaatcaaaccaacccggttaataaaaagtgatatattaattagatcaagttttgtttttgaggtccgtaagtacatgtcatcctattcatcaccagttgctaggtttgctcatttagtactaacttcatttaccaccgtatctcgtagttttcgggtaatctttgtgatagtgacgtgaaagaaaagaaaaagaaatgttaaaagatattattggtgtctaacactctcctcgatgttatattactattagtgtacttaactatcaggttccatataatttaaaaaagtaactgttagagaatgtcgttaactaattataagacgcaacttataaaaagtgttagacaacacttgttattgaaggaattttaacaacaccaaagtaaataatataataataatataaggagaatacacgcgagtactcaacttaatgtggcgagtattcaaactaaggacacaaaatattgaaaagaaactggaaatgtaaagaacacaagagatcagtatagtagttcagtcaaattacgatctgcttagtccactgttgcaagaatttttttgtcttgtctatttcacgttggatcactcctttatatacaaaccaagtgtcatttgatttacatagattgaatttattatcaatccgtttgtacattgaattacaataattaaactaaaatacgtaaatacaataaatgaagaacagtttc

SEQ ID NO: 147280 - DNA, 783 bp, Cannabis sativa
  modified_base (34)..(37): a, c, t, g, unknown or other
  modified_base (94)..(101): a, c, t, g, unknown or other
  modified_base (506)..(511): a, c, t, g, unknown or other
  modified_base (742)..(743): a, c, t, g, unknown or other
acagatgaaagaagaatgcaaaatttacctgttnnnnattatttgtttgacctattgacaattgaaccataggttaaaatcagatcattggatnnnnnnnnaagttaaccatggaaatttagatccaacaataataggttttataaaacttgttttaataattaaacaatataaaacacacaaacttgttacaagttggatagtttgatataggatttatttaattttaaattaattaattaatttatcaatttcgaaaataaataaataaataaattcagaatataataaagaaaaccaaattaaaaaaaaaattaaaattaaatctataaatttgaataattaggtttcaactaacctaaatatctatttcaaaaaaaatgctaacaacttttcaaatttcatgttatttaaaataaaaataaatattcgataaaataaaatgataaataaatatcatttttctaattttccaatttaatttaaaaaaaaaataacaaaatttnnnnnntagcaaaatatcttatttcaatttaaaatttcatgattaaaataatcttatttcaaatttcaaataaggtcattttataaaaaaaaaataaaataaattatttaaaatattaaatatctgatcttaaatttaaaaataagataaaacaatcaaattttaaaaattaatataacttattaagaaaaaagatagatttttacctattttcaagcttcaaatttcactaatatnntaaattaatttaaaaaatactaattaatttaattctgata

SEQ ID NO: 147281 - DNA, 578 bp, Cannabis sativa
ccatccagtagtttagactaattgaacattaatagactctctttataagctactcttggttcctactcattaaacatagacaatgatgggagcaccttttgggtaaggtttttcttattctcttatgtcttgtacatcttgttttgcctgtttaattttaagaagaaaaaatagtaaagcaagggaagcaactctttttcttattcttgctttgcctcccaattccagatggactagaacaaaaaaaaatttgtaaagtctcactcatagacaattaatttcgtttttgtctagatttgctagtaccccatttatgcatttcattttttctcttttgtacttagacgcactgatgaacgcacaaggtcacacttttcaaaagccctttacaatcatggttttttctctatgtatatccttagtcacgcaaatgcaacttagttttttgtcaatgtaaacaaactatcgtggttttctttaacattattcttatgtagtttcatattttagaaactacaatccaatgttataaagattaacagaggcatcgaaaagcacaaaagaatacttaagcatta

SEQ ID NO: 147282 - DNA, 548 bp, Cannabis sativa
  modified_base (514)..(514): a, c, t, g, unknown or other
ctttgtttagatctgtgaaatcaacatagactcgccatttcttgttcggcttgggcactaatacgggatttgcgacccatgccgggtagaaagcttcaattatgaaatttttgttgcgcagcttttcaagttcttccttcagggctactgctcgttctttgtccaacaaccttcgtttttgttgaactggtcagaagtcgggatcgatattcagaacatgtgaaatgatagaaggatcaattctaaccatatcctcatgtgaccaggaaaaaacgtctacgtttgctcttagaaattttatcaattctgattttacttcgagcaacaaaccttttccgatctttagctttttggtcgggatatctcgatcgatctcaatctcttctaattcttcgataggtccaaaattgctgcttgggtccccaagttgaggatccagatctttaatccccggcttgggaagttccctacttgggaatttttttcccttgtctgtgctctggctggaggatanttccttcttagccttggccactacaaggttgtaa

SEQ ID NO: 147283 - DNA, 687 bp, Cannabis sativa
taccttttcactaagatcagattatgtaactaccatcatatttctacatatatggattcactcaaaggaaagaggggagaaaattcagattttcagaaattctgccgaattgtaaacacaaccaaaactcagaaataatatcgactcgtggagtatgtagatttaactgcaaaattgcgtaaaaaatatatggtgttcatttattattttcgtctcttcttttcttgaatcaattttaaattaattatcttcttagattaagttgacaaaaattcacgccaagagttatataaccaaatataatataacataaaagataaaagaaatatgtgtaatgtgtttaaatttaaattataatatttttaaaaaagaaaaaacattatttttatatagccatatttaatataactaggtaatgttatgtgttatgcacgtatacttagttatattcttagtttttattttgattatgtgcatttctggctgtattttttttagaaaagctagaaagatttttcttataatttcaataggtaacgaaatcacatatcataaatgttgaaattttatgccctaaataaaacccatttcaatataatctaatttattattaatagaagtttagaagtcatttatgtttgcttgtagttttcatgtttatggtttaatgtatataatttctgttaa

SEQ ID NO: 147284 - DNA, 590 bp, Cannabis sativa
  modified_base (536)..(556): a, c, t, g, unknown or other
gaacctacaatataaagaaatacaacgaaattgcaaaagtaattatttcattacttataactagttataaaaaatagtaacaagttacttagttaccaaattatacatacttatatatataatcaattatatcccacactaattcaattttaaaatttttatttctaaactaattaaatccctccaatgtcattctcattcataataaatatatatatatttcatagaatatatacaatacaattacaaattgtatttacataaaaaaaaaacacaccatatatacacacaatatatacacacatattcaaaaaaatacaaaaaaacatgtatatactatatattgaggtttaaatttttacgttataaccgcaatccgacgaacaatcccgcaaaaaatccgggcaatatgcacaaacaacacaacaatattactaatatcaaaataacccaaaaaatcatttaaaaaaccataaataaaataatatacattataaaaatgaatagaaattatatttatgttgggttttatgccnnnnnnnnnnnnnnnnnnnnnataatcagatttacttattagtatagatcagaaa

SEQ ID NO: 147285 - DNA, 764 bp, Cannabis sativa
atatatacatatattttatgtataataatataaaatcaaattattaagaagttcgattggatgttggatacattggatttttagacaccccatccaacatctgatccgatccaattagatatttaaaaataacaatctgatccaatcacaattggacatctaatctttagcagtcgattgtaattggatcgttcagttgtcattggattggattgatttttgcactccccttgtgaggtactattgtttgatgactttgatgtgtcattgtttgatggctttggtatcttttaaggttttcgaacttattttataagttgtccctaattatttagagtaatatagttaaatatcctatcatttcatagaaattagaattaaacaaaacttaaattattaaagtattccaaattttgatatatttttgtgttatttggcttacttcaatcttactcatataagaaaatgtttgaaattgtaacatataatttgtaaggtaatcattaaataatagttaactggtacattaaaaagaatgataaaagatactaattaaaatttggttttatttgattttttggttgaggtataatttaattgaaagtgtagttaattggtttatgaattaataaagaaattaaactattatagctgtgtttgataaaattataaaaaattatataaataaaaaaattgttataaatattaataattatgtcgatattcaaatcttttatttattaccattaattataatcaacatt

SEQ ID NO: 147286 - DNA, 950 bp, Cannabis sativa
ttgagttcatttcttctgttactacaggtttaactacttcaagtaactcctcaatttttggtaaagatggggttcccgttgtgaataactgtccataaaatcctgtaataatcttggtcatatcttcaactttcgagcaccattcattatccctatttaaaaggcctaccaagaatacaactattaaaaacttaaggaaacaaaattaatgttacatagttttaaaaatttcttaattcacaaaacttaaacttaattaatgtctgcatataatttaaaattttcctctttaattttatattataaataataaccgatggatacaaaacttaaactttaaaatattatttaactaattaattctaaagtccataatttagttaacatgtttttcctattgaaagagttatgctagttttcaacaaacttgttacaccaattatacctattaatagaaaacaattttggtattaattccaaactatacttatccacatacttaataatattataagcttcatcctcttatttattcaaaaccatccctttaatttcaaaattatcaagacattctaacacaaaaaaactcgtattttcaaaattgtaattctataaattaacctattaccaactttagaaaagagacataactatttttgaaacctataatatgtcatagaagattattttaaaccacatttatttaagaatttcattttatattatagataaattgagttaacacctccacagtatagttgtctatacactttgatttcttttctacaattactttagatgtgataaaattaataaacaacatactaatatcaaagaattactactagaaaaacatacctttgataatatttgttttttgccttgtttttgctttttggtgaaaaaatttagtgttttggtctccttcttgtagccattgtattctagac

SEQ ID NO: 147287 - DNA, 530 bp, Cannabis sativa
cttcaaataatattctatcttcctgactaataaaagtattgtcaaatttacaacaaacaaaacatacttacatagatatgataataaagaagttgctaaaaaaccaccagaaaaaacaaacttggaatagcattatttcgtctccttgtattagcatattgatgaaaaaaataataaatagaattgtattagcattatttcgtctccttgtattagaatgtaaaaggttttaaacaataataaatagcagtaatagaatttaaatttttttttgcttaaaaacattaatagaattggaaatggactttgagaattgagatggaactgagtaatgacaaattgctagccctttcaaaagttaggtttattaaaattgggctttaaagaaaaaatataggggaaaaaacataaatatgggatttttagttgccatttacttttatatggcagaaaaaaataaatgaaaaagatatgggaaaaaaattaattaaatggaaaaatatgggaatccaaaaaatatataaatatgc

SEQ ID NO: 147288 - DNA, 626 bp, Cannabis sativa
cccacaaccctaggttctgttatattctcaaggggttacactaactcaagaaatagggaaacacccaactacgatactaaaatggacgagaattgagaaagtgggacatttggggaccctgctaaaactagccagttttacaggtactggtaaaaccgactagccggtttacaccagttcatccaaaaacctcatttcttgctcaaaactccaccaaatgcaaccaaaccttccagagtacctaatcagggtataaacaatatactccaaccagtaattcaatgtaaaacacactaaatcaatttatgccattaaagactaaagctttgagtttaaagctcaaacttgagcaatatcatcccaacacaaccaaaccagcatacaaagcttaaattcaactcaaattaacctaaaaattcaaaccctaaacatttctaaccctaacagctctcattttacaaaatcacatactcaaactaaagaaaaagcttcaaaatacatatccataggttatagggtttacctcaacttcaagaacacttaatccttagcttaattccagaaaattgagaagaaaaagctggcatttcctctggttttgtctcagccgaaagagagagagagag

SEQ ID NO: 147289 - DNA, 572 bp, Cannabis sativa
ttattgaaaagaaatatcaagtggtaaaattataactagagaatgatcccttttagtggtcggccttctagtgacttttgcccaatattttattcttttttaattcatataattcaaacctaagccctagttgaaacactataaaaggaacatgatgttctaatctcattcaactattcacttcaacaaaatcaaacctagttttcattctctgacaactagtagatgagagacatcttctatacagttttcatgtctccttcaatgttcttcatactcgagcctatagtgatagagtgtcatgcccacacatagtaagtcaagtactcaatcatagtgcggaagacggtgataaccaaactcgaaggagagaaagagatccaaacatagatcttgataatactatgcgatagaaatgaacaagggttagagatctgagcgtaatgcgtcattatattttgctacaatgaatgtaaggttttctaaagtcttatgtgtttaatttcaatgttttagagatattcatatttaggatgttaatgaacatccttgttagtaaatttagatcctgg

SEQ ID NO: 147290 - DNA, 646 bp, Cannabis sativa
  modified_base (277)..(277): a, c, t, g, unknown or other
  modified_base (577)..(583): a, c, t, g, unknown or other
tgcaattttgctatttttcaactatttatccttttcacaaatatcatattttccaattccgccacttaaaatgccaaaactatttatttaataattgaaataattatcaaacaaaattgccatttaatatatttattaatcaggcttaacaaagactcttaattaataaataaaccctagaatctttttttttccacaattaagccctagcttagtgaaaaattcataaataagacatagtctaatttagaactataattgattaattaaaatcaantaactgagtcttacaagtagtattctctcaactagtatggggaccatggaccaatataaccgaacttccaataagcacatctaaaatttatcaagtaaattccttaacttattaattcctccttgcaccactatagatttggaagtacactctcaattatatagaatgctctatatattccacgatatagatgcgctatacaaatttaaccatcgttctaattccaataatcaaagatcctctatagatcatttacactgaacatggataaatttaccgttttacccctcaatgtatttnnnnnnnaaaatacttagcttcctataaatgatatttcagtaaacaaatataattactaaaataagagct

SEQ ID NO: 147291 - DNA, 623 bp, Cannabis sativa
tataaaatatatttctaaaatatgcattccataattattaatacataaaccttaaataattaataataaaaagtactattcataggcggtctttacattgtagctcgattggtataggcgggaatataacagtcaaactcacccaaataaccatcctggtcgagatcccgtaagcgtgcctcgttaacctttgatggagggcttacccacctggcacccaaagaaacttgccttctgtgaggtactgcggcagtaagttcctcactggcatagtccacgccctcaaccaagatgtcaccatccgcatccattggctccccagccacattatatcccccaaagtttgggggtgcaacctcctcctcttcctcttcctcagaaggactgcaaggacgaacatggtctcgttcctcaatctcctggacctcagcatccccttcatgatcctgctcctcctagatcgatggatgttgttcggcactgggtaaggtggcatgccgggctgcttgagggtcagatgtgtcgattctatgcattgtcttttttgtacgagccatcatcttatggctggacgagagatttaagctaaaatgtccgtcgctcgaagagggtggactagaacg

SEQ ID NO: 147292 - DNA, 1280 bp, Cannabis sativa
gagatgcccagcatattcctggcctgctgccaagacccaacgggagagtggctatgatctcaggaggacctcacatcaggggaactagccgtaaggagctgaaacgttatgcaggggtcgtgaagcacaatgaggtttgggaggtcactcaactcccaactcaaaggccccggctaatggaccagcccattacattcacagaagaggacgctaagacagtgcgttttcctcatcaagaccccttggtcatagagactcccattgccaataagattgtggccagagtcctaatcgacaacgggagttctgtgaattcattattcaaagaggccttcactgcaataggcctgacagaccgagatctttcaccaagcggttcccagctcacggggtttaatggaacaacacttatccctatgggaaaagtgaggctcccagtcaccttgtgcccagacacaccccaaagcacttttaaatactgcacatttgtggtggtggactgcccaatagcttataatgcaatcctcggccgaccgaccctggtgaattttggtgcagtcacgtcaataaggcacttgtgcctgaagtttcccactcaagaggctgggataggaaccgtaagagggaaccaaggggaggccaggaagtgttacaacgttgctacccacctacccgtcctaatggtccgtgaaattattgagccagaaatggtggaagaagatgagttggatccctgtgtgggagccaaaaaaattgtagaacccatgaaggacgtcgaggaagtgtcagtgtgcgacatcgaccccaccaaagtccttcgactaggaaagagcctagagccggaggaaaaagaaaaaataataaagacactgaggggcgccacggatgttttcgcgtggcgtcaagaagacatgactggcataagcccccacgttataacccacgtccttaatgtcaacccggacatgccaccagttcaacaaaaatgacgtcccctcgactcggtgaaggctgaagccttagaaaaagaggtggacaaactgctaaccagtggcatgattcgggatgtgtattacccagaatggctagccaattcggtactggtgccaaagcccaacgggacatggcgggtttgtatagacttcaccgacctaaacaaagcctgcccaaaagattgttaccccttgcccaggattgaccagatggtggatgccacctcctgattcaagctattgtccttcatggacgcgtacgccggttacaaccagattaagatgcac

SEQ ID NO: 147293 - DNA, 1702 bp, Cannabis sativa
agcggactgcgcctactcagctcttcctccaacgggccaagaccttcgccacatatgacaagaaggaccttgacgtagggggattggtcgcgacggagaattgccggaaggccaagttgatcctggggcatcagtcggtggaggactccaacctttccaatgttatttgcccgaacgtaagggttctggccgtggagaagacattccgggaggagatcattgccacggcggaagataagtactgggagtacctctaccggaaggcccaggagaaggcttatactaaggcccaggcggttgctgggaggccccttcgcgtagggagcccggttgaaagggggacccaggcggctgccgggaggccccttcgtattggaagtccggtagagaggagggcccccagaccaaggcctactgtccaggtgccgaatacgggggctcctgatgccagcacttccggttctggtaagtcccctttaacaatacattacgtccctcctgttcgcgaatacgctagccttaggcctgttggtttcgctgaacgtctccttaggtttaggatgcccttgacccgatggggggatcatgcaaaggagtattatttctccaacttaggagattatttaggttggtcccggatgggttctggacctccggtgcccgttcccttggatccttcggcctatctttcttctagctggttccatccctcggacagctatctcggggacgatgcagccagtgttaagattcggaactttgctagggccaaattagagagtcagggtaggactagcttgattgctttttaagtgtttactactttcacagatattctaacacttaactcttttttcttgttgcagcagctaatcccatggaggcgatcttggccacccttgccggagctaacagtcctaatgcttcccttcctcccacttcttctcatatggtcaccccgtgaaggcttcttccagtgcccttccaaacactattgacttagtggatgaggagtaggtacttcttgaggaagctaaaaaaggtcaagaagagcaatgggctcttcctggggaagttgaagaaagtgaagaagagcaagaggttgctctggtgcgcaagcgcaaaggcaaaatggttgcagaggagtattctaagcggccgcggagggtggacactctggccccgagtcatgattccgagatccctcccgaggcggaggagtttacagtgcctcacggcattgtactgactctggccccggatagccaagtataattatgcccttgacgagtactcccaggggcacgctgaggtggaggccttgaggagggttttgcgagaggaggtgcaaaattctcttaacgagtagaactaccagaatccgtgggatctaaacctggaccccctgacggactggttcaaccgtttccttgggcccaccttggctccttttgccgctgagatgaccggtgagtacatctcccagctgactcggtgcgcgcctaagcggtatgctgcttgtgcatccttgaactccgtcttccaagttcaggacctcagccatgccttgaccgcgataagtactttgtgatttatttctttcctcgttattttacttaaggctttcactcactctcgcttccttttccagattactacagaggccggccgcctttccaaaaccataattaatcacggcttc

SEQ ID NO: 147294 - DNA, 518 bp, Cannabis sativa
tcctcgcgcaaggtgttctgttgctcctcccgcaggatcttcttcaaggcctcgacctcagcatgtccccaactgaactcgtccaaggcgtagttatctttggcgatgcggagcatttgcctttccttgtctgcggggatcggggtcagtacgatgtcgtgtggcatagtatactccttcgctttagaaggaatctcggagtgagtgctaacagccggagtgtccctcctccgggggcgcttggaaggctcagtctcaaccgttttgcccttcctcttgagctcaagggcagccgcaatctggccctcatcctcctcgatttccccctcctcgtctatcaagacgatcgtgcctaaaggggcactggacgaggacctcccgggggtcgccagttgggatgagaccggaggcagagaagcgtcagggctataggcctcagcaagggtagccagaagatcctccattggcttggctgctgcaacaaagaaataaacaaagtgttagaataaccataagaa

SEQ ID NO: 147295 - DNA, 834 bp, Cannabis sativa
tcagaatgcatttttatgtcacatatagagatttcataattttgcatattcagtgcccgacaacattagaacgcggtgtttggctattagaatcagatcttagttttttttagtatagcgaggcagtatagttagacattagaattgtcgagaatagtcgagaatttggaattgacgaaaatatccttaagtgccctttatgcctattagtgtgggaatggcaaaataatcttttgccaagggtttcttttgtcttttagcaagatttattttaagtttatttcagtttattctttagataaattagtagttaatacctaagttattacatttatcatttatttttcataaaaatcaaaaatcaagaaacaagctctcttctcactcttcactcgttctttctctcgagccctagaagaaccagcaacttagtggagttcttcagcttgttttgttattagtagttagcttttggtgtttccattgtaggtaatcctctttagcattttgttttccatagttctcttaagctttaagtaattatttattgcatggattgagtattaggattctgagttgtggattatattttctttagttgaaataggtttcatatgttggttttagcatgttttgattgtttggtttggagtttagacaaggtttgagttagaaatcaaactttggtctctaatggtgaaatttgattttaaggttctgtagttgttttattgcttgggatatgttctttatggtctaaataacaggtctggaaagtttggtagagtttggggttgaattgaagttgtaatggaattttgagtgattcctgca

SEQ ID NO: 147296 - DNA, 519 bp, Cannabis sativa
accaaagctatggtcttattctgaagaactttatcttttctatcaaggatctgtactggctgttcttcataagacatatctggttgcagttcaaggttttcataactaagtttatgagcacggtctgaaacgtattttctcaacatagagacatggaatacgttgggaactgctaaaagagtttaaggcaaagctaaccgatatgccacttgtcgaaccttctctagaatctcgaaaggtcctgtaaacctggcataacttgcctcttttcctgaaacgtttgatccctttcattggagatactcgtaaaaacacgtgatcccctacttggaactgaacatctctgcatttcagatctgcataactcttttgcctactccgagaggcaagcattctagcttttatcttcacaattgcctcagtggtccggtgtactgactccggacctagatattttctctcccctgtctcatcctagtggatgggagatctacactttctaccatataaaagttcata

SEQ ID NO: 147297 - DNA, 536 bp, Cannabis sativa
actcaatcatacattgttgtaatggccttattgtagctaatattatctcaattaagtggaaggatttgcttcgttacaggtcagtatgcaaagaatggcataatctaatcgacggtccagatttgatcaagatgcaactcaagtcatcaaagcaaggactctttatcaatacccaaaaagacttgtattggttggacctcgacccactcgactcggctcaacaactcgacaaaaccaaaatctcctttgactcaatcatacattgttgtaatgacccaaaaagacttttgcttattaagttagatttgtgttatatttttattatgggatcataaaaattaggttagatttagattaaactattgtttattatattatctatgttggattattagattttaaattatgttttttcatatttttttaatgaaatctgcctaaatagtggctaaaatggattggattcattgatttcatcaatggatccaatccaatccaataaaaaaccagtaaaagcatccaatggatggaaccga

SEQ ID NO: 147298 - DNA, 569 bp, Cannabis sativa
cggaggtactttaatagtccgtaatttcttccataactcagtagcaacattgttatgaatattaccattaatctcttgttgcagtctatacgcactcttgactgaaaacatacctttatcatcctttagccaataccaatcggcctccctaacagctgccgtaagaggaatacgccaaaccaatcttttgtcccgatcatttaatacatctgagagtacctcctgatcccattccaacttgtcaatgtgcatcagagaactcaccatttccccttgaagactcggactggaagtctcaatgtaaggattaatatcatccataagccatggctcatttagaatgctaacccgagaaccatcaccaatcaaacgcctagccccagagcgaaccaagtcctgagcttccaacacactacgccaaatgtaacttgggttactacctatagtagcagtaaggaacgtaccagaggggaaatatctagctttaaaaactttcgtagctagagagtcctcgcaagacaacaactgccacccttgtttcgcaagtaatgaaacattaaaatcccgaa

SEQ ID NO: 147299 - DNA, 961 bp, Cannabis sativa
taatatgagttatatgtgaaataaaaatatttttaggttcggcgaccctggagacccgattggaggccaaaaatgtcacaacaattttagttaaaaaatattaattgaattattgagataagttgattttagaaataccgaggtattttggaatactcggaatttgctaaataccctagaaatatagatttcttagtgactaaaaaataataagataactattcataataaaaaatttattaatattatattattattatattatatatataaactaacgtatcagatatatattatatgtttttaaaaacataacagaagaagaagaatgaactcttgttctctctctttcgataaaattttctccttttatatttattttctttgattttcaacccgaaacctagcgatctaagctctagtagtagcgggatagcaaatccttgaagaggaaaagcttaaggtatggtttaattacgttttaagctaaaaacgattggctttatataggagctttatgatttaaataggttatggagattttgacttcgtagaattgttctttggtaactatgggactagtttatatgtttacttgttgaatttgaggtgattttgagttagaaatcgagttcggaacttttcaaaacttagttcgaacgttaatggcgtttttcatttaaggggtcaattttaatttctgttatgcaaggattgtaatatttatggtatatatgcgccctgtgaagtttggagtgatttggataagtattggtagtgtttcggtgagtgcgaaaattgggattttcgagtttcattgtttttaaaaattcctaggagatcagaaatcgtatttttgtcctaactgttgacttcggtatccgttttggacgttctatataccgtttcgaagcttgcaacgagctctaaaatatgttttatgttttagagccaaaatata

SEQ ID NO: 147300 - DNA, 615 bp, Cannabis sativa
aattcaagaaatggcttcaagccatggacaatgagcttttagcactcatcaccaacaaaacttagactgtggtgcctctcccacctaacaagcgagcttaggatgtcgttgggtgtacacaattaagtacaacagcgatggaagtgtagaatggctcaaagcatgccttgtagcacagggatacactcaacaagaaggcttggatttttttgacactttctcacctgtagcaaagatggtcactttcaaaatcttactcgccatcgtcactatcaagcaatggtacactttgcaactcgacatcaataatgctttcctaaatggtgacttagacaaagaagtttacatgcaaatcccacaaggtctccaactcccttcctcaatcacgggtcacaaccttgtatgtaaactccataaatctatctatggtctatgccaatcctcaagacaatggtataagaaactcaccgatgctcttcttgaagagggattcactcaatcgcaagctgattacactctcttcactcgcggaacacacaacacatttgtggtgcttcttgtttacgtagatgatattatgaaaaaccgtgtttttgcaaatgtcagttgtatata

SEQ ID NO: 147301 - DNA, 1020 bp, Cannabis sativa
cggtaaaaggagaggtcccatgcagcttgtatatgggctttctctgctgctcgagcattttcaaagccggcaaaagcatgatttgatcaatattcccagctaagggagcagggactggtgctgctgcaggtgttgttgctactacagcgaggtttgctgggacattaactccagtagtcacagctggtgcgttaggcggattggtgcgattatttacaccctgatcgcccattcggggatcacagggctcttcaacgtcacgaggtgcctgggagcgtgccctgaaaatagcgttaaggtgatcgcgtagatcacccctgtgcacctgatatcgttctccctgcggtgtctccacagaaccggacctagtatacctgctgggtgtgcgaccatgcgaggatgaggaggcggattccacgtcattgtctcgcgactgaggtttgctgcgaggattgcgtcgttcagggtcttcctcagtctgtgcctcctggttgggatatctcgcagattggtcccttgatgttggttgattcaagtcaagtccttctgggttggcccttcattctctgcgagtatggttattacgacgtctagagttagttacttgagggttgtctgtgcgagcagtgggtgctcgaggaggacgtcgggtcctgttctgtccatccacctcggcttgtagggcgcgtagctggtcttggattgcagtatgctgatcggtggtcagttggactataccctcggacaccggcgccggagtgaagggtggaaagtgccccgttgtggctgctggtgtagatgtttccccggcatgagggctagtagtttcagggaataggttgagaggtctcacattaccccgacctactccgctattgatgacatctacggggggtactctacctcctgatagcggaacgttcatcattccgatgttgatatggattcgttgttaagacctccgtttgcttggtttccagccattatgattttctctctaaattagcaacaaagtacttc

SEQ ID NO: 147302 - DNA, 792 bp, Cannabis sativa
gctgacggttgcactcgattacttttgatttcccatattcgtttttaaggtgggaagctgaggcgtctgaggtttctttgagacaattacctcttttcgtaactttcctataaatgtccatagcattagcacattaactcatttcatcacccttctctgctaagtaagcttcagagtgaaagaaaatttcttggcttcaaagtcgccgaagtgccttcgtacaactgctagttggatagacgttgcttgaacccagactcttgaatcttgagtaagtttctgatttcctttatgcttatctttgcttgtttacattttgaatgcaacttctactgtgctgtagagaaatgcttaggaaaccctaggcttagaaacttctgggattcttctttatcatgtcttcatgcaggtttacagccataatgcttgtttctgaactgaataacgtccgtctttcatcttgcttgttgtaagcttcatgaactttttttccctaactgaagaaatttttttaacttcttgagttcttacttttctttaagcatagtcgttctttaatctgttgagtactcctggtcgacatatttgcttgtttattgtttgatattccgaccaacactcatctcgtgtgttgtcttttgtagatgaactcaggtgaatcttgggaactcagacattagatcgaccaggatttgcttcaacttatgcacgaggatcatcctcgttcttgttctagtcctccttcctctagtgaaggacattcttctggccctgtacccagccataggatga

SEQ ID NO: 147303 - DNA, 751 bp, Cannabis sativa
cctcaaaaaatacaatcgggaaagtttctaggcttcatcatcaattcgtgaggaattgaagctaatccatagaagattcaagccctcctggatatgaactcgccaacaaaaaccaaagaagtgcaaagcctgactcgtcggatcaccgcgctcagcagattcgtttcaaaatcaacagataagtgtgtcccattcttcaatatcatgcgaggaaacaagtagtttgagtggacagaagagtgtgaaaaagctttccaagagctaaaagtacagattgcaaaacctcccgtactctcaaaacctctagacagagagctgggaatatacttagctgtcatggaacatgccgtatgtgccgtgctgatcagagaagagaacaacatacaataccctgtctattacatcagtaaaagactcattgaggtcgagggccgatacccattaatagagaaactcgcctactgccttattctagcaacaaggaagttgaggtcctatttccaagctcatcttattcgggtatacactgaccagccactacgccaaatactggaaaaatcaaatgcttctagacggctactcaagtgggcggcagagttgggccagtatgaaatcacttttcaaccccaaacaacaaccaaaggccaagccttaaaagactttgtggtagaatgcacaagcaagaaagaaagcataccaaaaagcaaccctgagccgatacaaacacctcagccaagtaacaatgaagata

SEQ ID NO: 147304 - DNA, 1166 bp, Cannabis sativa
attaattaaataaataacttataaaattaatattacctcagccaaaattaagtaagacaaaattagaaactctgcccttgaaatgacattttgccccttataaagcacttaaacttaaaaccaaacctaggggtattatggtaatttaactaaccagccaaactgacatcttaaaattctaaactagtccaaaatacttccaatacaatccttcatttattttcgtgacattttttaccactccgctgagcttccacggttgtcgggcccgaaaatattttatttcaaaaatagtatctacgatacccacataatctaatataatcttcgtaattaataaattatgctttatttaatcatttattacattcacactaattaacctaagtaagattataatcttacttcttaccagaataatctgcatatttaataaaatatgctcaattaaataccataatattttttgagatattacaactatattcccttcttatagaaattttatcctcgaaatttacctaaaaagctcaggatactgctcccgcatctgcgactccaactcccaatttgcctcttcaaccttgttgttccaccacaacacttttactagcagaatagtcttgttttacaagaccttttccttcctgtccaggatctgaactagttgttcttcatatgacaggtgagtttgaagctcgatatcctcatcacttaaaacatgagttgtatcagacacatacttccaaaacatcaagacgtgaaacacgttatgaaccccagatagagcaggaggtaaagccaaacgataagatacctacctactctctcaagaatctcaaacgagccaataaatctggggctcaacttttccttctttccaaacctctgaattctcttcgttggggacacccaaaggaaaataaaatccccaacctggaattcaatatctctacgctttggatctgggtagcttttctgtctactttgtgaggcaagcatacgagctcgaatcttttcaatggcctcactcgttctttggacagtctcgggtccaagatacctacgctcaccggcttcatcccagtgaatgggaaaacgatacttccttccataaagcatttcatatggagccatgccaatagtcagtggcggacccagaattt

SEQ ID NO: 147305 - DNA, 609 bp, Cannabis sativa
gaggttgtggctgctgttaatgttttatgttgttttcttaagcttaattgtgattagatatgtggaattaagctggttctaatggttgttagttgattgtatttaagtttggagttttaagctcaatcttgggttttaatggtggtggtagtttagcttgttgttcttgctgctgtgattaaatgatgttttctgtggttatattatgtttatttaaagtgatttaagcaggttttaaggggtagttagttggatgagcaagcttggagtttttgaactcaagcttggctcatcaatgctagtttttgtatttgtgcatgaagttttgttttattgctttagaaatgttcattggggtctaattagcaggtctgaaaagtttgaattggtttgggattgatttggtcgagttatgaaatttttagtgattcctgcactgaaccagaattccggttcagagaggccagtaggaaccggaattccggttggcttctaggatttccacccagaaccagaattcccattggggaaccgctctaccggttggggcaaatttgggaaccctagtttttcccatttttgtgttatttagggtattgccatgctatt

SEQ ID NO: 147306 - DNA, 725 bp, Cannabis sativa
atcttcttctatttatttttttttaactgtttgactaaatttttttttctaacatattttattgtgagtctctatttactgtaatctatattttatatttttaagtaatcatttttatgtacggaactatatacatatttgccatcattacaccatcaccaataagactaatatcagaaaaatgatgtttttagtatttttttctttttctatttaatgaactaaattttaaaattaataaaattgatatgtcaattgattctattagattactaaaaaaaatattttgttactcatatttaaaaattagcatatgatattattttagataagttaattttattgaatcattttgatatacatatttaagaaacaaaatagtatcttaaatatcataaaatgagttacattacataaaaacatgtctatactaattttattaataaattatttaaatatacatacttaaaaaacaaagtggtatcttaattaaatatcataaaatgagttatattatcaaaaaaaattgtatatactaattttattaataatttattttttaatttcttaaatcgttaaataaataaaaaaaaaaagtaacataaatgtattctaaacaataaaatacatactataaaattaaattgaaattataatcaaaataaaatacataaccgaataagtaaccaaaatctggtcaatatataaattttatttaatttaaa

SEQ ID NO: 147307 - DNA, 963 bp, Cannabis sativa
ttttagaaagtttatatttagggtgttaaacaacatactagtgagtagatctaagatcctggtaaaataattttcaacaactataattaatattattttaataaggttaaaatttcttattaaaattttatattcaatatcatcttgatgtattgaataattaataatatcattaatgcatgattattgaataatcatatttcgactccaaagttcgaaaatagaaagtgttaactttcccattaatttatttctcactaagttttgatgttctatatttcaaaacaatcactaatttaaattagttagacattcaaaccttcattgatatacattgtatttcaataaatctcatttattgaaatctttatagttccactggaaatttaacttagaaacactaagggcccgtttgacacagtttttggaaaagttaaaagttacttttcagaaaagttgtgacaaaaggtgtttggtatgtagttaaaatgcagcttattgaagaatttatggaaaaattatagctaaaagttaaagctggtacaacccaactttttttaaaaaaagttattttgattaaaagactataataaattattttttactaaaaatctatttaattatttattatatattacaaaaaataaaactattttttccttaaaaaaatatttaaatttttaactttttattttgttttaaaaaaatattttatatttatattattaacaaataatatcaatctaagtttcttataaactacaattttttattttacaagtcataaaaatataatttaaaaatattaaaaattatttttatcaaatgcatataaatttatattatggaaaaaataataaaaaatatatagaaaataattttttttatatatatttgtgataataatgaactagattaaaatattatcattattataatagaatcttaacaactcacaacact

SEQ ID NO: 147308 - DNA, 672 bp, Cannabis sativa
ctggtagggtccttattaattgcttcattcataaaattgtgtcattaattttgtcaacaatatgcatataaacatgaattgtatacaaatattacatcatattaattgcttaagtaataaattaaagctacattattatactccattgcatttataaatttttctaaacaaatatcaacaccgtataggtgtggaagcaaactttgactcctaagttaattaggggtgtttatcggaccacatccaatgtttttaagtctatccaaatctgatttaattatatattagatattatattttactattcattcggatccaattaatttcagtcatccaatccacccaacatccattggattgttggattggatcggtttcattttttcatttataattggatgatgtatttcatatatatttattagtttatatttgggtttatcaaatatttcacacatagtattttttggatcggatacatctaatattttaggttcagtgtgtattgaattggactggatccatccaatccaagaaaataagagtaaaattttaatgtgaattaactggcacaaaaaatctatattttccccattttttttcctttttatataattttatctaaattaaaataaaataactaattaattttattacaataacaactaactt

SEQ ID NO: 147309 - DNA, 558 bp, Cannabis sativa
atctagatcttggtaaaatatatccaacaatagatgtaggagatatatgtgttatatcaatttctattagtttctttcataaatattttatttttaatatcatgggaattgttgctataaacttgtagcagtattgtttatttgtttgaataaaaatatattacattgtaataattatttaatttaaataataagaaaaagtattattgtaaatcatgtgaatagtatttgggaaaattaaaagaataataatattttagtcttatgatatgataaaataattaaaaaaaatatcatgataatatatttcaataatgcttataatgtaagtgacaaaatgtattatgaaaattaaaataataataatattttaagcttatgaaaataatacacaataagtattattgtaaattattcaataatacttttaatataagtgaaaaaatatattaagaaaagtaataaagataatgcttattcagacatatctatatataatataaaggaaagcacaaaataagtttatgtgacatcttagattttttttattctattttt

SEQ ID NO: 147310 - DNA, 689 bp, Cannabis sativa
  modified_base (48)..(52): a, c, t, g, unknown or other
aaaaagtcacccatgaatttctcgtaaaccaagaattctgttatatannnnnactttatatagaatagatacatactcatctaatttaaataattttcaagaacccttttagtttttcttctttgttattatatgtgtttattcttatatatttattctcatattcaattgttacattaaaaatgtaattataatgattacatttgtatatgacctactatataacaggtcaataataggtaaaaattctatctttaaactcaaaaaaattataattaagggtatttttatttttgcactttaaaataattttttttttgtatttttacgaaaattgatatatagaaacccatatagcagccaacggagcaacctacatagaaatcaccggagcaacccaaatcataaatttgaaaagaaaaattaaaaaaatagtatatgggataattctcctagtaataaattatctacttaaaataaattattttttaattaaaatatttaataagatatttttcacaactaaaatttataaatatttttaatttttttatttataagaaaataaataaaatctggttaatatcaggttacaaataatttattaattatttttatttgatttctaaattaatcacaaccgtttaacaatgattcaacaactaaaataaatgtaaccaacgtgatta

SEQ ID NO: 147311 - DNA, 590 bp, Cannabis sativa
atctatgagcaaaatagtacggattggatcagatgaacacccttaatttaaactattctttttttaaaaaataaaaataaaaataaaaatctaataacttagactaattagggattgtcacgtgaaaatttacttaacacttatcagccaaatacctacagaagtttgagaattataacttaattattattaccgttaaaaattaaatttaagtatttatttgcaactaagaattaaatttatgtatttgtactgtaaattactcttatttatttttatatatatatttgtattatatactagtgagggaaccgtatgtctactagtaaatttgaattactttttttttttatcaagttataattcatatgtactatatatttttattttttagaacatatgtaataattaaagtttatatttatagttaacggttcttaaagttaaatgttaattcaagctatgttttaaaaagagaaggtgaattgaaaattctaactaattttggtaaattaaaacttttaacacaaaactatgcaattagtctcttaatcaagtaaatgcaagtaatatgataagcaattatatag

SEQ ID NO: 147312 - DNA, 1175 bp, Cannabis sativa
  modified_base (1075)..(1082): a, c, t, g, unknown or other
ccgaatttaaaaggtaagaaatcgaaaatgaatgcatagcaatcttaccataaatggaaaaattattttgtcacctaacttgccaaaaaatggctttacatgtgttaacaacaatttcttcataagtttggaaagtgcataaaataactctaaaaatcacaacttgataacaaaacatagcaaaaatttgactcaaaccgcaattttacaatcatgctcggataattttgaaaaaatttgacttaaaatttcaacaagataattaaaattttccaaatgaatgctcactagagctcaccacccccaactcaaaattagacagtgtcctcaatgtcacaaaatatgaaatgaaaaagatagggaaaagagtacacctgattgacgatatgcatggggtgagagcggagataacctggtaataaacaacaacaaaaacatagaaaaaaatgcaaaataaaataaaaacataaagataaaataaaatactatagcatatagataggaataaagaaacattcagagtgtataatctgggtcctcaagaaggacctcttcaacaaagctcatactctcaatgtaatgtttgagtctctggccattgaatcgaaaagtcctcccatcggttgggtcctcgacctcaacagaaccgttggggaatacttgtttcaccacatatggaccagttcaccttgatctcaacttaccagggtggagatgcaaacaagaatcgtacaaatgtactttctgattcggctcaaaatgttttcttaagatctgttcatcgtgagcaactttcagatttgctttgtagatcctagagttatcataagcatcatttctcaactcctcaatttcagataattggagtttccgattcatacctgccgcacttagatcaaagttcaaggccttaatagcccaataagctttgtgctcaagttcaacaggtaaatcacatgctttcccatagacaagccgataaggagacatcccaagaggggatttgtaagctgtgcggtatgcccaaagtgtgtcttaaagacgtgttgacaatcttttcggtcgggatttaccnnnnnnnnaagaatgtttttgatctccctattagctagctcagcttgaccattggtttgtggatgataggcattggcaactttgtgaagtacaccgtactt

SEQ ID NO: 147313 - DNA, 554 bp, Cannabis sativa
tgctctatgaaagtcaggggtacccttgtagacatttatgggctacaatgaaaagattaaacatgagaagaatacctaattctcttctcatgaagcgatagagcaaatccgcgaagacaaagctccactaacatttttacccgccagcacaaccacaacaacacatttacgagatggctaagtttggatctctcagttcactaacttataacttcactttcaatgcagcaaaatcagagaattcgtacaaccgtgcaaaggaagagattgaacggctaactctaatgttcaaggaagaatttgagttgaattccaatccggaaggggagaccccacaacctggaagatatcgtaacaaccccaacattattaaagaccccgaagttgtaagaacaaagggtacgggaaatccaagggaaggaccaaacggggagcagatcccaagaaaatcaagacattgtcgcatttgtcgctcatcagaccatgattaccgatgatgcccaaatcgtcaacataatactggatctcaggggcaacaacctccaaacaatcaa

SEQ ID NO: 147314 - DNA, 702 bp, Cannabis sativa
ttggttcccctatcacaacacaagatctaattctgcaactcctcaatggccttgggcctgaattcgatgctgtcgtgtctggtataacttcaagaagcaacttcctcaccttcgaggaagttcaagctttcctactctctcacgagacttgaattgaacaccacaattccattactgatttatcagtgaaaatgcaagcaaatcttgctggaagaaatggccattacagatctccagttggatcaaatcgtgacactcaaactgattcaaatcaatacagatcttatggctgtcccctgattcaaatcccatgtatgacgcaatacatagttataaatagaatttaaaatattagtgtattagtgctggcactacaaaaaatgagtgttttgcaggcgcatatttgcgtctccaaaagtcataatttgcgcctggaaattcttcatagatgcagaaaacagcatcctcgtgcgcccacaattatgctactacaaaaaatctcccaggcgcattaaatgcaattcgtccgtgattgtattggaattcataggcacctttcttcttaaaatgtgcacctaaaaaggtattttttcctaaaaaaaattaaatattataatatatttttacaggggaaggagttgatgaagaacgagttacagccatatttatatatggattaagagaaaaataaaaagagagaaa

SEQ ID NO: 147315 - DNA, 986 bp, Cannabis sativa
tttcattcaaagtggattgatcttgttatgtcttgcattacttcggtcagttataatgtcatccatggaggtcatgttgttggccctatcattccatcctgtggtatccggcaaggcgaccccctttccacttatttgttcatcatgtgtgctgaaggacttacggcgcttatcaacaagtttgaggcaagacgggctattcaaggttgcaaggtggctcgtggtgccccttctatcactcacatgttatttgcatacgacaactatctcttttgtcaggccactacagaagctgctacgagtgttaatactcttctacataccttccaactggcgtttggacaacaagtaaatttttccaagtcttctgtcttctttagtcctaacactactacccaatctcgttctggtatttgctctgtgcttgggatggttgaagcgtcagatggaagtctgtatcttggtttacctaacattattggccgaaacaagacctctattcttggcttcttaaagaataaggtcatgtctcgtatcaatagttgagatggtaagttcttatctcgagctggcaaagaaattctccttaaggctgtgatccaatctttgccaacctatgctatgagtgtctttcttattccgattggcatttgtgaggatattgagaagcttatggcaagcttttggtggaaaacaagttcaagcaagggtcgaggtattatataaatgtcctgggatagaatggaaaatccaaagctggaaggtggcatgagattccgacaccttcatgattttaacattgcaatgcttgctaaacaaggttggcgcctcttatgtaaaccgaactctttggtgggacaaattttcagtgctaaatattttcctaccagcgatatctctctgctgaattggggaataatcccagttttgtctggcgtagtgtttgggctgctcaaacggtggttctgttggaatatttattttac

SEQ ID NO: 147316 - DNA, 556 bp, Cannabis sativa
gggacccgaaactgaaacatgaacaagaacatgactaggaccctggaacaggaccgggaacgtgaccaggacccacacctggactgggacccagaactacaccggaacccagccccggaactcgtgttcagacccagtcctagacccagtcccgtacttagaataggacttagactagaacctaaacctgaactcgggactcgatccaggacccaaatcgatcccctaacctaaattgggatttggacctggacatggacaagaactcaaacctggacccaaacgcataccctgacccaaacctgggaccagacctaatacccgaacctagatccagactcagacttagacccagataggagtccgaaaaactcgtagccggactaggattgagactcggaccatgaccccaacttggacctagacctggacccggaagaaaacccacacctaaaatcaaaactggaactgtgactaggacccggacctgagaccagaaccgaacccaaaacataacccaaacttagaccaaaacctggaccaagaccttgactag

SEQ ID NO: 147317 - DNA, 928 bp, Cannabis sativa
tttataaaaaaaataaatttaatataatatatgtaatttatatactaactaccacgtgtaggcacatgaaatttcactagtaatatgtacatatttatataagcatcaacttggtactattcattcaatgtcggtgcccccacaactaggcaacatgatttcaatacatatggatattaaaataaataataatataaaacaaatatatttagagtaattaataaataaataattgatttttgtaatgtgattagaacaattagtggatttgctgttatagtattagtttgtcctctcattttagtatagtaatattttgtatttatatgacaaagttagtattattttatccataattaactttaatgtattagaaaaattaataagatttgtatataatttaaaaaataattagatatgcgtacttgattaatccataacaattacaataatttaatagtgcaatatatactatcaactaagtctttcttcataaatttctaaatcagaaacaattttatttatcttattatcaaaagaatatacaattgtgatcagtacaatatgtatttatagagttagaaaatgcacataacttcataaccctagttagattgggtctgctcattaaaagtttcagtcaactaaaaaatctcacatttacatctgcttcaactagacttttatacacacatgctaagcccattaactattgattactaacaatataggttaattaacacaacaaatacttatccaatcaattcatatttcattaaaactaataaaagttaatataagcccaaataaagtgtaacattctaaccaaacaccacataatttaaaatttaaaattaggatgtctcaaaaaaagaaaaaaaaagacaattaggcgtatgtgacagtcaatagtcctgtgatccgtaag

SEQ ID NO: 147318 - DNA, 510 bp, Cannabis sativa
  modified_base (313)..(313): a, c, t, g, unknown or other
  modified_base (414)..(414): a, c, t, g, unknown or other
ttgagtggatcagcaccacccttaaacactggcggattctgcttcctgaaccgctcatacaacggttccaaacgattccctgcatctggtggcactaccgaaggtgctggaggaccaggattagggtttagagcaggctgagctcgttgctcccttaattctctaatttgttcaccctgctgctggatagtctcttgcatcgcagcatataactcttctcagtttggtggtggcggagggttctcgccctcaccagcaaccccgagcccagctagctcgcggttacctctaccagtccgcctcgggtgcatantctatacacatgcggtcacattcaaggtaataacaatactagtaagtattttcatatatcttagtccttcccacacattagtactagaaataactatctanaatatatctcattaactaagtatttttctacaattaactttaaaatattcaatgaaaaataaatttcatatattttaaaagttaattatgttgtta

SEQ ID NO: 147319 - DNA, 869 bp, Cannabis sativa
  modified_base (803)..(803): a, c, t, g, unknown or other
gggtggtcaagagaatccacctcaagctccattctattgggagcggaggtttgctgagatgcaagccagaattactcaacaagaagatgaaattcaaagactcaggcaacgggatgctcctgttgagcctcccctgcaaccacctactccggttcctgcggtgccagcagaacagcatgttgctggtaaccgtatggagcatttatatgagaggttcaggaagcaagcacctccaatatttttgggagttcctaatgtgcttaagggagaacactggttgactgttattgaaagaatattgaacttcatgggagtggtcgggaatggcagggtggcatgtgccacatttcaatttcaggaagatgccttggtgtggtgggagatggtatccctcactaaggacgttgccaaaatgacttgggaagattttcgggacttgtttaatgctaaatattatagtaaggcggtgcgtagtgcaaagcagaaagagtttgttgagttggtacagggcgagaatatgtcagtgatcaagtatacaaccaagtttgattgctgggccgaattagccttagggatcgaaccaacagacttcttcagtaaaaaggaggagtactagtacttgtacttggttggcagggttgaatgccaagattaggcatgatttggttatcacaacaaatgacaccacaacctatgctaaaatggttgacaaggctttacgaactgaaggagcagttaagttgttgcaagaaacccgagagactcccagtgctggtgggaccactactctccctatttctggncctggaaaagagagtggtgattccacttttgaacaaaagaagagaactttcccatcatcgagaagt

SEQ ID NO: 147320 - DNA, 1002 bp, Cannabis sativa
  modified_base (387)..(392): a, c, t, g, unknown or other
atgatactctcactcatccaactaatgtcaacctgactattcaaccaacctagaagagagagttccttccttagtgatttcacctacttcattgtgcttcctacttttacccatagtgaaagagtgatatgcccacacataggaagtcaagtacttaatcatagtgagtaagatggtggtaaccaaagccgaaggagagaaagagatccaggctcaaatcttgataatgctacagaaaggaatcaagagctagagatcttgaaggaaaagagtcattatacttcggtgcaatcaatgtaaggttttcttaaacccttatgtatttaatttcattgttttaaagaatttatatttatgatgttaatttaacatacttgttagtaaatnnnnnncctagtaaaatattcccaacaattggtatcagagccatggtaatgatatactttcacgaaatatggatttaaaatgatgaatattatttgcgtgttgatttggatgtattcatgttggtttatatgttatatgatctatgtatgtgaattatgaaattttgtccatgaaaataattttattttcattctaaaaatattttatttggattccttgtgaaaaattaagcagtttttttggtttttatggaactcaattattgtgataaaaattgagaaagttatggatttttgaaaatcgggttgaaggggtgtcgagtggtgcacgtcgcacgcaccagtcactcggacaaggtgctcatgcgcgcgcgcatgcctcagacatcaccctgtctgaagcccgcctgtcccacgctcagacaccaccccgcacgtgcatatgctgcaaatggccgagttttctcaactgggatgttgaaggttcccctgctccgcgcgcgcaagtgctgcgtgcagccttcctgggctacatgtgcagccctcctgggcagcaacaccccaaccctattttaatgggattttttttcaattttttcaaattttcccaatttca

SEQ ID NO: 147321 - DNA, 616 bp, Cannabis sativa
aaaataagagaaataataagaaaatctattgagtatattttttttattagaataataataaaatgaaagaattaaagagcgaataaataaatatatttagagtaattttatactgtcatttacaccgtctcatatatcttttatctctttatatctattctatataaagtgtgcctatataacagaattctttgtttatgagaaattcataggtgactttttatttatattaaaaataaactaatttctaaaaaattattgtaacaaaattattgtaatatgcatgtgaatacatcataataattaagtaatacgaataaaatatgaatctgtaaatacaaaatacaaaatacaaaatagtcacagtaatacgaatctgcaaatatgtatacaaacccttttccaaactatacaaatcttcacgacagacacaaatttatcaatcatcagatcccttggttaccccgaacacaatagccagtgtggcaagaataggctgcacaaaaccagtctatggtaactaaatcttaatagcaaaatcaattcaaaaaaacatactaaaacattggatttgataagtgtcttttttctctatgattaattaatatctttggtt

SEQ ID NO: 147322 - DNA, 690 bp, Cannabis sativa
  modified_base (525)..(529): a, c, t, g, unknown or other
cccgaagtaaggcttgaacaagtcttctcccgaagaccacttctcttgttcagtcaagtcgttctaaaaaactcttaagacaaagtaagaacagatataaaacatactagaacccagatgaacaactaggttctcacaaaacaaagaaactctcctctcacaaataagaaaaatgcaaaaaatgaatactagaagagttgattcgaatggctactctctaggttctatttatagaacataaaaaccctagagacagccacaagatcgaatctatagctgtacaaaaatttcataagaaaaactcgatctacagcattagaaacggattctgacgcaacaaatcaaactagaaaaggaaacttgccataaacgagactgatcttgtattgagtcttgatacctgccataaaaagtttgtatattctaattgtatcaagacacaatcgaatttaataaggaaaaaggcaataattaaaatttcctttaaaaaccaactttcgataagagaattgcttctcttacaannnnnttccatacaagaaaagttcagctgaaaaatgcatatttcctaacatagaagaaagcaataaaaaccgaataaacaaaataagaaaatcggttatgaatgctaataaatcttaccataaaagaaaaaatattttggcatctaacttgccaaaaaaggacttt

SEQ ID NO: 147323 - DNA, 520 bp, Cannabis sativa
tgaagtaccaagatatgatcatcttaaggtctttggctgcacagcttttgctcacattaaacaagataaattggagcctagagctatcaaatgcttgtttttgggttaccctgatggtgtcaagggttataaattgtggtgcctagaagatggatacaagaagtgtatcattagccgagatgtggtgtttaaggagcatgaaatggcaatgaaaattaccaatacagagaacaatcatggaaagcaaagtgttgagcttcagacagaccaggagaatgcagaaattgcagatcaggtggatacttctgcaacacacaaagaacatagttcagatgaagagcaagaacaagaacaagtgtccgctgagctacaagattatcaacttgtccgagatagagttaggaagaccaccagaaagactaggttatgttgactgcattgcttttgcacttgcagcagctgaagaaattgaaaatagtgaacctaccacctatgctgaagctgttactggaaagaatag

SEQ ID NO: 147324 - DNA, 1756 bp, Cannabis sativa
  modified_base (631)..(634): a, c, t, g, unknown or other
taatagaatatataagaggaatggactactcctcccatagccaattggttttgagatggaacctcattcatcttatccctaaattctaacaatttgttcaaatgtttgttgaagaaaatacagtctgaaaactcagcagccaagaaaaaatttctcccaataccagatcttattttacaacgatatttggacattatcactaataattaccattattttctttagaaaaaaaccaaaaaaaagagaaagaaaaaaaacgaggtatgactactgcagtgcagtgcagatagtgagaattttgatacaaagtaaatcttacttaaaattttaacaagcaatatttttaaattttttttttatagttttacatttaaagtatttttttatatttttacggtattttataaaaataatatatatactatttttaattttttttttaatttacggtttgcgttgctcgggtaatgtatccagtggtttctagaggtttctatgtgccgtattgaagtataaaaataataataaaaaaaaaaactccaaaataatataaaattttttaaaaaaatatatctaaaaaataacaaaaaaaaaataacatttaaataaaaacaacaacaaaaaataacannnnaataacaaaaaattaataaaaaattaacaaatatttattctatataaaatgtgttatgtaacagaatatcctattaattatcagattctttattaatgttataatattattatatatataagaattttatttattccttccttaattctctcatttttctattttttaaattaaaattaataattaattaaacaccaaaccgtataataaatctatgaaattttttgttatttgaagtttaaaaaatatctctaactagttaattaatttaaactacaacgtgagaaaaactaatttgaaattacttaatttgtataatattatttaataaaaaaaattaattaattaattaatttaaccaagactatatatattatattatataaaccaaacataacaactttaaaattataaataggttttcaattagtggtagtctatatataatatattaattggttaataaaaaaatataattaattgtgaaatatttgacactatatgttatcacctttagttcaaaagcacaatccaaacattgtatgtaatcaaatttataaccatatttatgattataggtttatagcgcagctcttcaaatatttttaaactatattattttttaaaatacgacaaactaaaaactaactaaagagtcattatcaatctaaattaataattttaatataaaacgtcaaaattatataaattcccttaatttagcagcttctcattgattcaaactaattatttacatatattttattttataaaattaatctaccttaattttataacaaaaattcaaatgtcgaatattttggtacatttattttctaaattattaaatacaataaaaaataataatcttatcctaacaatttatataagcttaaataatatgctataaaaacaaaacaaaaataataattattttttgttgagatgtacttttatttcataattgagaatgtatatttaaatataaatgatactcgatcatctttcaattccttggaagacctttttaaatctctctttattttattgagatgagatcatacacatttttcataatatattatatattacatctaaataataaataattttttttttgct

SEQ ID NO: 147325 - DNA, 1118 bp, Cannabis sativa
  modified_base (1041)..(1055): a, c, t, g, unknown or other
tgaagaaaataggtgacacagaagactttcagtttcatgaaagaagtgggggattaaaaataaaccacttgagctttgcggatgatgtcttgttattttgtaggggtgattttaagagtgactatttgatgctaaagggcctcaaactgttctctatgacctcgggattacaacctaacaagaagaaaactacaatctattgtagtggaatgcatgagaatgagataagaaggctggtagattcttcgggtttttagagaagtaatctacctttcaagtatctttgagtgcctatatgtgccaagaaaatttcatcagctgaatgttcaattctagttgagaaaatgacttcaagaatcaaagtgtggagctcaaagaacctgtcttttattggtagaactgtgttaatcaactcagtccttctatccatccatatgtactggagaagtaatatgaatggttcaggcaatattgcttgggagcatctgtgcaagtccaaaaaagctggtgggattggcttccaagacatcaccaaatggaatcaagctgcagttgcaaaacatgtgtgggcgattgctactaagaaggataacctatgggtaaagtgggtgcatagtgtatatattggagatgaagattggtgggggtatgaggctcccaatcatagcagctggtattggaagagagtagtgtgcataaaggagttagtgaaacaagttatccctcctactcaatttacaacatcagagtttcaaatatttgctgtttataaaataatgatgtagtaacagaggaactttcaccttagcaagcagatttggagtagactaaatgtaccaaaacataactatgtgttatggattgctgtacaaaacaagctgaggactcgggatagattgcagaaattcaacattgcagcagatacaaactgcctggtgtgtgatattgcagaagagagtatgtgtcatctatttttcgaatgtagatttgcacaacactgcctgcaagaattgaaaaattggctgttgggttttatgcccnnnnnnnnnnnnnnntcaatataatcagatttacttaagatcagaaataacattttatgttccatggttcacatgatt

SEQ ID NO: 147326 - DNA, 662 bp, Cannabis sativa
  modified_base (428)..(429): a, c, t, g, unknown or other
acccaaacccgaacccagatcaaaacccagactaggacttgaacctaatcctagaccgggacccaaacccacataataaccaggacatggacctagaatcaggatagggacttgggaaacagaactaggactgggacctagtaccggacccagatccgaacttgaacctataacccagctcgtgacctggcacaagaaatggaaccagattgggactcgagattgggatcctgatttggacccagggcttggacgaaacccgtagtcggtgtctggatttaggacccaggtatggacccgatacctgacaaggacccgaacccacacccagacctgaaaccagtcccaaacccaaaagtgcacccgaacccataccctgtgacccaaaattggaaccaaaacttgaagttgaccgggactggaactannacttggacttggaatcataactaaaattagacctagatccagaaccataaccggaccaggacccggactccaaatcaaacctagccccgaattgggagccggacccgaatccgaacccaaacgtagactcgggacccaaagcctggaactgaccagtagtcggtgtgtagatctaggactcaaactagtaccagaacctagacgaagaacgaaacccgaacccagacctagac

SEQ ID NO: 147327 - DNA, 775 bp, Cannabis sativa
agatatctaattaataaaaaaaattaccttttaaaaattgaatattgggtcaacttttgagaaatccaaagagcccaagcatttagaaaaaatggtctgcagtaatgttttaattctttttccttttggaggtacatagaaaactttggtatagagagaagaaaaataattttagaaagataggttagtggtgatattattagtgtttgttgagatttatagataatagttagtaaaaaacgttacaacaaataaaacttttcaaatgactacaaaactattttaatataataataactatattatatatattgaatgtgtctaataaatgggaaaatgttttcatcataaactccataataatgcagattacaataatatcctcatatatataggcaaataaaaagctaaataaataaggaaaatagaataaaaaattaattaataaataataaagtataattacatatattaaataataaataataattaatatattaaaattcataatagttactatatgtttttaaactgatgcgttttgaagtttctataataaagtgtaattatattaatagttattgattattgatatatattatattaaattgttttcatattatgtaaaatatatgtaatataaatttattgtattaagattggaacgttgggttccataaaaaatataatctataaattattatttttattaattagaatgtactaaaaatatcatttattaggataacgtttatgataacgtgagaaggtgaat

SEQ ID NO: 147328 - DNA, 790 bp, Cannabis sativa
  modified_base (473)..(476): a, c, t, g, unknown or other
aaatttataaaatatcttcaacagctattacatacatgactataaaaagaaattatactaaaaaaaaattctatatgctgaaatagataaagatgcaccaatgcacccattttagaggagtgcattgtataagcactctttaatgtaatgtgtaaatttaaatgtgaataccatacattattattattttcatttaggatttaagtaaaaaaattataacatttttgtatatattttgttttaaaaaaatattacaaataaaaatataattataaatttaaacacacattaaaattcaaattttgatattttgattcgagtggaaataatttttgacactaaatttagcattagtgtgacactaaatttaaagtataagttagagatgctcttacgttgaagaaaaacagcgtactacttagccgattctcatgataaataattttttctgggtaaatagcggcataagtacnnnnagttttaagtttgtaagcggcatataaacccaatgtttatttttaacggcataagtacccaatctttgtaaaactgtaatttttctctagttttgtcagtacagattctgttttgaatttattaagagaaaatttggaagcaactgataatacatttttctgtctagacctaatgcatctagaatttggactttatatgtagtctgtttaagaaaatatcagtgtttgtgctgataaaatttgagaaaaattacagttttacaaacattgggtacatatgccgctataaatagagtaatttgcggcaacccccc

SEQ ID NO: 147329 - DNA, 542 bp, Cannabis sativa
ttgtgtggaatggaaaggagtttcctgttactattctctctgagttttatcaggttcttcataaaatttccttgtccaattggtgggccaattcacacacatctaccatcaactataacactgcacggtttctatatgcccttggtattggtgtctctattgatctaccatcactgatctacacccgaattttggattctgctaaggctaaaggtgttaaacacactcttccatatcctagtctgattcagagactggtcttacgaggtaatctagcaatcctccttgagcaggatgccacaacagtgcctgtgccctccattggcaagacctttcaaccagtgtttggcaagcccattcctccatcggttatagcctttaccacatctgaccctgctgctcctgctgtatcagaaattcctcaagtgagcacatcacccgtatctcgcttgccctctgctcattggcaagtcaagttactgtcagaagttcagaatttggctcatgcttacaacttagatcaacagcgtcagaaaaggttt

SEQ ID NO: 147330 - DNA, 514 bp, Cannabis sativa
  modified_base (174)..(182): a, c, t, g, unknown or other
  modified_base (308)..(311): a, c, t, g, unknown or other
gttctgtgtccctagtctggttccatgtttgggtttgagttcaagttcagttcgggtcccgagtccacatttgggttgggattcaggtccggttcccaattcgggtctaggtctaacttggagtccgggtcgtggtccggttatggttcaggatctaggtccaatttcagttannnnnnnnngtccaagtcctagttccagtccttgtcaacttccgcttttggttcaaattttgggtcacagggtacgggtttgggtccaattttaggtttgggactgggttcaggtccaggtgtgggttcgggtcnnnntcagggttcgggtccagggcttggtcccaaatcctgacaccaactacggtttttttccaaccgctgggtccagattcggatcccaagctcgggtcccagtctggttccttttcttgtgtcgggtcacgagatgggtcctaggttcaagttcaggttttggttgggtactaagtcccgggcctagttctgtttcccaggtccct

SEQ ID NO: 147331 - DNA, 607 bp, Cannabis sativa
ttttttttttttttcaggtgttctcgtatgactggggttgttctgtgcatgggtgtggaagatggatgcattgttcttgatattcggtgtctacagtataaaagaaaaaaaatgtccaaggcaacataaaagtaatttttgccgtgtggtagtaaaattataaatatttgcctaaaatccaatattattgtaagtataatttgtatttagtaatcgtggtcatttacaaaatatacataattttgcatatgcacaatacaagaaagttttttagacaaagtaattaaatttgtttatctgtatatatataattttacgaaaaaatgtttattgcatgtatttattcatagcacaatattatttttatgctatttttatatagcagcaacatgaagataataaaaaaaaattatccatatatttttatataaataaagaatagtcaaaattcaaaaaaaatataaattgatatttttataagctcactatttaaaaaaagtgtatttacgaaggtcttaaaaataattttttagagaaccatcgctaaaaaaattaagcgagtgtttaaaattatcgagaaaaatagggtactctctctctctctctc

SEQ ID NO: 147332 - DNA, 683 bp, Cannabis sativa
  modified_base (599)..(647): a, c, t, g, unknown or other
ttggacccctaaggctttgacgtaacccacccgttgtcagtgtttgaatctaggactcggacttggatccgtacctatacctggacccagacgcaaaccgggatccagaccgagactcagacctagaccgggatccaaacccgatctcggacccagaattggaatcagacaaggtctggactagaacccagacatgagacagtaacaagacccaaaccaaaacccatactcagacaagaacccataccaggacttggacccagaccgggacttgtgacttcggacctcaaccaagactgggacctagacccagaccgagacccgaacctagagctagaactagggctggaacctgaactcagactcgaaccctaaccaggacctagactcaaaccaaacccgaacccaaactgaaacacaaacttggactcggaccgggacctaggttctgaacattgaggggggacccagacctggaaattgggcccctaaactaggaccagaacttgggctttagaactgggatcgcgatccgtgactcggccccagacccaatcctggacctaggacccacctcggtgttgggttttatgccctannnnnnnnnnnnnnnnnnnnnnnnnnnnnnnnnnnnnnnnnnnnnnnnnaaataacatttaatattgcatggtttacatgattta

SEQ ID NO: 147333 - DNA, 614 bp, Cannabis sativa
aattaaatgtttgatcttggtttatatgagcatggtttgttgttgattagtattgataatacatgctcattatgtagtatttattaacaattggtatctagagccatctcatttgattttagtgcttagcataaacctatttattttatatcaaatttgattttataaaaaaaaaatagaaattttatattattggagagaaaattagattggatgatagagtattaagtttatggatagtattttctgttacttatatgttgaaaataccaaaaactccaagctttttcaagcttgttaatgattaaatatggagatacaatttatgggtgtggagtgttttcgggtgaaatgagtacaaagagagagcataataaatggagaaaaatccctcaaacgacatcaaaataatgtagcagaggctgaaatgggtcgaattggatccaaatgactcagcaggagattgaagacgacacaaaataatgtgtcattttttatggggcttttttcataaatgtacaacaaaaacaacataattacaaaaaatgtgcaaaaaaaatttattttaaaaacttatacattttgaaaacttattatatgaaatcatacatttt

SEQ ID NO: 147334 - DNA, 838 bp, Cannabis sativa
  modified_base (693)..(695): a, c, t, g, unknown or other
agtttgttttgtaggtatcaataaagaggaaccaaagttggctcttgggtgttgatgcttaaagaagaatgccaagttcctacattaccaacaattctcaaaaatcataaaaaaaaagagtgtgtcaattcttgaacacaacccaaatgaaaaaatttgagaatcggtaatatcatccttattcattctacttattttgatgagactaagatgcctagatgaaaagaaaataaaatttgaagtgtttggctaattgacttgcttttgatccttcttgttcattttcttatgcatacatgcttaattggtatgtcacatactatttccataaataaaagttttgattagttgagttttgacattcttgaactatgcatgctaaaaaattttgattataggtcattatgtaaatttttggtgaactttggacatacctttgaactagtgaatatgtgaatttttacatatttggctagtatatgtgtttatatgtttgaacatgtctaaatgagtgtatttagcatgtttaaagatttttcttgattgaaatatgttttgaacaaaattttagtatgttatttgcttattttcaactttttaaggctataatgggtgaaatttgccgaaattttatattattgagaaaattattgttttgaaagcttgtacatctctaaatactcatatataaannnctcaaaaagaatttttcaaaaataatactcaaatatttattttggtactatcttgcataattttgactttttaagacctaaaagagtgtttttcaccaaacttggtcaattttcattatttttcaattccgtaagtttgtaca

SEQ ID NO: 147335 - DNA, 854 bp, Cannabis sativa
aattgcattgattcatatattccttaatatcttgacacgtgtcctctagccgaattttgggtgtaacaggttcgacgaaaaaatttgggtcttgaagggcttcttgaagaaaactcctggtgcaaggggcctggaccatggaatttttgggattaaaaaatgaaatcaatcgaaattcgaagaaaatatgtgagggacagtgagggcatgaaatcttagaaaaaagatgggtgagattcttttgagtttcgagagcttcgtgggtgaaaatggcaaaattaaagggattttggattttatacccaaaagataaaaattgttcgatcacaatgatgatagatcgaacggatgggaactattggaaagagaaaggtcagagtaataaatgctaaaataatattaccttgaagttataaattgctaaaaataaagcatgcagttttaaaatgagaaaaatatgatcgtaacctcaaggcatttaaaaagtcctttttatttaaaaaaaaaaaatactttttagggagctatttttttactcatattttgagtagcaatatggtgttgacacgtgtaatatagttagaatatgaaccagcctgcattatgcaacaataaatgcattcagacaactcgcctagaaaagtacagttggtaaaaatattcaaactcaccctcctataaacaatggcgagacatgaatgataacatccaattgatgagaccagcaagacaaacaaagaaagtccatcttggactacacagaacacataaacaaattatttggcaagagtagataatgagttatccaaagagcttgtaactcattgacacacatacacgtgagtatattgaaa

SEQ ID NO: 147336 - DNA, 840 bp, Cannabis sativa
  modified_base (84)..(84): a, c, t, g, unknown or other
agatcgtggtaaaataatttccaacacagacccggaacaaaacccagacctagaatcataattggaactatgactaggacccanacttgagaccagaatcgaacccaaacaataacccaaactcagaccagaacctagaccgagaccttgactaggactgggacctgagacttgggacctgaacctcgaccgagacccggaccgggacctagaccagaccaggtcctaaaccctcgccaggacctgagacccgcgacccagaccaggatgaagaccccaacaaggacccaaacctgaacccgaaccaagactgggatcgagacctggacctgaactcagaccgagacctagaataaaaccaagactcgggacacgaaccttgacctagaccaggacctaggaaccggacttggatgggggacctagactagggacctatgccccggaacccagaccttgatctaaatcctggactcaaacctgaacaaagacctgacctagacccatgaatctgaagttggacacaaacccagacccgaaacctgcccccgaccataactaggacaggaacctggacacgaacccatatcaggacaaaacccgaaccaggaaccgaacccaaaattaatcctgaacctgtgacccaggcccaaaatcaaacccaaacctagacttgcacccggacccgaactcgaacccagactgggactggatcccaagacgtagactaagaactaaacccagactcaaatcgagatcgaaacatgggactcagactcgaacctagaactagacccagggccctaaccacactccgagcccgattccgacctagatcga

SEQ ID NO: 147337 - DNA, 708 bp, Cannabis sativa
aagaaatatatacgacaaccatttaaatacaaaatcaaaatacacagcagatacaaccagcctaaaataactactggcaactcggcatgcagggtgatgaggtcaatatgtacattgttggagaagactgtcacctcatggttgatctagtttttctttgcctttacctgcaacacatagcacccgtaagtcacaatactcaacaagaaaagtaataataataatcatatattttattattcgaatattgtcatttatacacaataaaaatcaaaccatcacacattattcataagatgaaatctaaatcactgctggcatctaccacgaataaacatcagtatacagatatttgataatataaaactattataccaataataaaatttatattcattatatcatataaattatttatatgttacctcataaagtaacaatctcataacatcatgttgcctaatcaggcaagtcgatgcttaaataggataatcatgtatcgaagtgcctaatcaggcaagtctgtgccatagcctggcacccatatattgtataactgcatcacctaatcaaatgagcctgtgacaaaaacctgcactcgtatatcatataattgcatcacctaatcaagtgacctcgtaccacaaattggcaccaatatatcgcatcgcctaatcagacgagcccgtacctacactcggtacttat

SEQ ID NO: 147338 - DNA, 645 bp, Cannabis sativa
ttctaaattcataactaatcagattgtaatgggttttatttagggcacaaaacccaacactcacatcagccgacccaaaattaacaaacgacgatttcaatgccggtgcacgctttctcttatccaaaagtgggatataaaaaacaatgtcctcagcttcttcatcagaaggaatggcagctgtcttttcaacaacaacacttggattggattctaggacctgaattggaaaattagaatgagaaaaagttgcaaaacaaacataaaactgtcaagcaactaaaacaaaacaaactttactagaaaacaaattaagatacacttatattgattttacgaacagtctctaaaccatccaacataacttggtcatcatcaatttcaagctggcttaaaccatcaaaaaaatcatccccttttaaactagactctttggccttaacattctcaacatccttagccctgtcttcactgcctgcaacagtctcaaattgattcacatcagcagcaggaacatcactaacaaccttatcaactccagcagcatcaccaccatctttacttaactcatcaccatcatcggagtcggaatcaatattctcaagatcaagtaattccttgtcatcatcctcagcatcatcatca

SEQ ID NO: 147339 - DNA, 506 bp, Cannabis sativa
caacttcagggcaagacggtattctctaagattgacttgaggtctggatatcatcacttgagaatccgagaagaggatattccaaaaacagccttccgaactaggtatggtcattatgagttcctggttatgtcattcgggttaacaaatgcactggcagcctttacggatctcatgaatagggcattcaaggatttcctcgataattttgtaattgtacttatcgacgatatccttgtgtactgtcggtcagaagtagaacacgagcagcatcttcgaatggttctttagcgactgagagatcataaactctatgaaaatttcaaaaagtgtgagttttggctatcacaagtgtcctttctggggcatattgttggaaaagacgggattatggttgatctagggaagattgaggaagtgaggaattggcctagacccaaaacagtcactgaaatttcgaagttttctcggtttagcgggttattatcgacgttttgtggaaggtt

SEQ ID NO: 147340 - DNA, 1306 bp, Cannabis sativa
  modified_base (202)..(204): a, c, t, g, unknown or other
ctttgatagaattaacaaaatacatgaggggatggataagataatagactgttggaattgtttattgaagtcacatgagaagtacatagacctgatgcatggtctcaacatgccacatgtccaacgtagtctaagagcaaactaggaacatttagggtatgtcagggtagatgaggccgaaagatatgacctactcatgatnnncctagtggatcagtacaaaattactgacaccatatatcaccctgatggttctaaagaagaaatatatcatcgacccaataatgttgttaggtttgaattccttcaaaagttaccaatctcatcaaacttggtgtacttaaaactcgactacgtagatttgagagaagatatgttagaggaagggtcagacatagaagagtagaaaagtcaagttgcattttattttatgtgtttatttgtttatgtaataaggagttttagtatggctccattttagttaggagttttagtgtaactcctttagcttgttatcttttggaatttataaataaataaagaggttttattttgtctgttaaatatttatataaatacatatatctacttatgataagtcttattgaaaagttaaggaaaaattgttgcggatataagagatatgtcttttagaattaaggcgtcaaacaaaatagtacttgcacaaataaaaagcattctgtcacttaagattgaaaatatccgtcacgaagaggatacgattcttagagccctacgagaggttatcgcgattaatgaagaaatcaaaagagtagcagaggtgaggggagcattcatcaaatcacgagaaaagtttatagtgctaagggctgctttgtcacatgtccccgaacttctctactatatcgatgacgtctcgcaccgggtcttggaccttggtgattcaattcgatacgcagcattcatatgtgaactaacgcttgacttccacaactttatttttgaaaagacttatattgtggaaacaaacggcatggaagaagaacgcgtcaagaacatacgatataagctaagtgatgacagtatggaggacataactgaatttgtgaacgtaacaaatgaacaagatttggaagaatcagaaatgctagactattttgaagtgacagcagatatgttggaacttgaagtaaaaagcccacctcaaatagaagcagagaaaatagtagaagtaatagagatcttttcagacgaagaatccaaagatgagaaaatgccagaagggtccaatgagcgagattactcacaatgtgccctaggaagg

SEQ ID NO: 147341 - DNA, 508 bp, Cannabis sativa
agacactctttcacacaaaacttggattattcccaagggatgctgaaagaaaattaccactgagaaaataacgagccttatataacctactcaccaaaatatttggttttgtcagtaaacgccatgcacccttgctttcccaatattgccaaattaaagtcacgaagattacgaaagtccattccacccatagttttatgtctactcattctttcccaactcatctagtgaatactatcgccatgagaagaatttgaatgtcaccaaaacttactcataattccttcctaatctttagacacatcaattgggagcaagaaaacactcatgacatacctagacataacaacttttagtaatccacataatattaattgcttaaatattataaaaattataaaaaaaaacatttaaaaattgttagagatattattacaatggaagaaaatcaagatttattacaactctattgtaaaataatacaaggactaaaataagagattgatta

SEQ ID NO: 147342 - DNA, 898 bp, Cannabis sativa
  modified_base (101)..(101): a, c, t, g, unknown or other
  modified_base (389)..(391): a, c, t, g, unknown or other
agggggttaagtgtataaaaatcaaaacataagggggtttcgccgcaaattgctctattaaatttgtcagcaagttaatcatatcaatttagatcaaatanataataggtttgttaaaaaagttttgtataaataatttaaataaaacaaagggtaaataacattttagaccctgtgttttgtaaaagttacctattagaccctttactttgttaaatgacaaaataggccctgtattttataaaattgtacaaataggaccctggattgattttttgtcaaaataaaacttaataataatctgatctagagatgttatgacaaaactagttacattttctgtatctattagtgttaaaaaaaatttaaagttggttatattaaaaaannnaattgttaaaaattgagctcaggggcctatttttacaatttttgaaaatatagggtctaatttgtcatttaataaaacagatggtctaattaataacttttgcaaaacacatggtcccaaatggtatttacgctaaaacaaacaatacccatgtaacaaatgtgaaataagatatttattacttatataattaaattattatttaaataaccaactaatttcaaaaatttaaggttgttaaaacaacctaaaatatctcttcaaactttaaaaattcaaactaattttaaaatatctagatttatttaaattattttatcaaattaaattaaatatctagtaagataaatgatttaaaaataaccaaaaataaattttcaatatcattttcaaatagatatggtttgaaaattactattttaggaataaaataataaacaaataataattatcctaattatatgttaatatatctcaaattaagtatttttcaaatttctacaaaaa

SEQ ID NO: 147343 - DNA, 716 bp, Cannabis sativa
gacctattatatttttcgtttttagaaaaaataagtttcagtaaagtgatgatatctctcttgatattgatctgtttttagagatttttgtaaagttgggaagcttattcgatgatctaaattttttatgaagaaactatttaccaatttagtgttattctatgtcgaaaattatcatctttctgctgttgttgtgattcgttttctttatatttctagaaaaagtattttcacttaaaatataataactctctcaattctcttccatttttaatgacctatatatagttttaaagcttatttgattttccaaaagtttcatgaagaaacgttttactaattcgaagtcatactatgtcaaaaagttagtttgttctgtatcatgcaattcatttcttaaatcttgttcttacaaaactgttttagtaaaattgtaatatctctttgaatataattccaattttaaagattttggtgtcattgaaaacataatttatttatctaaaactttcatgaagatattatcctctagttctgaacttttcaatgccaaaagtttatattttcgctgagtcgtgtaattcattactccatattccttgtcagaaatagtttcggtaagactatgataactctctcagttttaatccatttttagtgatctttatatcattggaaagataatttaattgcctataaattttatgaagacaact

SEQ ID NO: 147344 - DNA, 605 bp, Cannabis sativa
accattcttccccaattgaagaaggcaagcaactatccttggatcagcaggtaaaacttattcgtcctttctcaatacaggatattaagaatgtgcttttctcaattcctgatataaaaagtcctggtccggatggttttggatcgagattttttaaaagtatgtggaaggatcttggacaggatttctctacagccattttgagtttctttcaggagggggccttgccaaaacaatcgaatgaaactcttctgatgctaattactaaagtagagaatccttccaaagctatagactaccgtccgatttcctgttgtaatacaatatataaatgtatctggaagttgatttgtaacagaatttcagaggttcttccttggctagttagtgacaaccagggagcatttatcaaagatcgctccctagtgcacaatgtcttgatcctccaggatttaatcaaagggtaccacagatctctctcctcgctgtctaatgaaaacttgaccaaggcatatgatacaattgactggaaatttttggaaagccttttaaaagcctacaggttcccaagattatttgtggagtggataatggtttgtgttcgg

SEQ ID NO: 147345 - DNA, 529 bp, Cannabis sativa
  modified_base (488)..(490): a, c, t, g, unknown or other
ccaaacccaaacccagactccgaacaccaaacccagacctagacccgaatcccggcctgatctggaccaagacccagaccctaaaatcggaccccgccctaagtccaagtctacggcgagtttgggtggtccgggtctaggcaactatgggtctgggtctgggtctgggtctgaatctgggtttgcgtcaggatctgggtttgggtttaggtccggggttggatgagttcatgtcatgatatggtgtagaatattgatttttttatttagttttaaaaaacctgagctaaacaccattaaatttttaaaatgataaaaaaattattttctgttctcacttttaaaaattagtagttgttcaagctattaatggggaggttcacatgccgtcccaatttggaatgttaatacaagattgtcgttcgatgatatctcttctaaacaatgtgttaatttcttttgttaaacgtgttgggttttatgccctnnntaaaactcatttcaatgtaatcagatttacttattaata

SEQ ID NO: 147346 - DNA, 604 bp, Cannabis sativa
  modified_base (297)..(302): a, c, t, g, unknown or other
gagacaagtctcctcaggtgggcttaccaactcaatattcttgactatccagtatcaaaaatgaattttcttttatcctatgtctcaaaaatagacgcattagttacattttcaggaaaaagaaaatggtcattgtctaagtcgtagaggaatatggtaaatgattaaagaaaaataattttttaatttcctcaattactttgtctatcacatcagtatgatagtatttcttttcatccagaattaggggaagaatggtagaatgagaaagggtttctttctgaatagtggtggtannnnnntcctttatgaataatgtgggtaccacatcacatcagtatgataaccctcatttgtacttgctagagtagattcttcaaaattttcacaactataagtagagttgacacttaccttctccaaattgtgaaaggtggcagttgagattagtgcttcactcactggtggtggagaaaaaccattaacatgcgaacttacctggtgatcagaaaatttgctcaattcttgcttaatttgtttcaactcagcaagtaagtctttcatcatctcgcaatttatcgccatagatgcttgtaactcaaca

SEQ ID NO: 147347 - DNA, 869 bp, Cannabis sativa
attaaattgggattataacatttatttctttactaataaagtggctacttgtctagcattattaaaaggtggtgtcctctgtgattgttggttaattatattttctaaaaaattattacattaaattagatgtaattagatatttaattgcattaataatattatacttaaaaaaatattttttagcatgtttttttattttaatgttatttatttatatgatattgaaagtggggtaattatatggtaggtcctcctatttttaccctatattatagggaagaaaatttaaccaattaaaattaaaagaaaaaagaatgtatatagtatttgcttacataggtgtaggagattattgcaacattttctattattttcttattattattttacattatgatataatacgtttatgtatatgaaatgtaattactggggttcacatgaccatttttcaagtaaaatttagcttaactgatattctgatattaataactaatatactatatttattttaatatatttttattattatatcaaaaataaaaaaataataataagatttttaatcaaaacaataaataaataatattgggtatgtttaaagcgcttcaaagactatataggtagactcttacctgttgtagcatttaagagaattttttagtctaattttttttaagattgtgtacatcataattgtttagaaccacctgtaaaattttaaaattttttgaatagtttataatgccgaaaataagatttagatattttgttaaacacacgactgtttttcttatgcgtgtgacaagtaattgtttaaactttatttgcggcattgtaaactattcaaatttttttaaaaattt

SEQ ID NO: 147348 - DNA, 761 bp, Cannabis sativa
agtttgactgctgtgttgtagcattctcgcgaatctgcttggactccccgcacagaacctactccagcgggagtaggaaacttcattgtcagatgatagatataggttatgatcttcatcttcttcaggatcggtcgaccaatcatggcattatatgcacaatactggtcgattactgcgaagtcagccattgacttggctgttaccggggcggttcccaaggtgattgggagtttgatcattccttttaatgctatgacgtcgccagtaaaaccatagatgctcgacgtcacaggccgcaggtccttctcgtgcaatcccatttgtttgaaggcttggaagttcaacagattcactgagcttccattgtcgacgagtatgcggtggacattatccccgccaatattggcgatgataactagcgcatcggaatgcgggtgatggacccacctcgcatcactctccataaaagtgatgtcgtcgcattccttcttaaatagcttctcgggccactcactaagattgttcacattggtgaactacttttctttggcttctctggcatatcgctcttgtgacttgcgagagtctcctgcgatatggggtcctccaatgttgttaagatgttgcgacgtgttctggaaccgcttgcattttggttttcatctttgtcatccactcggggatgactcgcctcgcccttcttatacttgtcgaactttcctctctgaatcagatcctcgatttcatcctgcaagacc

SEQ ID NO: 147349 - DNA, 584 bp, Cannabis sativa
  modified_base (236)..(240): a, c, t, g, unknown or other
ttgtactatcatgttcccaaaatatacgttcgacccagatcaaatgtgtaaagactgcttagctttaatttggaaattagtagataattagggtttaattatggaaattattattaattctaaattattaatttatggtgatttatttgaatttagaatgcactttgtatgtcatatatagaaatttcataattttccatattcagtgcccgacaacattggaacgcggtgtttgnnnnntagaatcacatcctagtattttagtatagcggggcaatagtttagaatttcccaaaatacccttaagtacccttttatgttgttttattgtaggaggggcaaaaaggtcatttttccacatgtgtattttgtcctttagttgacttagttatatttaataaactgatttttatgagttatatgttgatattaatgtgttaataaatcatcttttatccatttcatttaaaaaaaaaaagaaaatgaagagaaaagattttctctcttaaactcactctctctttttcgcccccctagagcagctagggtttggctgtgtttttctgcatttcaagcaagtttct

SEQ ID NO: 147350 - DNA, 1442 bp, Cannabis sativa
caaaagctggaggaatgattccatgaaacttattcttcctcaaatctagcacttcgagagagcttgaatttcctagacatggaggaatgttcccactcaatttgttaatggacaaatcaaggactacaagcaaagtgagattgcaaatggatggtgatatttccccaacaaatgaattgtttgagattgaaataaaagctgtagaaggtggtaggactggaagatgaccttgaagtcggttgaaggcgagattaatgaatatagagtcttccatggaatctgatctatttgtgtcaaagagttgtgagaaatatctaggaaaaacagtgaatccttacccacattccataaccattggggaacactgccttcaatttgattgttggagagatccaattctcgtatattttgcaagcttcttaggaagtaggggaactcacttataccacatgaagacaaatacaagtacgaaagagtattggaaaaagtatcattattattggatacatatgaaaaactattattagaaagatcaagagatttgagctttttcaattttgaaaattggtctaattgcatgacagcgctcatattatttgagagatgcaaatgagaaagattgacttgctgaaaaattgatgttggaaagaagccttctaagttattgtaacctaaattaagatctaccaaggaattatgttggaattcctgaatgctaccactgaatttattgtaatatagatttaaatcttgtaaagatggaagggaatatatccaagaaggtactgtcccattaagctgattaaaagataaatccagggatgttaaatgcaatggaggaggacccactaactgatgttttgaagagacacacgagaatgaatttccggttgaatagttactacataattctggaatttgacctatgaagttattcgatgaaagatgtaaatgggttagctgatgtttatttaaaatggatgaccatggaatgaaaccacctaaactattaccagaaaggtctaaggaggtgatttgtgtgcaattgtcaagaaatgtgggtgatagtacttgtaccaaattggaatcggcaagagatataacttgtaaatacttgaactttctacaaaggtaaggatctatcatgactccagattcagaaagattcaacactttaattgagctgctccaattatgctgtggaaaagaaccgttgagattggtattgtaactcaaatcgagttgttgaaggtttggcaaactgagaacattttctggaagtttcccctgcaaataagaccaactaagatcaagagatgtcaatgaagttgatagattcataaaggaatcaggtgaagtagaagacatattgacttcgctaagaaacaactctctgagatttgttagatttgcaacagttcttttccagctagatgtctcta

SEQ ID NO: 147351 - DNA, 1118 bp, Cannabis sativa
cccaaactttattttgtgacatagaactcaattcttctttcattgcatccacccacaatgcagatttaggactattcactgcttcttggtaactgactggctcaaaaacatctcccacatcaaactcatgttcctgcatatagacaagatagtcatcaggaataacaggcctacaagctctttctgatcttctcaccacaacctcatcgttccccaaatcaagattttcatcttgtactggatcttaaggttcaccatgagcttctattggaacttgttcaatcataggatcataagtaggattagcggcggaagcagaagcgaaagcaacaagtacagggacatagacacgttcttccctgaatacaatttctcttcacccttgacttgaaccaaattcatcctcaaaatagacagctcggtctgattccatcaccctagtggtgtgagagggacaatagaacctagaacctcttgaaccaatagtgtagcttacaaaactctcactgatagtcttcgaatctagcttattagatttagggttataaggccttacctcagtcttgcatccccaaacgtgaaagtaatgcaaactcgatttcttgcctgaccacaactcgtatggcgtctttggaaccgacttgctaggcacttgattcaagatgtaagcagcatccttaatacctcaccccataaaaactatggtaaactagaatgaattaacatacaacttaccatatcaagaagtgtgtgatttcttctttcagcaatttcattctgctagggtgtacttggcattatatatatatcttgcatcaatgccacgtttccgcacgtatctggcaaacggcccggggttccttctagtttcatcataacgcccataatactctccacctctatcagaattgataactttaatcttctttcccttttgaagctcaacatccgtgaaaatcttaaaggcatctaaagattcatatttttcactaattagctcaatatggccatatctggaaaagtcatcaatgaaggtaataaagtatttatagccgcccatagcaggtggaacaaaggacccacaaatgtcagtgtgaataagctccaatacatctgtg

SEQ ID NO: 147352 - DNA, 793 bp, Cannabis sativa
agtgatgtcatcacagtggaaagtaattgtgattatatacatcgagttatttagtccaatgatttattagtgcattagatgtacactgacgtgataattaatgaggtagtttacttacacttgtataagtagaatatccttttcaagtcattaacaaagtaaactagtatcagatgtatcgactatacatcacacttgactgatattgatagtggaaaagatatcataaacttactattatgtattttctaagtcaatgtcacttagttgatcttaggtcaattgatctcaatcctgagatggtaaatgttaacgcagatttttgttaactatattaaagcctaaccgtgataaatttgcacagaaaataatagcagtaaagaaaaataaagaacacaaagtttttatgtggttttgcagttaaaattctgcatagtccaagagtcaatcttattagatttctgatacagttctagggctttttctctaatgaatttttcgtccctttttcagtataacttgctcttgtttacaattacataggagggcagttaattacaaatcgaactgaaatcttacaacaataatcccctgaaattgtgggatttgattacgtcccacgtaaaataaatgtggttattatccgataatcacccagctgtgattggtccacttttacctggtcaatgcaaatgtgtattaaatacgttataaaacgtatcgttctgggacatctcacagggaacatagcaataaacttcttgcaaagaaacaaggtatttctatttataaa

SEQ ID NO: 147353 - DNA, 528 bp, Cannabis sativa
attatggtccttctaccccttcatctagtgatagctcgccttctagttattttggtaaatcccttacgtggaaaattatattcctcccctttttagccggccattttaataattgtaacgccttttcttgttttgaaaatatgggttatgaagatatcatggacaaaaaagggaacaaaagggcaaccaaccctggggtctctacagctgccgaagtggttccccccaagagacaacggaaaaccactgcccataagaagaaatcactggcagagcccatcgattttgaggtttctcacaatgagatccaagagcaaattcctcttccagttgtttccgacggcaatgctcctcgtcccgaggcaacccccgctactgcttcttcgagtcaggccattgagaccttttcggtcgcagcaggggaggtcgtgtctaaatttgcctaagcatatggagtcgcctgttggcacaaacttcaaactcttcttccccctgattgggattttctcaatcttaagagtccaaaag

SEQ ID NO: 147354 - DNA, 522 bp, Cannabis sativa
  modified_base (66)..(67): a, c, t, g, unknown or other
  modified_base (166)..(166): a, c, t, g, unknown or other
tagtccaagtggattttggtcacaaaatactaaactcatattccatattaacatacagtttgaatnnattgacagaaaatggatattaaacacttgtgaaagttagactgtactgtattctggaaattagaaatataaagtttcgatttggaatctaaaattaaantcaaaggcttaaatttataccaaatatacaatgagtaatgattctttcttgaaccaccactactaatctaactctaagtttaatttgcctaaattaagcataagtaggagatttctaggatcgaggacttatatcatttcaggatagaatgtcgggaatatagtcatttgcgccattcgatttcttaagagaaagtggaatgacattataggcagatgatttataaacaattcatccaatgatattatatttaagctgattcgaaatgaataagctaagaagaataaaggataatttcgagtttaaaataagaatccaacgacgtcccgatcaacgagagtcaaagttattcttat

SEQ ID NO: 147355 - DNA, 851 bp, Cannabis sativa
agggcataaaacctaacagttgttttagattcagacaatcccactagatgtgtgtttattgggaaaaacctgaatgaaaaactaaaatagcaattaacaaatttcctgaaggcaaaccaggatccatttgcctggagccattcagatatggtaggattgaccttaaagtgatttgtcaccatttgaatatcgacccaaattacccaggtaaaagacagaaaagaagatccttggattttgaaagataatggggacttaaagaagaagtggacaagttattaaccaacaattttatacgcaaggcattctacccctcgtggatatcgatccctttcttgttccaaagccaacctgtgcttggagaacttgtattgacttttttagatttaaacaaagcatgtccaaaggattgctttccactaccaaggattgaccggttggtggatgcaactgctggacatgcacgagctaatgacattcatggatgcatattttggatataactagatcaagatgcatatccctaatcacgagcatacaagttctgtaaccaatatgggactttattgttataaagtgatgccttttggtttgaagaatgcttgggcaacatatcagcgattagtaaatggaatgttcaaaaaacaaatagggaggaacatggaagtctatgtcgatgatatattggtaaagtcggtgaagtgtgaatgtcatacaaaagtcctcgcgaaatgctttgaaatactaagtaaatacaacatgaaactcaacccaaagaagtgttcctttggagtctcctcggggaagtttctaggtttcatagttaacgcgaggggcattgaagcgaatcc

SEQ ID NO: 147356 - DNA, 1741 bp, Cannabis sativa
taaataaatgatgaaaatacttctgtctctttattgataattgaatgataaagattacattgaaatatagttttatttagggcacaaagtccaacatcaagttaacaaaatatgtttttttccctccaattactttcaatcacacctctttttcgttttcccatagcttgttgtggtaacgcattcacttgttctaatatgtcggaacaagtaaatcgtcttggaagaagtcccttttcaacatttccatcaaattcacagtcctttctcatacggtgatttgatggcaagaaacgtctatggccaacataagaggtcttaccaatcactcgaatggagctagtatcctcgttgcatgtaggagaagctttatatccctggccactccatccagacaagctgttgcgggcaggaaaatcattaactgtccaaagaagagctgcgtgcaacttgaacattcaattgcttgtagcatctcttatttcaatcccgttagtccacaattcgagtggcctcaaaaatacatctataatcttacctagtgatttaggtccaggaataaggagagccaacaagaaatttttatccttcatacacatccacggtggcagattgtaaatttccaacactacaggccacatactatacgattggctcatgttgccaaaaggattaaatccatcaacaactaaacctaatcaaacatttcgcggatatcaagatgtctgctatcaaagtttttccatgcagcggaatcgacaggatgacgcataacaccatttctttcacgcgcccagtatgatgccataccatctctttggctgtacgtcttgaactatataatcttttcaatcgaggagtcaacggaaagtaacacattaccttatgcgctactattttccccttgtgttctcatcattaacccatctactggtcccacccactgggcaaaaatatttcaatgcatgctcattgtaaaataagcaacaattattcacgcacacattaattgatttgtaccctaggcctaattttcctaatttcttctttgcctcattatgtgttgcaggaattttgttatcctttggaatagtaaatttaagtaatttcaacaattcatcaaaaatataatttggtattttctccaaatttttcaagggcattaactttgctgtaaagttaagggaggatatccaatcgcaacccgggtacacctctacctcgatctcctcaaaaattttatcataatattgacccctttgaatatcatcatcgacggctctttcttcatcgtttataggagggaggaaatcttcaattacatcaaccatctcatcgacatcaacattgttgttggcctcgactggctcatccgactccccgtggtaaatccacctctcataactgctttcaaaatcctttgtaaagatatgtgtctgcacagtgttcaaaggatgtagtatggtacttacatctaacacaaggacagaaattcttccgtcacaatctttgtgattagacgcaagtgccataaagacttggagatcttcccagtaagctggatccttacgatttctcatggtcacccaagtattatcgattgttatctaccaaaaaattataattaataaattacaatcgaatttgtttgtgtgacacaaattttatgatttatgtacaagttgaactaatggtgcttttatttcattttatgattttttttttaacttttagtttgaat

SEQ ID NO: 147357 - DNA, 797 bp, Cannabis sativa
tgcgaggacgcattcaaaaaactaaaagaacacatggctaaacctccaatcctttcaaaacccgtcctcggagaagacttgttactatacttggccgtctccaaaaatgcggttagtgcgaccttagtctgggaagaggaaaagacttagaaccccatgtactatgtcagcaaacgcatgataggggcggagacacgatatccagtgatcgaaaactagtctttttcccttgtgatagcctcaagaaagttaaaaacctattttcaggctcaccccattaaggtattagctaaccatccgctccggcaagtcctacagaagccggaggcatttggaagacttctcaaatggcccatggaattaagccagtttgacctgcactacataccgcgcacttccataaaaggacaagcactagcggacttcataacggagtgccatgaagcagaagctagtgaaaacatgcccaaaccacaaaccccagcatggaaagtttttgtggacggtgcctccaacgaaaacggatccggagctggggtagcaatgatatccctgaacggacttcagctctaggcggcccacttttcaaattcacagcttctaacaatgaggccgattacgaagccttgattgcagggctgaggttagcaaaatccgtaggggccacaagagtagaagtcttcagtgattcacagctggtaataaatcaggtgttaggagagtatcaaacgcgtggagaaaaaatggtcgcgtatgtagcaattgtccaggatctgctccatgagttcacagactac

SEQ ID NO: 147358 - DNA, 587 bp, Cannabis sativa
tgaagatcttgaaagacttggcggctgagaggaaggcattccgggatgagacccaacagagggaggccgaggaggagaggaggcaccagaggctttgcgggaggtgtcgttggccaaggcagaagagttgaagacccaggatgaggccgtggccaaggcgaggcttgagctgagggaggccaaggaggcagttgaggagctaactgtcaagctgaagtccatggaggagctgcatcaagcgaacttgcagtcgacggccaatttgaccgttgaggtgaaggagctcagggacttcaaacatcaagccctgaagaaagccaaacgagatgagctcctagcccctgttgtctgtgagcactgcaccaaacacttcgatgacggtgtctttatggcctggcagaataatgacggaccacttcaaagcattcttctaggtcatccgcaaggcttgtgtatgccttcgacttgaccaacatgtcgttcacgtatacttccataatgcgtcccagaaggcccttaaacatccagttcaccatttgctcataggttgcaccagcattctttaacccgaaaggcatgaccaggta

SEQ ID NO: 147359 - DNA, 592 bp, Cannabis sativa
aaaaatctccccttgaactcaaaattcaaccaaacttaaccaaactcaccagaacacctgcacaatgcattaacaacattttacaaccaacaaatcctagaaaaaaccactaaatcaaattatgccattaaagacctaaacttgactttcaaaactgaagtttccttaattcccacaccatagctgaagatatccagggcttaaaatcaactcaaaacaaacttagaaatcatactctacaatcttgaaaccctaacaaccactaaaacctaaaatcatagctcaaaccaaacataaacttaaaactagataacaggttccacaagggcttaccttagcttgattctcccttaattccttgctgaaaacaccacaaaacagcagcaacaaccccctggtttgcttcagccgaaagagagaaagagaggaagagagcttctatttgatttttccttaattttctaagcttcctttcaaaagaaaagggatttactaaattaatcccttgctgaaaaaatcagcttgctaggtgtcaaaaatctaggctgccacttaactcccaccaaaagaaatgactaaaatgccctttgac

SEQ ID NO: 147360 - DNA, 522 bp, Cannabis sativa
  modified_base (272)..(273): a, c, t, g, unknown or other
tgcatggtgagcccttaatgcctccatctctctatctctccactcggtaaacatacgcctttgttcgtcgaacgcaagattcactagagtgtggagtttgtcctgatcaggatgtagggtattgttgtgaccctacatgagtccaagagcgtcgcggagattttgtaactcagtggcatctccgatggtcttctgggtgttggttccaggcagaataattgtgttatgaatgccctggttgggtgcgaaactgttattcccagtctcttgcnnaccaggcgcgatttcatctataggagttgttacaccgttacccacgcttaccggctgtccaggattaacagctggtggaacccttgcatttcctgggttctgcaatgcaggatcaaccgtctgtgaatttgctggatcattcaggcctctacgagtctacaccatcgtatttgtggttagatgttgaataaagagcgattcgtgatctttctctcaatgaaagcaccaaaatgttgacatcgcttttag

SEQ ID NO: 147361 - DNA, 954 bp, Cannabis sativa
aaaaaatgaatcaatattatatttaatccacattttataatagtgcttcaatgtaaaggtaatttttatttttattttttttatagaaaggtgtaaaaaaaaaatcaaacaaaaatattaatttttattgaaattattatatgaaaaatataaattgacactttatttacaaaaatacctctataaggtgtggacaacatttatacattttatgtacttttaattactaaaataccacttacactatcacttacacaatcagacaatggttgcagggtgattggccaaaggttgcatcagacgaaggttactgggtggttagtcgaaggttgcatcagacgaaagtttcaatcaaacaaaataactgttagcaaaatgtttatggaactgttatgaaacattaaaaatcagaacagtattttcacgtaggtaactctatctacatgtcttttcatgatttaatatgaaatttaccattagaaatttaaaaaataacgaaaatacaccagagtaaatattttactatagtattgctgtaattttttttggattatacatgagttggattgtttgggacctccagttcaactttttgagatgcatttaatggatctgaaaattaaagtctggatataagttttatacaaattaaactggatttccggttgaattttagtttcgtagtaatttttctaaaaaaatttttccatgaattcgaaacagctcctgttttgattgattctagtcgtctttacagtgaagttgccgaaattaatggtagttctttttctggttgaattttcgtttcgattgtgttgggttgttgagtggttgcccagaaagcatagatcttgggttgatgttgtgtctgagtggtatttgtgtaattttttttttatttggactgtatatatatttatttagccagctaaaagtatttttgtaatattatta

SEQ ID NO: 147362 - DNA, 753 bp, Cannabis sativa
  modified_base (46)..(46): a, c, t, g, unknown or other
  modified_base (244)..(248): a, c, t, g, unknown or other
  modified_base (499)..(500): a, c, t, g, unknown or other
tatagaatctatatctatgattagcttgttgggttttatgccctanataaaactcatttcaatataaatcagatttactaatttataaaagatcaaaaattattttatgctatattgttcacataatttatttcatgattatatatttattgtataaattctattaaattcaaaacatacataaatatatatatatatttgttcatgattatagtgtcaacagcacagtggaatataatcatgnnnnnatgttcaaaagtttaattctcatgatttgacagttcactggatttagattgacatgataatcggcgataaggtatacttacaccttggataagtgtcatgtcctttccagggtattggcaaagtataccattatcagatgtgtggagtatacattggaagggactaatattgaacttagacaagatatcataaatttaccgttatatctttttcagtcaatatcaatgattgatcttaggtctatggatcnnaatcttgatatggttaggttcagtgtaacgccctaatgctaaggcacgctaaagtgatttttcaattacagtactgactttgctaaccaaagtattttcttaaaatcgtgtcaaattagaacttttatattaaatattaaactttaaactttacataatcgtttacaagtaccgggatcccgtttctaaactttttgccaaatatacaaaataactattcaggtcgcaaagcgactacaaaataaaaacccca

SEQ ID NO: 147363 - DNA, 685 bp, Cannabis sativa
aaaaaagtaacaataaaatatatttggttaaataattaagatattaaatataagtattattggtagaggttcaaaaagtaaaaaaaaataccgaaaaagtaaaaaaaataccaaagtaaacatgcttgtattgggattagaacttatgacctccttttgatgcatgaaatgactttaccattataccaaagcttattttatgtctaaagatatcacttttatttatcatcaatatatgttgtaactaactaaaatgcatatatatttttttaccgattttttttttcagagtgggcgactgccccacctcgcctctatgtgggtctgcccctgatcatgatgattatattttttttacctataataacatgttaacaacatttaaattttttttaaaactaaattaactataataaattattttcttaaaataattaatctttcatttaaatatttaataagaccctttttaaaagttaatattaataattttatttttatatttaagtctttatatttttttaacaattaccatttaattataatatttacaataaaactctattattttataaaaattaaacttcaatcccttcttgttaagtttatcaaaaacacgtgttcaatatctataaccaattacaattaataacttttaaattttcaataatacatattcaagatc

SEQ ID NO: 147364 - DNA, 514 bp, Cannabis sativa
tatcagttgacgcaacagaaaactcaccgcccattctaatcttaagcataataggttttttcagcatcttttggctataaaagaagtggacttcaatagttttcaataggcaattcagtagaaaatcacaagcaatcaaggagtacgaattttggagagcaaaatcaatattggaggctttctcaatagagttttcaacattcttttcttccctattttcttctctattatttttttaatatgtgtgaatttactgcgatgaacatgagtagctacacaattcattaaggtttagatggatattgtttgatattgatttatggttctaatatgattttattttcccttaatttctatgtattttatttcattcgtacttaattacttttaattacctagtcatcaattaattgctttataattttgatgcgagatctgagaagtgagtgtcaattatgatatagtgaagtagaattgaatttcaatataagacgagagtacctatatggtttag

SEQ ID NO: 147365 - DNA, 1008 bp, Cannabis sativa
  modified_base (980)..(982): a, c, t, g, unknown or other
aaatcacgctaagtaaatgtggtttttatttagaattcacacaactgtgagtatcccgcttttattgggccgagatgaacgtatattaaagatatacggttagccttatctcatggggatgcctcgctaggtatggagccaagttaactttgatggcgagctggtgctcgtcatataacttcccgagattgatattgctttaattctgataactacagtttctggtgtcgagatgatctttctcgcgtggatgtcatcttacagcgagatagacgcctcgctgtctgttatcttgatctaccaaattgttcatacttagtttgtattctatatcaaatgcgctaagtatttttattgttattatatctcctccacgggacgaggttaatgcctcgtcatggacacttacatttgcatggtttctcgtcgatacacaagttaacagttagtacatttttatctcgcacaagactgttcaaccagccgagttataaacatactctacaaattgtgtttttaacaagttatcctatgccaagtgtcattacgattgcaggtttgagtccttcgttcttcccggcttgatacgtgtcttcttctgatgtgcttaccgaattttgggtataacaattgccccttaaattgttcttttttaataaaaagagctttttaatgattacaaagagtattttcgtcatgatcctctttttgaaaaaagacacatgtcctctgattttggcaattatgcagtttcgaggtacttcagttttaaatgaccatcttttctacttctggtttgaattatgtctgtaggatcaaacctttctctgatttgacgaagccaatatcatgagtataaagttagaaaaaaggaaccacctttgcattatttcctccattttagaaagtctgaaaaactcttaaacttcttcatcaagaatcaccatcgactttgtttgaggacttgcatgccatctctnnncttgaccttttttctacgagtttcct

SEQ ID NO: 147366 - DNA, 557 bp, Cannabis sativa
  modified_base (124)..(125): a, c, t, g, unknown or other
ggctaaaagtaaaatagttgttaattacaaatcaccattctaaaaagtctgtgcttaaaagtattactcacaaattattgtgactaaatgtgtttttttatcacaatacttattgtgactaaanntaaattagtgacaacttgtgtttaaatactatgttttagtcacaagtgactttttgttgtgactaaaagttaaatttaattacaaaaaaaatgttgtgactaaaaaattgtcactaaaattaactgttttttgtagtgattgtaattataataaacatcttatttcttttcaaaaaattataaataatttatagtttcaaaaatagtgttcataaaagtcaattgcacacatataaaaaaaatactcataaaacttattatttaaattttatattttttattataaattattcaaaaaaaaattaaaaaatgaatataatatagggaaattctatatgcactcccttaaaagggatacaccgatacatctctatctattttagtatccgaaataattttttagtcaaattttttcttatggtcatgtaaatt

SEQ ID NO: 147367 - DNA, 702 bp, Cannabis sativa
tttattaaatattaacatattgcattaacacaattaaaatttataaataagacaacaacaccgtacaagaactactaattgaacatgtaaaaaatatttacaaatttaattgaataaatataaaaaaaaattgaaacacataaactaaaaaaatataaaaattacaccaaaataataattttcttaaaaaaataaagtgattaaatatatttgtttactataataccattcaaaaattataaagtacctaaaaataaaccaaaaacagtattaaaatatgtacatatgaaaactaaacatatatatatacatatgtatttattttttttcttctcttagttaaacatttaataacaataaataattagctaacagtaaacaaataactatataaaaaaactcaaatatatatatatacaaaaattgacttttaactttatttggcaacaaaaatataactacacaacaatactaattaacaaaaaaatatgcaaatcaattggacataaacaaaatactgtcaacaaccttaaaaaaacataaacacaacacacacaaccttaatacatgtttaaacatctaattaacaaccaacaaataactgtataacaatacaaaaacaatcttcatacatatacttatgaaaaattaaacatattattatttttatattatttggacaactaaataacaacagtaaaa

SEQ ID NO: 147368 - DNA, 564 bp, Cannabis sativa
  modified_base (320)..(323): a, c, t, g, unknown or other
tacattggtttagaaattcatatttaggattttaaacaacatacatggtagtaaatctagatcttgataaaaacataatccaacaactggcctcagacccttgttaataattttctttcatgaaatatggatttaaaatgatgtttgtgttgatttggatggtttcattgatggtttatgtgcatatttgataattgtatggaaatcacaatgtatgttgtaaaatatttttttttttcattcttgaaatatttttcctgaaaagtagacaaaaaattaatgaatataggcttttacagaacctaatttggattttttannnnttagttatgattttttaaattttggatgaaaatatgtgaaattggatgcacacacgcgcgagcgcatgggggacaatgtgcggctcactcagacaaaacccctttagataggggcatgtctgaagcttgccccccctcacgccgaggtttctcagccatagaggctacatacagcctcctgtctcagccatcacctaggatccgcctacgcagggggatgcaatgcatacccctgtgcccc

SEQ ID NO: 147369 - DNA, 1028 bp, Cannabis sativa
aaggtaacaagcagtagctaaggcctctccccaataaggctttcccaaccccgaactaagaagtaaacatctcactttgttcaaaagggttctattcattcgctcagcgattccattctgttgtggagttttcacaactgtcctatgccaagttatcccatcctcattacacaatctatcaaattcaatgttgattaattctagaccattatcggttctaagtgtcttaaattatcggttctaagtgtcttaactttaaatttattttgttttccacctgagctttccatatcttaaattttttctagaaactcatctttggttttaagtaagtagtccaaaaacatctactgaaatcatcaataaaagatagaaagtagtgtttacctgaatgtgttgggattctacttggcccccaaaggtcagcatgcacatactctaggactccctttgtgttgtgagttgttgctataaacttgatcttgtgatgcttgccataaacataagtctcacagaatggtaatgcatgcacatgtctgaagcttttcaatgactcccttcttgtgcaattccctcatgccttgttcactcatatgtccgagcctttgatgtcatagctgcatatcactttataagccttttactgtatctgcctcagccacatgtacatttttaccctcgagtacatacaacccatgtactctctttcctttcatcacaagcattgaaccttttgtgatccttaggctcccattcaaggacttatagccataaccttcatcttccaaggttccaagtgttatacccaaaattcagctagcacatcagaggaagacacgtgtcaagctgggaagaatatgaacccaaacacgtaattataattacactcgagatggataggattatgttaaaagtaattttgtgtttaattttaaaataaattggactatttttttttaaaaaaaaattaaatttagctaaagttaaaatataatgattaatgaataaaaattaaacttaaataataa

SEQ ID NO: 147370 - DNA, 874 bp, Cannabis sativa
gaacgcagtctttggtatatctttataacgcccgtatttgaaattactaaactcaaaagctaattttattatattataataaatttaaccacataggtcgggctcccgagttataaaatacagttgaaaactacatttgctattataaaacttttgctatttttttttttacaaacgacaggcatcaacaaaagcaactcaaaatgttgaaggaccgaaaccctcaaggttgcactgccgcgaaatgtacaatcactaccgagctccatctcactgttcctccaacttagcttttcctttacctacactaggtagcaaactgatgagtcaacagactcagtaggatatgcataacatatatataaacaatacttatattggctttatgcctaagctgtcctgagctccaaaaaccgagctcaacaaatgattaacaacgttctcaagggaagtacgaccactgtaccaaatgcactaaagtatcaactctgtacttgttttggtagagccattattgtactcccggaagttagtaagtgttgtagcacatgcatgacgtactcccaggtactcgtgttggtaacactgtaaccaccctgatatcctacactgtactaacactcttaatattatataactgttagtgttagtagtgtaaaaatttaacacaagcaaacattcacatatatattattatgctatcttacctcgttccgtgctcaagtgtgtcggtcagcctgagtggaaatacagcacgatgctttaaagggccctacaccacgatattcaaaactcaatgagagacacgctaaaacagttatcgaggatttaaaattgaaactaagtgttgtcctcaaaagtgagtgttttaata

SEQ ID NO: 147371 - DNA, 600 bp, Cannabis sativa
tctggattacattgaaatggggttttatttagggcataaaatccaacaataattgaatgccattactagaaatagtagaaataaacttgaaaaattcaattgaacattgtgtttgtaaacatgaaacactaatcatgtttctactaaaatttggaataaacaaaacattgtataaaaacaaaaatttattctgaaacttgaggcgagcttttccgttagcttggactgatactaattcaccattgccaaccttgagcttcaactcccctagattgaagtaatccctagttttaagcaactgcaatgaagagcaaacatgattagtagatccagaatcaacaatccaaatagatttgtcattctctaaaacagacgattcaaaaacaaaagtgctacgttcttatggtttagaagtttgggacacttagttttgaagtgttcattctctccacagtgagaacatagaagaatatgtctgtttagttgttctttaattatctatattgccggttcaatcttgattttagctctcaaaattgaacttgaagaagcaacattgtcggacgtatcatcctcaatatcttcaactttccttttgcc

SEQ ID NO: 147372 - DNA, 664 bp, Cannabis sativa
  modified_base (96)..(99): a, c, t, g, unknown or other
tttcaattcaaacagacaatttttgattttcacactgaggatgttgtggtattgtcatcgtgtcagggtcccattttttgtagtagttgcttcccnnnnccagacctaacaatctacatttgcaatccattaaacaaggaaaagaccaaattgagttgggattcacatggaaatgacagcattatctctttagcttttggtccttctcagaatcatatacacatttctatagaattcaagttagtgaatgttgaggcatttgagattggagaagaagaagataagtgcttcacattcaaaatatactcttcaagaaaaaaaagaatggttgaaatcaagagagatttcaagtcaaaagaacaaaattatgttcttattccatttaaatatctctattgatttcaacaattcttttgttcttgaaatgtatatttcgaatgtgaagtacttttcttcttcttctccaaactcaaatgcatcaactttcactaacttgaattctgtagaaatgtgtatgggattctaagatggatcaaaagctaaagatataatgttgtcctttccaagcgcatcccaactcaatttggttattttcttgtttaatggatggaaaatgtagattgttgggtcttgagtagggaagaaacttctgcaacaaatgata

SEQ ID NO: 147373 - DNA, 561 bp, Cannabis sativa
agtttgttgtttttggtgaccataaactcaggtctttatctttcttttcttgaccttattttactgataaatataatatttggttgtgtgtatgaagttttaatttttagtttgccactgcttactcatttaattttttttcttacacatgatttggttattttttctattgttagattttgctatgatcttgaatattatgttgattataatttaaataaaaataaatttgaatataaactgatttttagttattgtgttgattataatttttggctaatgtaatttgttactataatagtgtttatatagcatatattttactctctagttattaatactatgtaatgatgcttctttgatttgagtgataaaatagtataatatgttgtgatacttggtatctctttagtctatgtggctgttttgttgtttgttttttatatagatacatcaattttgttatatttaattatttatagatgtaaaatataatggacatgtatgttgaagaaggtataatttttttatcttataatgattgatttataaattaataat

SEQ ID NO: 147374 - DNA, 889 bp, Cannabis sativa
ttcttttgtataaaagtttaaatatgcatgtgtccgtataaatgtaaatatgaggtctttttttgtatatttgagtaaaaatccctatttttgaagccaactaccgatagtaatcaaagtaaataatggtgtgacttgcttcatagttcaaaggcaatgaattcataaaaaaccccattaactaacgcatgcaaattgggactaggacagctttatcaaagaactacaattgacataaaagaataaacaaatggactttaaatgtaattttctttggtgcattaaagtaatgaccttaaattattaatgaatatataataaacgttttgtataagattggtaatgtcgtagtgggaagtgtatgattgtagcatgacttttttgtaatgatatataataatttgggtatctttatcttttttgttttttttcttttggttggaaatctttagctttttgagagtatgcgactttgctttttccatcattccaaaaacataaggacagtcgtactattcttatctttcacttttgcttttgttgcgattgactcgattagattatatataatgctggcttatgggcacccaaaatttgtggacatgcctattagagttggcctcaaaattaaggtagcaatcctggttagaaaaattaataataaattcaagatcaatttgtatataacatacaacacaataataatatataataattaagtatgtgtatctgatttatccatagcaattacctcaattcgatccataataattacttcaattcgatagtcaatactatcaactaagtcttcctccctaaatctctaaatcagaagcagtttatttatctaattatcaaaagtatacaattgtgatgagacagtatgtat

SEQ ID NO: 147375 - DNA, 1613 bp, Cannabis sativa
gctttaaatgctatttgtttaagtaaatattatatgaggtaaatagatgagttaggatttaaggcaataagtgcgtaagtgtggtattggtgcttaagtcgctgggattgttgattacagtggtactaataattgaccctccacaatcatctagaccacagggcgagaaagtagagccccggggctcccgaaactaatccaccgccactgcccccacctccgcagaatccgggggataatgcaggggctggtaatgctaatccacttgctgactggcagcagatgttcctagaaatgtgaggtatcatacttcgtcaagaagaagagttgcaacgtttaaggcaacccactatcccagtggataaagggttaccaccagcacctgtgtcagtggtgggtaaccagggatacattatgccgcaccgagactcagtgtttgagcggtttgtgaagctgtagcctccgacttttctgggaggtattgatataaaaaaaggctgagcagtggatgagtactaatattcgtatcctcgataatatggtggtgacaggaactgagagagtgaattgtccagccttcatgttacaagaccatgcccgtgtcttgtgggacatagtgggtcagactttgggattgctgtgagaactgtttgaagaaattttttacagcattgctgtgagaacttcacatatggaagactttgtgaagcttactcagggaaagatgtcagtggccgaatatacccttgagtttgatcggttgtcgaagtttgctggtgatctggtgcccacagatttcaccaggaaacagaagtatgtgagaggacaaaatgccacaattagtcgggacttgaagattaccacatcacatgacactctgtacaagaaagtagtagagctagccttgattgctgaagaggttgagtagcatgttgcgaaagagtagactgtaaaggatgccgtcacgacatcgaatccacctgctagtggtaacgccagtaaggggaccgacagtggcaaccctgatcacaaacagaaggctgaggcttccagagcatcagagggtaatagaaagttttggctaaacagaggtggtcgtcagggtcgcgggtcctcattccgatcatatcccgagtgtcctatatgcaagaaacaccatcctagggagtgtcgagcaaaggcatgtttccagtgttgcatggtgggccactttatcagagattgtcctcaggccaagaaagaggagcctaagaagaatactacccagaacctggggtgccttttcaccatgactcaggctgacgctgatgctagtccgtcagttgtgataggtcagttgtctattaatggatgttattatctgtgttgattgattctagaggtactcactcttatgtgtcaagtagagatatttaaggtttccacaagccatgtgatatttatgcttcgaggtttggaaccctgttaccctcgggagaccttatagtgtccactaggtggattcggtcttcgtctttctagattaacggttgtgagttgaccaccaatctaattgaattacaactatctgactttgatataatcctggggatggattgttgggttttatgccc

SEQ ID NO: 147376 - DNA, 538 bp, Cannabis sativa
atgtaaatttcgaaatacatttatttcaaatgtagatattttgaacttttttaattttaaaaattagattaagttgaaaattaattttctaattaattatagattaacttaaatcaagtattattttcgttaatgataagttaaaataaatagactaaaatatattatattttaattaaaaaatcaataattagttaatgaaatatttagatagttattttttaagtagacttttgatatttttctggatatatttaattaataaaaaattaatatttaagtagattttatttaagacaattaaatattatacatttttcttaagagatttaattaaatagaaaaattatatttatgttaaaaattaatttattcattaattttagatcaacataaattagaataacttttccaaatttattttttattgtaaaataaaattcgaaaatgtatttttaaatatattagattttgaatttagtattagatatatatttatagaaaatcatatttaagttgataattaattttaattatt

SEQ ID NO: 147377 - DNA, 1198 bp, Cannabis sativa
  modified_base (553)..(558): a, c, t, g, unknown or other
catggacctataattctaagctccaataaactacattatttattgaatctcatcaaccaaataatctcttgtttattaactctatgattacttaacttaattatggaattgcactcttagtaattatagaattatatttattgagtttaactgcattgtccattgttataatcaattccagtgattagccctccatgtgttggtttgtaattagttttggtcaaaatataatgttacctttctaattatttcttcatcctttagttctattaattccctaatggacgtataattcaaaatcccatctcaatttatacacaacattccagttttagaattaacacataagagaaacaaacattggatccattaggaaagtcaagattctataattgtacatcatgttcctagccatccatattattagattcccagaagttgtaagagtcatcttctctgaaaaactttaacgagtgaattaaagaaactaataacatgaacaagagttcattataacttaaaatttaggccgatctactattgatcatcgttnnnnnntgaattaggtctttatgataaacgtcatgttaataaagacagctttattcatatcggtccttgtcatatataatctctattatacataacactttcactttgatgtctcactacattcgtaatccgaaccaatattacttgcaccgaagaacgagcattagtgaactgtactagcaatcattgattaaagatttcataactttaatatgttattgattgttttattcatagctaaatgattttagttctctgcacaactacaagccattatctcatatataaataaggaattttctgatatttaatgtaaattattcaataataaatattaacaatttaacatttacacatatatcaaatatttagctatttatttaataatcaaaaatatatttacaagcttttcagggcacaaaccctaacatctttatgcttcggctattgaaagtctcatgtatgctcaggtatgtatgcatctagttttgatgtacatagtgtctatgctagacagatacttaagtgaccccagtatggattattggaaggcagccaaatgggtcatgaggtacttataaagaacaatgattatatgctcacttgtcagaagtctaaaaatttggagatcattaggtattctgac

SEQ ID NO: 147378 - DNA, 530 bp, Cannabis sativa
ggtgcccgtcagccacttgaagtctggctgagagaagtagaagtaccccgacctgctctgcttaggggtagactttaggtcaaaaaaacagttgacctcgtttggggacggcacaccccattcttgaatggcgtagaggacgaacacggtaaacaactacttaatgccctttggagtgaactgggtcagataaaggcaaaaatagtctataaccttcttgaagtacgggtgcaaaggcaccatcgccccttgcttagtgtgagcacccgaccaagcacacaaccctctctgcgggtttgttgcccggtgattcgaagaaggaatgtaacactccagtctacccaaacacccagccttatccaaggccttcatacatgcctcacttattttggatggacggctcacccatctgacccctaaggcactttgcctcttgtggggaactacttcagtaagctccccgatgacgtagtcctccccttcgaccaagacgtcaccctatgcagacactggctccccggcctcattat

SEQ ID NO: 147379 - DNA, 572 bp, Cannabis sativa
gaacccaaacccagactcggactaggacttgacccacgaccgggtcctggacttggattgggacctaggactcagacttggatgagggacctagacccgagacatggccataaaaattaggacagagacctgacctcaaacccggaccctaacctaggacagagaccaggaccggggagccaaagtggaactagactaggaccctgacccctgaatcattgcttggaactgaaccgtagtcagtgtttggatcaaggacccatacccggactcaaacccagacccggattcggaccctgtcaaaaacccacacccgtacccaagacatgggtccgagtccgacactgggtttgagtctaggaactagaatctgactaagacccaaactagacccttaccgggatgcagacctgaaataaaactcgaatcgggactcgggacacgagcccaaacccaaacatggacttggaccaagacccggaccctggacctggctcgggattagagactcggaccttaactcaagacccagacctagattggggtcccaaactaaaaattagaaccagaat

SEQ ID NO: 147380 - DNA, 981 bp, Cannabis sativa
aacccaaactgagaccaggactcgaactccgacccaaactaaaagccaaactcgaacttagaattgcaaatggaactagaaccgaactaagactaggaccaccaccagtaccgaaacccaaatttgaacccagatcaaaacctagatagagacctaaaccagaaccgagagtaggactcgaacccgtacttagatcgggaccaaaacccacacaataacagggacctggaccaagaatcaggatagggacacgggaaaatgaactcagacttggacctactacccaacccagaccttaacttgaacctaggaccaagctcgtgacctggcacaagaaatggaaccagacaaggacccgagattgggatccggatctggacccaggacttggacaaaattcgtagtcggtgtctgggtttgggaacagcccttgaccggaaccctgacaaggccctgaacccacaccaggacctgaacccagtcccaaacccaaaagtggagtcgaacccgtaccctgtgacccaaaattggaaacaaaattggaagttgatcaggactggaactaggacatggacttggcatcataattgatattggacctagatcctaaaccgtaaccggactaggacccgaaataaaaatcagacctagacgcgaattaggagccgcacccgcatcccaacccaatcctggactcgagtcccgaacccgaacctgaactcaaacccaaacattgaactagactagggatacagaacctgggtcgggacctagaaccgcaccccaatctcgatcccgaacccaacctcagaaatgggacctgggacctgaaccagaacaaaatagagactcgtgacagtgatccagatcttgaattgggattagggtaacggggcctcgaacagaccactggtcggtgtctagatctgggactcaggctaggactagaacccagacaaagaaccaaacccgaacccaaac

SEQ ID NO: 147381 - DNA, 504 bp, Cannabis sativa
ccctttcatcttcgaggatgtctattttttagaggggatttggcgagctttcgactccatcgccttgatggactgcgtcttctggggcttcgacccctaaaattctttcctttcatgctttgggaacgtgaccggggcacgggagactcgcgtttctctttttctctttccaactcgactaaataattctcaattcttttgtgcggttcagccattgcaaagaattctaccaacgactcgggtcaccgcacttgtagttcctttcaaaagtcagttcttagtaaaacacttgttatcaacatacaaattagcgaagactcgggggaccttctcaattttggttattcagcgttaaaacgtttaaaataatcatgtaaagactcactgacttcttgtttaatatttgcaagtgttgtgtaaggcagtttgtacgtcatcgtggcttggaagtgcgttaagaataggtctacaaaagtctcttaggttgatatcgaggcctcaggt

SEQ ID NO: 147382 - DNA, 909 bp, Cannabis sativa
tgccagtagctgccatgcatatctcttttctcaactctcaataaaaacaccaaaatatttatcgagatttttggaaaccacataatattagagcttaagaaagtaatggaggtataaataataaaataataaacaagaggttttgacgtggtttgggcattaagtatccttagtccacgagtccattttattaggctcatcggcaggtggttgtttatacaaatacaaaaagtatggacttttatcccgatcccccgtgttcctcttgaagaagaggaagcttagtagggatattttgaagttgataatgggattacagtaggatgctttttttaaaaagggttagtctttggtctcaaggtgaagaaccaaagaatggaaagtgaagtaaagcctctgaatccgaacctctctgccttgtgcgtctttggagatattcataggcagatcctcttgcatggactacacttgatggatcttcatcgagatgaacccccaccgttagattagtaggtatcacattttccatgtggcctttaccaatgtcagattgtactggttgtactggtgatgttttcgacgcgtgtcgctccacgggcgttctcattgaattacccttaccactagccgtaagattgtattgcacagtacacaaggacgcgcatgctctgcatggtagcatggcatgggggacaacttctgacaatatatcaaaaagagctctgccattgggtctgtagcttgtcacacctgggttgagcttccacgggtttaaggcgtaccccaaaccgatgtttcttggttgaagatttatgtgttgggttttgtgctctaaataaaacccatttcaatattatcagatttactaattaataaagatcagaaaccattttatgttgcatggttcac

SEQ ID NO: 147383 - DNA, 591 bp, Cannabis sativa
ttggacttgatttttatatgtgttgtataacattggacatattccaatttttatgatttacaaaattatttgaaaaattgaaaacttaatctgcatattttttttgaatgtttaggggcactgagtgccaaatatatttttgtttggaaacatttatgcaggttatgatttttgggtttattcaaaatacaactgttatgctgccgaatttttcttagaaaattaaaaggaatatgttctttgttatgattattatttgcctgctttggttataccgatgatagccatgttgatgatgttcggtgcatattgttgtttcacgacctagtctctatgtcatcataggtagatcaagtgtgcactcacctgtacgtgaaagacctagaatctgtactaggagtgaattaaatatgagccctggtattatagtggatatcagatgcgactacccgattttggatatcgttttctatgattggtataaagagctaggtgtctagtggacggtgtgatatgaatttgacgtttgatttgtgattatttgtgctctctctactttgtttatacattttgatactggtgatgagatat

SEQ ID NO: 147384 - DNA, 583 bp, Cannabis sativa
gggtggggatccgggtccggctccaaattcaggtctaggtcagatttggagttcgggtcctggtctggttacggttctggatctaagtccaaattcagttagaattccaagtccaagtcctagttccagtcccggtcaacttccatttttggttccaatttttggtcacacggtacgggttcaggtctacttttttgtttgggacttggtttaggttcgggtgttgttttgggtcctcgttagggttcaggtccagggctgggtcccaaatccagacactgactacgggttttgtccaagctagagatcgagatcaggaacccaatctcgggtccttgtgtggttccatttcttgtgccgggtcacgagctgggtccaaggtttaagttcgggtctgggtcaggtactaggtcttggtcctagttttgtttcccaggtccccatcctgattcttggttcgggacctggttattgtgtgggtttgggtcccggtcttagtttgggttcaagtcctagtctgggttcgggtttaggtctctatctgggttttgatctgggatctggtttgggtttaggtcctggt

SEQ ID NO: 147385 - DNA, 517 bp, Cannabis sativa
gatacttaaatatttatttttaattcatgaaatttaattaaataagcaaaatatattttagttgaaaattaatttgttaattaattttagaccaacttgaattagaatattttcttagagattaaattagaattaataattaattttattttattctaaatacttagtgatttctattttaatgaatttaattaaatataaaattatatttatgtccaaaaattttcaatttcagttcaatttaaatcagaataatttttagagtatttttttattttattttaagaatcatctcccactaaatttcaaaatatatatttttagattacagttaaaaattaatttaattaattttagatcaacttaaatcaaaaaattttcattaatgatttattaaaataaataaactaaaatctattatatttttaattagaaaataaaaaattagtttatgaattatctagatagatattttctaggtagacttttggtattttattaatacatttaattaaat

SEQ ID NO: 147386 - DNA, 621 bp, Cannabis sativa
ggtgtagtgcgaggtgaccaactgttggctcgcgagtgctatcgcatagaacttcagaatagaagagccaactatcaataaatggtggtcataatagaggaaagcgagaagaaagaagaggatctgactccttcgatttaagacgagaaaaacaagttgaaaccaattgaagaactgtaagaaattattttagattcaaacaatcccactaatgtgtgtttattgggaaaaatctgaatgaaaaactaatatagcagttaacgaactttctaaaggcaaacaaagatcaattttcctggagccattcagatatggttgggattgaccctaaagtgatttgtcaccatttgaatatcgacctaaattacccagctaaaagacaaaaaagacagaccttggattttgaaagacaaggggcacttaaagaagaagtggacaagttattaaccaacaattttatatgcgaggcgttctacccctcgtggatatcgaatgacttgtattgagttttcagacttaaacaaaacatttccaaaggattgctttccactaccaaggatcgaccagttagtggatgcaactgttggacacgagctaatgacattcatggacgcatattct

SEQ ID NO: 147387 - DNA, 1044 bp, Cannabis sativa
gaggagagagagaatgagagtgaaaaagttattttctctttgaaagtatcactatattctcttattcttagggttgatttgttatacttatataagattgtaaataaattttttaaaataaaagataatatttaatttgattcaaattcaaatataaatatcatataattgattaacagaaatcagttaattttttttttattatttttaattaaatagattatctaataatatatttaataatttaataattaaaagataattaattaatttaatttgaatttattttaacaataaaataattaaacaaaattaacatgagtctttatatatcaccctacacgtgtgggctaggcctacacgcctgtgccatattttaaagtccaaattgattttttaatttttccataaataagatttattatttattctgtcaataaataataattgattagttctcattaatttcttatttaacaaggaataaaataaatattatttccactaaaataacatatttctctctttaatattatttaagaataacattatatttaaataattaatatagttttatcaaataaaactaaatagctaaataccatttaattatacaattcataattgttataattattcaaaataataattttcataaattactattttacccttaagaatttatttctcatagaaattaatacacactcaattttactcatcaaataaaactctctcccatacattgttgtatagagatgaattgagaaccatggacctatactttgaaactccaataaacacttgattattatcgagatcatcaatagaacaatctgatttattaattccattattaatccactataaatatgaagaattgcactatttgacaatgtagaattatatttacaaaattcttatttgtagtccattggtataatcaatatatgtagttcgtcctctaattattaattcataattagagttagtcaaaattatcgatttaccctttatattatctcttgactccttatgtaccat

SEQ ID NO: 147388 - DNA, 663 bp, Cannabis sativa
acgtgttaggcgcgtctgttcgcaattcgatgtgaggctgaccaggcgtcccttcaattttcggctaattaatgttgtaactcaattaatgcctcaaaacccaaatttctctctccacgtttgacggttacacttgattatatttgattcccaatattttcttttggggggaatcaatgcgtctaatgcatttgaaatgattacccttttttttcttcacttttttgcctataaatagggctgaacatcattcacgaatttaattttaccaatttctccattaaacaaactcagagcaaaaaaggttttcacttcaagtcagtcgtgagatttctaccaaaagcatccaagcagctccgtttggaccgaacccagacgtcgaacagtgagtaagttttcaatcccttcttctttttacttttcatgtttaatttctgggtttcaaatatgcgttcttgaccttgctgtagaagataggtagaaaatctaggtttcaaacttcgcaattttctttgtaataatctgtaacactttgcggttcatgacgttggccttttgatcgcacattgtctgtctttcaccttgcttattcaaagcttctaaaatttagccctaacctcaaaaatttcaaacttttgggttttgacttatttttgaatatat

SEQ ID NO: 147389 - DNA, 903 bp, Cannabis sativa
aaaactacataaaagtaacgtgaaaataacatcaaaataacaataaaaaataacatacctagataacaaaaaatcaacaacaaattaacaagatcaagattacaacataaatgatcgtattttatgtaaataaaataaaaaaaattgtaaaaatgtttaaaatttcgtaaaactgtgtttttgaaattttttttgttatttttatatttttgtgaaataattccttttttaaaaggtatttttttaattttggcccctaaaatgatcgtgggtcctaagcgcgggcctaggccacttatgcctaaggttggcccattaaaatatatttttagaactctgtaggtacttgaattatatgttaagtttttatcacgtgtcattttcttattagtatatttaaattaatttttttaaaaaaaataaaaatttataaccttgaccaatcaaagattgtcacgtgacaatttacttaatatttaataatattaggtacacttacagaattctaaaaatatataatttaggtattattgccgctaaaattaacttaagtatttatttacaattagaagttaaacttgagtatttatgctgcaaactattctaaatatattaattattaaatttgtgtcgtcgctaactacagattcatatatggttataggcttagtttatggtataaacaaataggaagtttcaagtagttcaaatcttgtggaaaaaaaaaaaataaaaaacggcagattttgattgttacaaaattatccttctaaattatgttgtcgcgcgtagacagacgtcaactaagaaataataatgaatgcaataaacgtattagttttggaaatggtaattgatttggaaaatttgattttatatacttaaaaaattaaaaaaatttat

SEQ ID NO: 147390 - DNA, 1003 bp, Cannabis sativa
gccaaaaattaaaattagatatttatttgcaataacttccttatttatgttgcaaaatacttttttaatttttataaattattaggttattatatatgtatatttttagctgtataattagtttttttgtgtaaattttattcaataaataaaactatttttattaaaaatatttaaattaagtattatttataataaaaaaaaacataataatattcaaaatttgttgttacttataattttagtttaattattgtaatatttttaattttataatatttttactatttttgaaatatcatacacttttttttttattttttttaaataataataatagaaatatatttttctgtaaaaaaaaaaaaagaaaaataattttttaaatatgtgcagtatgtttaaatttacgacttagagtcgttggctaaaaacgaagtgaacaaactgaataacagaattcaattatatcttattattttatatatttttttaatttaaatatattaaactataatatatgtaatttaaaataatattatttattttgtaataaataataattaattaattctcattaatctcttatttaactaggattaaataaatattattttacactaaaataatataggggaattatctcttatactattttttaatttttttttctcaaatttacggtttgagttgctccagtggttggtccggtagtttctatgtgggttactatgtagattttagttgcaatttaagttactccgttggtcgctatgtgtgtttctatgtgtatttctgtaaaaatacacacaaaaaaaactgttttgaaatgtaaaaataaaaaaaatcccaataatatctctttaaatattaataacaataatattatctttaattaattgatatagtttcatcaaataaaactaaatagttaaatatcattttaattattcaatttataaattatataactattcagaataataatttatactaaaattac

SEQ ID NO: 147391 - DNA, 791 bp, Cannabis sativa
  modified_base (38)..(46): a, c, t, g, unknown or other
attaaaacaacagtaaaataacactacaaaacagtaannnnnnnnngatttagtaattttttctctttgctagattttatgggttttttttttctggtgtttctatgatgccggtgttgatttgtccgtccccaaccacgaaggagaggtgtcgtttgtgttttgttactgtttacagtataaaagtaaatatattgggcctaggcagtataaaagaaataaaaattggcttggacagtaaaaatgtaaagtttgccgtgtcccagtatttttgaaaacatttggtaaaaaaaacaatatttttgtaagtttccctttaaaaaaaacttaaacaaaaaagatgtacgaaaaaattttaaaaatagatttagaattatatttttttttaaaaaaaaaaaagaataaataaaaatatatattttatataattaatatttatgaacctaataaaaaattaaaaaaataagagaataatttgagatttatagactaaaatcatccaaataatttgaacgataaagagaattataaaatttaataggaataatttgagatttatagactaaaatcatctaaataaacaaataaattagctacacaagaaattataaatgatacatttttctttagagtatgtgtttgaagtttttttatgatggtgaaattctttttgtcacgattactatttttttttttttttttgaagtttctttatgatcatggaatactatttttttttatatataaatatatatatatggaagaggtttcaatggttacatttttattgt

SEQ ID NO: 147392 - DNA, 638 bp, Cannabis sativa
  modified_base (37)..(46): a, c, t, g, unknown or other
  modified_base (103)..(107): a, c, t, g, unknown or other
  modified_base (367)..(367): a, c, t, g, unknown or other
  modified_base (410)..(410): a, c, t, g, unknown or other
  modified_base (592)..(592): a, c, t, g, unknown or other
atgaaataaatcatgtgaaccaaaacatacacaaatnnnnnnnnnntacttttgtttctttattgatattgaataatccggattacattgaaatagagttttnnnnngggcataaaacccaacaaaggctatgttcttccatggcatgaagagaaagtttggaaactcaataggtccatttatggacttaagcaagcttctcgttcttagaataaaaggtttgattaaataatcaagacctacagctttcaccaaaatgaagatgaaccgtgtgattaccaactcaaggataatcaattggcagtattcctggtcctttatgttgatgacattttgattattggtaacaatatcaagaaaatgactnacatcaaggaatggcttaatactcaattcgaaatgaaagattngggtgaagctgcttatgttcttggcattcggattatcagaaactggaagaacagataccttgctctctctcaaacagcttacattgataaggtgttaaagagattttcaatgacaaataccaaatggacacagatgccttctagatttggtatccatctatccaaggaacagtgtcccactnatcctcaagagatagaggacatagaagggttcgttatgcttcagca

SEQ ID NO: 147393 - DNA, 543 bp, Cannabis sativa
tgactatgaatcttaaaactttcctgaggaaactccaaatgaacacttttttgggttaagcttcatattgtattttcttaatatcttgaagcactctgcgaggtctgtagtatgatctccactctttatcgacttcaccaacatatcatcgacgtagactttcatgttttttcaaatttgtctagcaaacatttcattcacaagtcgctgatatgttgccccagcatttttcaacccaaatggcagaaatttatagcaataaagtcccatgttggttacgaagcttgtatgttcctgatcagggacatgcatttttatctggttatatctagagtatgcatccatgaatgagataagctcgtgtccagcagttgcatccaccaactggtcaatccttggcagtggaaagcaatcctttggacacgccttattcaaattagaaaagtcaatacaagttcaccaagttccatttggttttgggacgagaacaggattggatatccatgagggataaaatgcctcgcgtataaagtcgttaaccaa

SEQ ID NO: 147394 - DNA, 704 bp, Cannabis sativa
  modified_base (425)..(428): a, c, t, g, unknown or other
  modified_base (542)..(546): a, c, t, g, unknown or other
tttttttaataatatgagtaactattttagttgagggtgttcattggactacatccattatttttaggcttattcagatccgatcaaattatatattggatgttagattttaccatctgattcgatctagtcatccaatcgatccgttggatgttagattagatcggttttatccgttggatgtatttcatatatatttattagtctaatttgggtttattcaatattttagacctagtatttttttcgaccagatggactccatctaatattttaggtccaatatgtattggattagattagatccattcaatctaagaaaaaaagtaaaattttgatataaaattttatatatggatatatattttacgtataacaatagaaatttaattactcgtccaaactaaatgaaaatactaattagnnnnattggatgttggatgtattagatttttagatacccaatccaacatccaatctgatccaattggatatttaaaaataacatccaatctgattcgatcataattggatatccaatnnnnntttggcggtcggttgtaattggatcggtcggttgtcattgaattgtatgatttatgcccaccccttttagtaaacttttatttttttttttcaatttttaattttacaaaaaaaaaaaaacattatacaaattatttaaatttaataaattataattt

SEQ ID NO: 147395 - DNA, 546 bp, Cannabis sativa
  modified_base (38)..(40): a, c, t, g, unknown or other
atacttccatgtttcgtctgatctggtctttaaacatnnngtttaccaatctttggtatgtcgccccagcatttttgagaccaaatcgcatgactttatagcaatgtagacccaaatctgtttggacgcttgtatgatcttggtccggtggatgcattttgatttggttgtacactgaataggcgtccatgaagctcaataattcgtgccctgctgttgcgtccacaacttgatcgattcttggaagtggaaaacagtctatggggcaccccttcttgtggtctgtgaaatcaatacacaaactcttgggagctagtacaggattagcaaccgaattcgggtagaaagattcaattatgaagttgttatttcgtagcttctctacctcttcctttacggctagagctcgctccttgtcatacagccttcgcttttgttgaacttgtcgaaagtttggatcaatatttaggatgtgcgaaattacagaaggatcaattccgaccatatcctcatgtgaccaggaaaaaatgtccacgtttgctctca

SEQ ID NO: 147396 - DNA, 515 bp, Cannabis sativa
tacttgttagtaaatctgaatcctggtaaaatatttccaacacgttgttgcttgttctaatgccctaatgcgatcctccatctgaggcgcacctgatgtttcagtagcagcgtatctcctctcaatcgcagctaccctggccaacaagttagcatagtcttaagccaacgtggcaacttgttattgtgatgctgttggccctgagttctgatgttggaagttagatccctgaccctctcgtccaggccatctagttcccctatgcgcttctcaagctcttgaattctttgggtattgctcaccattatgtcgtgttaccaagcttccctttctcttggctctgatatcaactgtcacgggccgcctatttggacactcccacgtaggcagaacgtgcggcacttgctggcacaccgagctagcaagtcagcctaaatgcagatgcagacaaacaagttcaaaggttaggcacggtacatgtctcgcacatgttgagtgcaaacaagaggcatgag

SEQ ID NO: 147397 - DNA, 953 bp, Cannabis sativa
ttgtgatgtgttggcaaaagggagttggcaaatcaatgttggtattagaactttttccagaataaaataaaaagcgctagcaaaaataacttttttcaggacataaatgcgctggtaaaagttagattttagccactgcaaatgtacgttggtaaaactttgacatctttgccagctcagtttgctaaatgtgctggtaagtgatatttcttgtagtgtgttatgaaacattaaaaatcagagttacgtagtgtgttatacgtaactctatctatatgtctcttcatgatctaaaatgaacaaattcaccattaaaaatttagaaaacaacgaaaatacatcaggataaacattttactatagtattgatgtaattatttttagattatacttgagttggattgtttgggaactctagttcaattgagattgcattatagatctaaaaattgaagtcaagatattagttttatgcaaattaaacttgattttcagattgaattttagtttcatagtagtttttctacacttttcttcataaattcaaaatagtttctgttttgattgattctgttcgtcttctcaggtgaagtcaccgaaattaatggttgttctctttctagttgaattttcgtttcggttgtgttgggttgctgcgtagttgcgcgatggttgcttaagaaacttaaatctttggttgaaggtgtgtgtaagtggtattgtgtaatttttttattagggttgtatacttatttatttggccagctgaaagtatttttgtaatattgtattgttacttttaaaaaaaaaaaaactgaaaaaagcccaaaaaattattacttgcattacttttaaagaagaaattacattgtatgtccactttactttatttattttaatttttacttttattttatattctttaaaatatatcaacttttatagatgatatc

SEQ ID NO: 147398 - DNA, 693 bp, Cannabis sativa
ggtggaggatttacaggatgaccaccctgaactctaccacggccacagttgcgaccacggggattctggggaatttgattttcctgaccgccttcagtctcaaccatattaccctgacttgttgtatttcactgggcgtccatttaataggacttagtctgcaaacccataagccaggcaggttagacagcgatcataaagcttaataccgctcttatggacttaaaggcgacacacttaaaaaaaataattataatataatatgcttcctaacatactgtaataatcacatataatactaagcaagtacgggcttactaaaccttgaaccgagctttctctgatgaagattgtacatgtcttggcaagcttcggtagacaaacttggcggctctgataccaaaattgtaatccctaatgctaaggcgcgctacagtgcttttttattgacattgttatctttgctaatcaaagatttttcttggaaaatgtgtccaattaaaacttttatattaaatattaaactttattatttacaaaactatttacaagtaccgggattttattttttaaacgactacaaaataataaccccatatgtcccgagactgaacactccagctcgtgctgccacgacatgtacaacctcatcccagctcaagctcactactgttcagttttcacctttctttt

SEQ ID NO: 147399 - DNA, 650 bp, Cannabis sativa
tggaaattaaaatcgttatcaaaggctggtcgtgctacgttgatcaaatcggtggggcttgctttgcatgtttacacgatgcagacgacaaagctttctaagaagctggcatataggattgatggtatggtgagggaattttggtgggggtaatagaggcacctgtcttaaagcctgggaccaattgtgccttcccaagtcccgtggggggcttggctttagaaagactgtggagatgaaccaggcattgctcgccaagtggggttgggctctacttactgaggaacagtcgttgtgctgtaatgttctcagatctaagtaccttaagggtaaacaattttttgactgtgaggttaagagctttgattcttagttttggagaaatgtggtgcgatcaaacgagattttaagaaaaggggtgtggaagctaatatctgacgggagagagacaagtatttgggatgacccttgggttatccatggtacaaatttttaccctaagtccaattattgtgagcagcggggcttggagaaagtgtcaaatttacttttacctgatgaaaattgggacacacccaagctacacaacctttttgaccaggaaactgttagtaacatcttaagaagcggtaattcgagtggccagggaa

SEQ ID NO: 147400 - DNA, 508 bp, Cannabis sativa
gtcgttggctaaaagcaaagtcaagaatcataatattttgatgagtggggaaaatttagaatatatattatatatataaaataaaataaaagtaaagtaggtagtgagaatatattgacaataattagtaatttactaccaagaaatatattataaaatatagagagaaaaaaaataccaataaaaaatcgaggctaaaatcatgaataattcaaagttattaaagatggtgaaattgtcgacataaaaaaagtatgtatatgaaatattttgatgagtgaaagattaagaagaaatagatgatattaacaataattagtaatttacaaaaaatatattatagaatatagaaagtaagaaacactaatagaaaatcgatgcgttgatgttgtctattgatgttattgctactgtttattattcatccaggtactctaaacaaacaaacaaacaaaaaagatatgaaaaacatataagattagagaaagattgtacactaaaaataaaa

SEQ ID NO: 147401 - DNA, 530 bp, Cannabis sativa
aagtgttattgaattcaaaacgcccgaggaaaggtggtctggtaaaccacatgagctctcaaacttaagggtgtttggttgtagtgtatatgtgcaccaaagtattggcaagcttgaacctagagctataaaaggggtttttctagggtatcctgaaggagttaagggttatagaatctggttaagagaaaaaggggggttcaaaactattattagtagggatgttatatttaaagaaaatgaatttccttgtttacttaaaactaaccctgcaggtacattagatactaaccctgcaggtacaatacagtttgaccctattctatggagattggaggatcaagaagaacctgatataaatcaggtggaaccagctggaaatgaacctgatcaggattaggtggaacacactgagaactctaacagggaggaaccacagaatgaggagcaacagggagatgaaaatgaagttgttcaacccactgaagctctagatgattaccaactaactagagacagaactagaaggg

SEQ ID NO: 147402 - DNA, 591 bp, Cannabis sativa
aaatcatgttcaacttcatccctatcataccatctgaaactccaaactcaaaaacccatttaaactccaaattgacacataccctttgatagtgcacagaccactgcaacccaccctcgcctctatttgaatcgccaacatcacctagatctcacctcaaattgaagtctcacttagtctctagcctagattcgcgacatctccacctccacgactgagaagtacatacttacaattacagatggaggagtggatacaggaggagagagcaatcctttcttaatccaaaagtttattttcagaaatctttattaggaaaaagttaaaaaagaaaaagatatttcaaattaggtatttcagatacctttggaaaaacaaattaggtgttttagattaagtttctaattatttaggtttgagtttgttttctgtttgttctaattttttgtttttactaattaaaattgtaagttttatatttttttattttaagaaaaatatgttaatctcaagaaaaaaaaatataaaattttaggtttcagattttttcttttttcaattttaatgtttttaaaatattttaaatgattt

SEQ ID NO: 147403 - DNA, 691 bp, Cannabis sativa
atgcccatttctaacaatgggacccacaaataattaaattcataaataattatacaaatgtcagaaattagttttaattgcctttactaatctaaattactaaagcggtcactacatctaaataattataatgcacacaatcataaaaaaattagaataaataactctcttggataccaaaataaatagaaagtctaccgaaacatttctttagaagaatgcattatacacatagagtactcccaacagtttatctactctattctttaaaatacttcatcaaaactctattttttccattttacctcacatatttacactatattatacatcaatttccctatatttatccctatatcatttaaatattatatttttacatatattatattaataaaaataaaaaaaaatacacaaagaagtaagatgaagaataaaaaattaattaatgaaatgaagagtgaaagaaaatataaaatctgtttaactttccagagaaaaatttgttgaagtttgagatgtgatataataagggtttaaagaatttaatagagctcatttattttagttttaagttttatacctcactctaaccctttagttccaagtaattacaataatgtacacaacatttataccgttatcgaaattccattaaaatttaattacaagtaaaaaaaaaaaaaaaaaa

SEQ ID NO: 147404 - DNA, 570 bp, Cannabis sativa
actcacgggtgcttcatggtgcaggtaaggaagttagaagttgtgttcggccatgagtcagaagtctcccagtaatgtacatatcagtcttggtgtcttggcttccaagaagcgggatcgacttcttttatttatgagtgaaaatgtaactttacttttgtaatatcagttttccaattgttataatgaaattatataaacaggggatccccataatttagtattattttaaaaagaaaatttatatgtatgttttaaattatcaaattttaattaaactacactttttctaaactaatatattagtaagaaataaatttgtaaagcacatacgtgacgttcctgaggaatagggtgttacaaaatgcatacattatgtctgctcctgtagcagttagatagaataggctgtcgattagacttcaaatttttgatccatcaactttcagtgagccatcttccttttggagagctttattgttgtctaatggagttgatacagttttgcattcctccattttgaatttcttcaatagtgtcttcgtatacttcttttgtgagatgaagatc

SEQ ID NO: 147405 - DNA, 735 bp, Cannabis sativa
cctcatactataaggaatgttattcgaccaatgagaagatagagaaaaaaaattgtacccaaattttattatttagcatgtacgtgattattattttacaacaaacagacccacgtgattcaaaccattttattactccatttcttcaacaaagaggactatttaacgatttcacatagaattgaaaaaacaaatgtagtgttcggtaactattaaaaaatcaatttttttgattaattaatcaaaaatcataaaaaaaaactagaaaattttgttaagtaatatttaaaaaaataaaaaacaaaatggttcccgaaaagaaccaaaaaaaaaaaattgtcaatgactggtttaaatgcaatttaaattaacttttttaaaaaataataataattcaaattaaatattaataaaaattttaattattaatattattttattttttaaataaaaatataattaaatattattataatatttataatgttttaattgtgtacatgcgctcttatcgtaagagtatacaccttatatcttaataaccacgatctaaaattaatagtcaaaaaaacttccctcttagtaggaaacttatgcttagtcgacctaccatagtcttgcccttataagatatgtatatgatagggatcattgttttgttcctttcataggggtgtttttgtagccatagatcataaatttaacggtgatagataaaaaagtgtataataccat

SEQ ID NO: 147406 - DNA, 589 bp, Cannabis sativa
gaaggccaaaactttatcaaaagccggccgggctactcttattaaatcggtgggcttgtccatgcctatctatgccatgcaaacgaccaaattgtctaatcgccttgtgaatcgaattgatggtctaattcgtgacttctggtggggttttgagaaaggaaaccatggccttcatcttagagcctgggacaaaatttgccttcccaaatcgttgggaggactaggttttcggaaaacgagggaaatgaatcttgcctttttggcgaagtggggctggaacttattaactggaaagcaatcgttatgctctaagattctgaaggccaagtattgagggggagagagtttctcaactgcagttataaagattctgactcctggttttggaagaatgtagttaaagcaagcacaatccttcggaaaggagcgtgtaaaagggtggcagatggaagagatactagtatctggagggatccttggatccctcacttgaaaggtttcgttccgaaaccaaaagaaggggtggtgcaggataacaattttgttgctgatctcttgacacccgggggtgggtgggatatgggaaagc

SEQ ID NO: 147407 - DNA, 1647 bp, Cannabis sativa
  modified_base (43)..(71): a, c, t, g, unknown or other
  modified_base (1388)..(1389): a, c, t, g, unknown or other
gtgtttatttcattgtttaagaaattcatattaggatgttaannnnnnnnnnnnnnnnnnnnnnnnnnnnntggtaaaataattccaacagattatgcctagactggcaatgttgtcaccagtgaagccgtaaagatttaccatacaaggcttcaatttggctttttcgagccccatcttcctcagtgtttccttataaaggatgttaactaagcttccgttgtctattaacaccctctttatccttttattgtcgatttgaatggtaattacaaatggatcgacgtgaggatatcttaagtttttctcgtccttctctctgaatatgattggaggttcttcagttttcacctttttggaaggttcctgggcgaatgccgactgctcgttctttacctctttcacatatcttttttgggcattattgctctcccttgcgatatgcggccctccctaaataatcaggatgtcccctccttcaacaagaagaggttgtagcccctggttgtttgggttgttgggcagactgggctagttgtgtccattgccctgtctcttcacatattgtttgaagtggcctcgagcgacgacactttctatctcatctttcaactagcagcattcatcggtcatgtgcccaatgtccttatggtatttacaatacctgttaggatctattttgttccttgcatgcctcatgggctcaggcttaccgaaggcaaccttttgctcatgtgagaggtaaatattctcctgagtttcattaagctcagtgtaaattgtatacactggcacgtacttgtcatgtttcttctgtttctttttatcctttaacgattccttaaaatcgtcctttctcttcgagccagaagcccccgagttatcaattctcattgagatagtacttgttggaacactgttgggtttgcctcccgagcttgtttttaacaagttcatttctttttgggcttcctattttcgaacgaacacctgagccctttcattgaactcagtgatattcttcactagacgaccttgtaagtcgtcccagtgctcgcccccaacggttgatggatcagttgagatccccgcctgaagggttgtaagttgtgttctatcatccaaatttctaacccttgcagcagctgtgctaaaacaacttaagtatgccttaagtgtctcgttgggttgttgctttatattggttagtgaggccgccttgggtcgtctatcccttacaacttggaattgttttttgaaatctttggacagatgttcccaagaagttatggaatggtgagtaaacttattgaaccagctgcttgctgctccaactagtgaggtgggaaacaagatacaacgtaaattgtttgtcacattactagctnncattattgtgttgaagttgttcaaatgcgaaaccggatcggtggttccatcatacgatgagacatgtgggttcttaaatccaagggaaaaggagtattcatgatatttgggtagtacggctcgagctcctcgtctaagtcgtatcgagattgtctcccaaattcccccacttgatatctcctaaacttgtcctccaactcatctattcgcaattggatagaatcctcttgttatggaccgagttgttggcgaagatca

SEQ ID NO: 147408 - DNA, 730 bp, Cannabis sativa
acaacttagcaggatccaaataccgattttggagctcctgaagttaacctgggcgcagggctacagacccttcccaaagttgactactatgatttgggacacttaattccatgattgtttttcttcttgtcacatgtcaaatattgatgtccacatcatcatgatcagtttttgggtaaacataagcactacacatcagatgctttcaaatagagattctctaaaatatttaaagaactaagagtacttacattagtttctctactctattctttaaaaaacttcactaaaattttacttatttattttaccttaaacttttacattacaccatacattagcttctttattttttctcaacattcatttaaaatattatttttaacatataaaatacacaataataaataatgaataaaatatcgattaaatattatttgaagaatgaaaccacagtagcatttttaaaatctgagctaaagtagctcatttattgaagctcattttttgttatttattcacatttctcttctttattttgaggaaaagcacactataactcgtctaatgtgagtgctgtaaactaaaaacacgctatattatatgttttaaactcttattaagatcttttaaaatatattatttatgttttatatttataaaatattatttattttttaaatatattttattaattgttaaagattttattttattttttttaggctaa

SEQ ID NO: 147409 - DNA, 612 bp, Cannabis sativa
agtacgacaggtgtacttggacctaactgggaaggaccatatcaagttgtcgaagtcctcaatttcggagcatacaaattaggtaagtatgacgaaaaaatgcaactcgttctagtaccacggattcggaatggggaacatttaaagaaatactaccaataaagtaccaggtcgaacgaccacattaagtactgaatgaacatttactcctaagtaaatggcctactgggcgaactacgctcaagggttttgacaaaggaaacaaagtactcaggtcaggtgaccaccatttaaagtacagtttcttatttctgcaatttttttatttcttgttaagctaaaagatcatattggatcaaatagctctgatgtaagttactacggtaacaaacacatttttcgatcagtaaatgaataaagatagttatttcaaaattcaaattgagtcgaaagtatcagcatgtttctaatttaccatccagtgcgtacaaaaggtttcgtcgaaccaaaaacatcgaacagataaaaaatatacttgtaaaaagcaagtgaccaagagtcataagtctgctcgatcagttggggggcacctatacctgtacaaagcatttg

SEQ ID NO: 147410 - DNA, 952 bp, Cannabis sativa
  modified_base (123)..(126): a, c, t, g, unknown or other
  modified_base (677)..(684): a, c, t, g, unknown or other
aggcgaggatgaagatgtggatcctcgacttggggagacacgcagcaatgttggacttgtggaagagttagaggagatcgagatcgatctagctatcccggccagaaagctaaaaattggaannnntttgttgctcgaagtaaaatcataattgataaaatttttgagagcaaacctggacattttttcctggtcacatgtggatatggtcggaatcgacgcttctattatttcacacgtcctgaatatcaatcctaacattcggcctgttcagcaaaaacaaagattgctcgataaagaacgagcagtagccctgaaagatgaagttgaaaagctgcgcaacaacaacaacttcataattgaagctttttacctggcttggctcgcgaaccccgtactcgtgcccaagctgaataagaaatggcgagtctgtatttatttcacagacctcaacaaagcatgccctaaagactattttctgcttccaaggatcgatcagctcgtagatgcaacagcctggcacgaaatattaagcttcatggtgtcttattcgcgctacaatcagaccaaaatgtatctgccagaccgagaacatacaagtttccgaacagacatgggtctctacttctacaaagtcatgccgtttggtctaaaaaaatgccggagctacataccannnnnnnntcaacaagatgtttaaagaccagatcggcaggaatatggaagtgtacgtggatgacatgctcgtcaaatccagcaaggctggggggcacatagaggacctggaagaatgtttcaaagtcctcaggaaatacaacatgaaattaaatttgttaaaatgctcctttgcagtcagcttgggaaattttctaggcttcatcgtcaatgcccgaggaattgaagccaatccagaaaaaatccaagcccacctggatatgaactcgccaacaaa

SEQ ID NO: 147411 - DNA, 539 bp, Cannabis sativa
gaaccgctctggtttagtttacccgtgaatccactggctatcttcactaaggacattcaaaagcagcaagtattttgctcaaacccatttggatgactttcttccaactttgtcaaaaataaatcatgctattatttaaactaattacaaaagaaaatgaaaagaaaaatatcaaataaaaataccaaatcatcttcacttttttacataattaaacataaataacattattttaggttcaatagtaatgacatgtacaataatatattttttgaaaattcgaacaaattatgaataataaaagggaaatttgatttttttatgcatgttttaaggcataattggttaggagaacaaaaagtatgggtaacttttaaaataggaccattttacgtaaattccaaaaatacccctctcaaaatcccaaaccatttctctctcctttcttcaaactcactctgtctctttgcctcttcgcccgaaaccccatcgcaggaaacccaccaaccattccgaccgtcaccacgcacaccggactt

SEQ ID NO: 147412 - DNA, 880 bp, Cannabis sativa
  modified_base (398)..(399): a, c, t, g, unknown or other
ccagcgcttaaatgtgctggtaaaagttagattttagccactgcaaatatacgctggtaaaactttgacctctttgccagcgcagtttgcaaaatgcgctattaaaaattatttttaccagcgcagtagcgaactagtagaagtcacatttcttgtagtgattatgacgattttatattttgtaaaagttactaattggatacagctctattttattaaatgacaaaatggatttatatttttcaaaatagtgaaaagaggatatcctgagctcaatttttaatatttttattttttttaatataactaacattaagataatttctaagacgaacagatacaaaaaatatacttaattttatcataacctctctagatcggattattattaagttttnntttgacaaaaaatcagttcatgattttatttgtataattttaaaaaatacataatctattttgtcattgaataaaataaaaaatccaattaataacttttgtaaaaataaagtcgaaaataatatttagaatataattaaatttggaatattagaatatgaatttcgtgtggaaggcacgatgtagtcacgcatgggttaattaaactaagaagataaattccactttcgcgtggaaaccacaaatgctacccctctcgactacatacaatacatatatatatttatatatttatatcaaaaccctaaataattacatatatatatatataaatcaaataccccactctcttcactacacatatatatactaggtgattgttacgtgccaagtcacgtagtgttagttttatttaatattttagttttttattttaattaataattaaaatagtataattatttgaatgatttgttttata

SEQ ID NO: 147413 - DNA, 741 bp, Cannabis sativa
ttatattccttgaattttgattcatattagattttatttactaaaattaaacaaaaatccttaaatcaacaatcttactaattcagaggaatttttaacggtcttaaaagtttaaagggtatgatttggtacatataaaagtttaacggttaaaaatcctaattaagattagaatatcaaaagtaaactaagaatataattccccataatttgggtacattttttttttgtccaatgaatacattacaaacctttaattttaaattttaattgatctttcctactacaaaaagtattatttccatcagtctcattaaattaatttcttcgaggactgtcgctaataaaagtaagtgagtgtttacaaccgttgactatatttgaatattcttgacagtttaaaacagctaccaaattaaaacgggacacttttaaaagggaatatataggcgacagttataaaatattggctatactatacccgacggtttaaaactatcgactgtagtatagccgacattttatactcgtcgtctatttcttattctcgtgctatatgaaactcaaaaaatctcaaatttgatatttaattctttctagtcttggtctctctgattcctctctctcattcttctctttctcccttgttaattccatttttagcatatttaattgacaaaaatattttattattctttgtatattttggctggcatatattgatatggtttccctatttgt

SEQ ID NO: 147414 - DNA, 806 bp, Cannabis sativa
atgtgtacacttatatacatatggtatgtgtttattggtcgaagtaattttaattatttaaacattataaaaattatttaaaaattaaaaattaaaattaagtaataaaaaaattacaaatgaatagtacaaactaaaaaaaattgaaaccctatcttttcttcattcttcgttactctctctctatctatccaatatacccttttttttggactatttaaggaaaaaagttgaattgaatgtcacgtggcataaataataaattctcgtaacaaatacattgtgagacaggtcgaaaaaaactcaggactcaacctgtgagatgacctcatttaaataagaatcacaaggtttgtgaaatgaggtatttcagcgttgttgggatgttatttttgtaaaacattcaacatctcgtaatacaaagatctagcatcttctcatattacacaacagtgatctatcacctcgtatacacagtcagtgatgcatcacctcgtaatacacaagagttatgaatcacctcgtaatacacagctagtgatgaatcaccttgtaatacataatagtgatgaatcacctcgtaatacacagacattgatgaattacctcgtaatacacagacattgatgaatcacttcgtaatacacaatcagtgatatcttgtaatacacagcagtgatgaatcacatcgtaatacacagccagtgataataacctcgtaatacatatcagtgatgaatcacctcgtaatatacggtcagtgatgaatcaccttgtaatacactgttggaaataattttaccagg

SEQ ID NO: 147415 - DNA, 1142 bp, Cannabis sativa
  modified_base (533)..(535): a, c, t, g, unknown or other
  modified_base (694)..(702): a, c, t, g, unknown or other
ttttacagaactcaatttcgatgatatttgaattaattatgaatttttgaaaatcagaaaaatcgggaggtggtgtcaccccacgtgcgcgcgcggacacgagtgatcacaccgtgtgcacgtgcattaggatagaggttttctaaagtttctcggctgtcccctgtctgaacacctctgtgtgcacatggaaatgttgcatgcaacatctatgtgcggcattcctcgcccaggtcacctagcacgcgcgcgcggatggttatctatctttttgcactgcataccatccgccccaaatgcaatttttttttttcaattttttcatttttcatggaattaatttcgaattttttgtttaattttgtatgtagatttttatttttcatattttaaatctaattatcagaattaaattaattgtttttttaattaatttaagatattagtagtttttaaaccttgaaaatagataaaaatctatcttttttcttagttggtaatcttatttctaaaatttgattattttatcttannnttaaatttaaggtcatatattttatattttagattatttaattaattttataaactgaccttatttgaaatttaaaataagattattttaacctagaaattttaaaatataacccagatattttgctaactttcaaattttgttattttatttaaattnnnnnnnnnaattagataaatgatatttatttaacattttattttattgaatatttaattttattttaataacatgaaatttgaaaaggttttagcatcttttttgaatagatatataggtttgttaaaaatctaattttttaaatttataggtttaattttgaaattaattatttaattcaaatttaatatttttgaaaataatatttattatttagatttttcgaaaattatttaattatttaattaattctaattaaataaatcctatatccaactatccaatttgttgcatgtgtgtgtttatatactctttaattattaaacttgattttataaaacctattattgtttgaactaaatttccatggttaacttgttgacatctccaatgatctgtttttaaccaatggttcaattgtcattaggtcaaataaataatttgtaac

SEQ ID NO: 147416 - DNA, 558 bp, Cannabis sativa
ctctctcactccatggaacaatttcagagcatataatgtaaaaatgattattttttttaattaaataaaaaaattgagcataaaatctcaaaattcttaataaaagttctctttctacttctttttcattttgcactaccattttattattttaaataattaggccttacctacaaaattggctttttttttatgtaataatataaaggattagtttgggcgctagggaaaaataactgcagcagaaaaaagttcagctgagtaaattttaatgtgctgcaagttgttaagattctataataataatattttaatctatttcattaaaatcacaaatatatataatatgttatataaaatttttattgtttatatatttttaattatgtttttatagtataaattcatatgcatttgacaaaaataatttttaatattattaattatatttttatcaattgtaaaaaaaattctgaaatttaatattattaataaaaatataaatataaaatattttttaaaacaaaataaaaaattagaaatttaaatattatttat

SEQ ID NO: 147417 - DNA, 593 bp, Cannabis sativa
ttttaaatttattttatgtataatcttaaaatatatatttattaaaaaaaatctatatggagaacttaaaagaatttttttttttttaaaaaaaaactcatcataaaatttttatatacaaaataaaactcacaaaaaatcttcaaatgtatattacagtgaagaaaaattgaaaattaaataatactcacaaaatattaatctaaaacaaaagaagaccataaacttatagaaaactaatcacataatttccaaataactgtcatcaacatatctcacttatagtcactattacattttgttatcccaaaattggcactcttacgtggcatcacaagaatggtgacacgtggcatcaacttagggcacctggtcagatgaacatgccgtgcaggatgcctcgctggcgtatccatgatggaatactcaaccaagcacttcgtgagtcaccagctcaatccttataactcagggatcaacttgtgtgggtgtggcatgcacacgattccactatcggtgtatacaacctcaatcccacgatcctagcattcagcaatgatcacacgatctttgtgtttatgcgctttgtaacg

SEQ ID NO: 147418 - DNA, 612 bp, Cannabis sativa
aataacacaaaataactcaaacaagttataattaaaatataaccagatctgtaccatcagtggcggaaccagcccttagtcttaggaggggcctaaatatgttgattttttttaccataagggtaaagattttttgtttttttttttagcacaaatatgaagaatttagtacattgatacatagagcatagagtaaatttatagtataccccttaaggggttgtatttgttttagcattcaggaaaattttaagttaaatatttttttcatgatcgcgtacattacaactatataggattatctataaatttttagaaaatttcaaatagtatatagtataaaaaataaggctcaaatatttagttacgtacacgactattttttcttatacgtgtggtaaacaactgtttgagctttatttttggtactgtaaattatttaaatttttctgaaaaatttaataattacatcgtatgcgattatgaaaaaaaaaatggactaaatttttttgggtgattctacaatgcacccccttaaaaagagtgcactgatgcactcttacctttttcgtcatttagaaaaaaaaattagtctaatttttttttcatgat

SEQ ID NO: 147419 - DNA, 1193 bp, Cannabis sativa
tctctctctctctctctcgttccttagagaaccagcaacatttggagttcttcagctggtttttgtggattatatcttgttcttggtggatcttttgacggtaacccaccttagtaccttttctcttagttttttatacttaaagtaaaagagttttatttgaaattttgaattagggttctaaagtttttagagttgtttgtttgggttttttgatgttattttatgattggttgagctcatttgaagttaattggtggcttgaaatggttgttagacaaagtttgagattcgaactcaaactttggtccttaatggcaatttttaatctgagcttgtgtggttgtgttattgcttgaaatatgtttattggggtataatatacaggtctagagggtttggtaaggtttggagtcgaattggttaggttttcaaaattcttaggttacctagtgtaaaaccggttaaccagttttacaggcctggtaaaaccggttaatcagatcaaaaaccagtttcgtgcacttttcatgttttcaattcgtgttagttttagagctttggttggttaattccctcttagtttagggtattgccatgttaactttcagtaggtaaacttttggtttaaaacctaagtccccggtggtgatttagcgtgtcacttatccatgttatgaacgatgtgatttaggggcctgtaattcgccgagcagttgttccactaaggttgggtgccacacctaaattcagaaacgagataagattagtataatgatatgcatatgttgatacatgtttagcgtgcatgttagttgccgtcagaataacatatcagggcattagtgaggtatacatagagttgcaccgggataccaacagatatatgttaggcaaatctatagccatcagattagcatatcaaggaattggtgaggtgtacatagagttgcaccgatatgcatacaaatatatgctaggctatcagatagtatgagttatctactgccacatcagtacgactagagtactgagtataggctggattcgcagttagttattctttgttgagaacgttcctgactcagctagggttattattgggtgtatgggtgcttgattataatctgaattattgctatgatattatttatgcttttcttaccgagtctgttgactcacaattgctattt

SEQ ID NO: 147420 - DNA, 594 bp, Cannabis sativa
tattgtaatacaattaataatgttatgaattgattaatattgagattgagatatggttaatattgttatataaagaaaagattgattggttaagcaatgataacataatgatactatgaatgggtgatgcgatactcctggtgacgtaccgagcgtaggtacgggcatcagtgacatatgagtaccgagcatagatacaggctcacctaattaggtgatgtgatactcttggtgacgtatcgtgcgtaggtacgggcattagtgacatatgagtaccgagcgtaggtacaggctcacctgattaggtgatgcgatacccttggcgagatgtaaatacgagcatcagtgatatgaaaattgccaggttatggcatagattgaaacagttgtagggtttcttgctaggttatgacatagaatgaaattgcatgttgttgggtttcctgccagattatggcatagaataaaactatagtagggtttcttcctggcgacgtaccagacgtaggtatgggcgttagtgacatatgagtaccgagcgtaggtacgggctcacctgagtaggtgatgcaacaagatgcgacaaaggaggtc

SEQ ID NO: 147421 - DNA, 672 bp, Cannabis sativa
  modified_base (41)..(55): a, c, t, g, unknown or other
  modified_base (564)..(574): a, c, t, g, unknown or other
gggtttcggctatgctataggaaaatctcacatttctgatnnnnnnnnnnnnnnntgaaatgtggcacggaccaatctcagaatattttttaccactagtcacaatgaatatgtactgctaagacgtaaatataaagattgattttgcgttaaaatggcccccttattcaaacattgaaaatattcttcttttcagggtaaagtttaactagttttttccttattcttacactcgttagtggtctgttaaaatctcaccctacacatctccaaaaatcataaaatttcagggagaagaagcaaagaccgttgtacatctttttactattggacacttttaaagaaaaagtagttttcatgcactaacaatcatttaaattgaaatagttaaaatcgcacatttttgatagttgtacccctttgtgaaatgttacccggacccatctcggaatattttttgacactagtcacaatgattttgtactacgaagatgtgaatatgaagattggttttgtgttaaaattggttaaaatgaccacctaattcaaaaattgaaaatattnnnnnnnnnnnggtaaattttaacaagttttttcgttactcttaaactcgttagtgttctattaaaatctcaacctacacatctcaaaaaatcttgaaatttcacgggg

SEQ ID NO: 147422 - DNA, 633 bp, Cannabis sativa
atatccgcactttgcggattagattggattggatcgtgcagattggattggatcggctattttataaacacccctaattttagtgttaaagatggattttgttagatttacgaatagatttaagttttagaatatcagatctgtgataatcgggccaaagtcgctctgtcgagccaggggcccggcccccgaaaatagcccaaattgccattcctagtggcttggcctcaattgacattcaaaaaaaaaaaaaaaaagatttgactaaccttagcggaagtggagaaaattatatgatattccgtacaaaaaacaaatatttagtaatttttttaagctgctaattattaaattttatttagaaatttttacattaaaaatacaaaatgctaactttattaccaaaataccactacacagttacctgaacatttatacactttttctttaactttttacatttttaccacatgcacacacaatacatgcttttgacacgtgagtgattgatgtattatatcaatctttctatacatgatttctctcattttttttctcttttctttttccttttatttttcatttcttttccgtttttttttttaaaaaaaaaaaatatttacctccatagct

SEQ ID NO: 147423 - DNA, 574 bp, Cannabis sativa
gcctcttgaccccgccatgcagtacacacatgaccagctgaattatcttattcagcagaacattcacatgcaaacctatatggtgcagaggagtgtctttgacgagaatcaagtacagcagctgaattcactgatcacaaggatgaatgttgggattgaggagcctaattacttggcgaatccaccccgtttttatccttatgaccagccgcctccacgaaaccccttttgatgggggttcagggtaagtctctctcacctagaatattatctcacattggggacaatgtgcatctttagttggggggaggatttaaatttttcagtttatgtttagtttagtttagcttttgtttaaatttcatgtgttgataattgagccgaattattgattgaactactgttgtttatgtgtgcaatgcattgaaatttaaaccgtgtgcttgattcataaatctttttgaaatgaattggatgccttgtaaaagaaagaggattttttatatagatgtgaagtattgatttttggatagtatcacttttattctacttgggtttgtggaatgtttgcttg

SEQ ID NO: 147424 - DNA, 627 bp, Cannabis sativa
ataatttcacatatattaaattatataataatataatttcctcaattatacataattatctagttagggttttgctaatccttttcttaatcccgtgtattacactcatgaaataagaataaccttgactctctcctaccggcgcaacattggatttttattttgatcgaataaaaggttgttaaaatggtgtccattttagatgagctgacaagtctattcaacaaattatgtcattaattctcacctactaggacactgtatgtcattgagttgaaaaccttagaatttatttaggatatgtttgttttgtattttaccatgtcattcctacttgctaaatgtttaataatttctgaatatgtgtatgattttgcattgaaccttatttaatatgtatttaatgacatttgtagtttccttatgactatgaacaaccctattatataactgttgactgacaacaagctctctagagctaactttgctaaattgagggagaatattaatattgctcctataggtaaaaattcactgtttatgttaactgaagaagctcctgagcaaccaggtgagaatgcaaccaagatagttaaggaaaagtttgagcgttggcaaaatgctaac

SEQ ID NO: 147425 - DNA, 577 bp, Cannabis sativa
ataacattttcaatttgataatagtttttatttaaaaaataattagaacatcattaatattatagatatgataataggtataatgtaatatgcatgtcaactgttttggtattctgtttgtgatttttgtgtaggtgatataaatttgggaatgctcaattgtaaagtgtcatgttgtcgaattttcggtagcataacattttcaatttgattgtaggttatatttaaaaaataactagaacatcactaatattatagatatgataataggataaatttaaagaattagttgatagttcattaattattataaaaatattggtaataggttatttttgaaaaataattacaacatcactaagtaaatttaaattaaaaattgataatttaattagttaagatttcgattgtaacacaaattcatttaaataacttggtaattttaaaatgtcacaaatttacttattagttaataataattaaaaactttattaagttaaaaattgataaattaaaaacttattaattaatttgaaaattttcatttatattagttataatgttacataaattgtta

SEQ ID NO: 147426 - DNA, 831 bp, Cannabis sativa
ataggcatacaagatggttgtacaaactcgtagaggccttgctgatcagggcaatctgatggtgatagatcccaacatgtagtcccttggaaacacgagaggaccaccagggacaaaccctgagcaggtcaacaaacaaccacctactgtgggccatggagtgacttcccctctggttaggatcacaccaggcgtgcaagagactgggaataccagttcagcatctgattaatccactccaacactgaggtcccatttaccactaatgttcacaggccagttggagacgataataaaatccaaaacctccgagcagcccttgggctcatgcaaggtcataataacactttgcaccatgattaagaggatcttcgtgcagctataaaccttgcattcgacgagcaaaaacgtcagtttaaagaatggatggacagggagatagaaactttgagggatcagcaggcagccattgatgatcgcataaggtaggccactgtactaataagaagggcctaccaagtcgccaattaacaaccggctactacgtccagtatccctttgggcagtttggaaggatgtgcagttgggcgtactgcacaaacccacaatggtcagtcgtccaatccacggccacaagtccaacatgtggcccaaatggtagacggccagatcctgttggactatcccttgggtggagttatacacactaacttcaccccaactaaaatttctggtcaacctgccggccaaacaagtcaaaagccaaggccacctggtacttcagtattcgataggttggacgctgcacatgacctcaagactgacctaaat

SEQ ID NO: 147427 - DNA, 701 bp, Cannabis sativa
tctcgcaaggtatatatataattttttacagtgtatttgcagctaaatctctcgaactctcaattcatttgcgattaaccctttaacctcaaattttgatagaaaaccctttaaagcactatacttttatatttaccattatgtcatttataatattttattatttaatttttattaacatgctcatttgcattaatgacttgtattattattattttattattaaattttatatttatttttgtattattattattattatatattcttaataaattattaagtgaacattaaatgacatattaaattttgtatcaagatttacaattatgcattagagcacatcagtaaaagttgatttgaaaatgtcacaaaactactttttggtgtaaatataactcaacttttacatattcccaatctatctcaacagtccttttgagatttgttgagacaggtcaatttctcgacatgttttgaccacactaagattgtatgtccaatctcgacgggcctaacaagatcaatatcgttcaaaatgacaattaattaatttaattagagtaattaattttttatatgatgataactgatatgtctatatattttctaaaataatattattttttttatgtatatagtttgagcaacagagaaatcacataccatctacagttgattgttacatgaaacaatatgga

SEQ ID NO: 147428 - DNA, 511 bp, Cannabis sativa
tcactatgaaaagtaattcttccaataggaatttaatagaaaaggaaatacaaaaatatatatggattgactcaattgagatatacgtgacccccttacatagagaaaaaaaaaaagactcaaatgtaataacgttaaaaaaacaaaaaaaaattaaaaatcaagcttttatttatttaattatttgagaaaagttcagttgatttataggaaagttattggtttaatttgtatttctattttctaaattaattaattatatgtcactgaatcggttctatgtatataaaaccatattgaaggtttcctctcatatattttctggatataaaaaaggtaatctgaatatattgaaaacttttacataggaatagtcaattgaaaagaaagtaagatacaatttgagggagggataagaataggaatatataagaataaaatatttaaatatgataaaaaattattatatatttttttatttttgaaatgaataaaaaattattttgttcca

SEQ ID NO: 147429 - DNA, 1046 bp, Cannabis sativa
  modified_base (28)..(31): a, c, t, g, unknown or other
  modified_base (970)..(986): a, c, t, g, unknown or other
aaattttgagaaattcggaataatttannnnatagaaaacaatgttcaaacagtatattttacatgcgtgcaacacactacttgaaagcaatttttgacatgttaaacttttctaaaattcttaaaattttgtaggatgttttaaataactataatttacatgaccataagaaaaaatttaactaaaaaattatttcggatactaaaaaattcttaaaagtgcattatagaattttcctattatattatacagataactaattagtttacaaaataataaaaaatatatgtatataaatagaagtttgttatattacatacctcattagtttcgaaaataatttttaagattacctaaatgtattttaaattataagttaccataatataatttaaaataactaattgattgctaagatatatacaaataagttttggagtcaattaaaatatatttcaaattatatgatataaaattgatttttttttttttatgtaaaggtaacgatagtttattagtagtagccaaaacatttatttttataaaaatacagaaaaatacaaaaaaaaaaaattaaataaataaaaaacgtcaaatatgtcaaatttcgctgacataacatgtcaataatagtagtaaaataattagataaaaaatatatatattattctaaactcccctaatttttataatatatataaatatacatatatttttctagatgtatagtattttttttttttttgaaaggagatgtatagtattaagataatgttgttgttaactttttaacccaccatatctctctacacataaccccacctatcaactttaaaagcgattgtgagtttcttcttttgagttgaacaattttctaccttcagtatattaattgggtcgtgctataaattatatacaatatatcttaaattaataaaatgatttgatatatacagtagaacctctatnnnnnnnnnnnnnnnnnaagaataacctctaatttgttatacaaaaatcaagtcccaatttgggccagttataaata

SEQ ID NO: 147430 - DNA, 562 bp, Cannabis sativa
ttaaacaaagtaaggatattctaattaaccaagtttcaattatttgatgagatttttattttgaaaaataaaataaaagataagtaataaaaaaaattaagatttaagatgagtgaggatgaaaatgatttccaaataagatgtgtaaaataagattattaagatattagaatccataaaatgcatgttcaatagtatttataagtatattgattccctagtttatatatagttgaaataaataacaatatattttccaaaatatattttctatttaatcacaagttatttcaaaaaggtagaatttttcacatgtataatttttaagcattaaacatgttacaatttaatgcaactatacaaaagtaaagaaactatgtgtaggcaaaatataacacttatgaattagatgcaaataatttaatggaagatatttgatcaaagaatattgtattgcataatgaagaactaagtggaaatatactttaacaataaaaaatacatgatattgaagatgaaaatgacatattttttttatagaaaaattcatgaactttgtagc

SEQ ID NO: 147431 - DNA, 686 bp, Cannabis sativa
aatggaattgctgaaagaaggaattgcacacttcttgatatgtgcctagcaagtcggttccaaagacgccacgagctgtggtcaggcaagaaaccaagtttgcgtcattttcacggtttggggatacaaaactaaggtaaggtcatataaccctaaatctaagaagctggatacgaagactatcagtgggagttttgtaggctacactattggttcaagagattctaggttctattgtccctttcacaccaccagggtgatggaatcagactgagctgtctattttgaggatgaatttggttcaagtcaagggtcaagagaaattgtattcaggaaagagcgtgtctatgcccctatacctgttgcttccgcttccgcttctaatcctactaatgatcctgtgattgaacaagttccaatagaagctcatggtgaaccttaagatccagtacaagatgaaaatcttgatttaggggactatgaggttgtggtgagaagatcacaaagagcctgtaggcctgctattcctaatgactatcttgtctacatgcaggaacgtgagtttaatgtgggagatgattctgagtcagccagttaccaaaaagcagtgaatagtcctaaatctgcattgtgggtggatgcaatgaaagaagaattgagttctatgtcacaaaataaagtttggg

SEQ ID NO: 147432 - DNA, 607 bp, Cannabis sativa
agattgaggcagcagggtcctcctgccatgcctcctcaacaagttacttaggccgtagcagttccagcggtgccagtagaacaacctattgttggtaaccgtatggagccgttgtatgaaaggttccagaagcaggcacctccagtgtttctagggggtcccgatgtaatgaaggctgagcagtggctcacagtgattaagcgtatccttaattttatgggagtggttggtaatgatcgagtgcctgcgccactttctagtttcaggaggacgctctcgtgtggtgggagttgataaccctcacacgggacgtcacggttatgacctgggcagagtttaaggagttgtttaactccaagtattacaatgaagctgttcgcagtgcaaagcggaaagagttcaccgaactggttcaaaccgagggaatgtctgttactgagtatacgacaaagtttgaccgtctggctaaactcgctgcgagaatcgtgccaactgactttagccaaaaacaaaaatatttggccggtttgagtgcgaagattaggcacgatttggtgatcactactaccgaagcaaccacatatgctgaaatggttgaaaaggcttt

SEQ ID NO: 147433 - DNA, 924 bp, Cannabis sativa
  modified_base (52)..(62): a, c, t, g, unknown or other
acaaatgccatattttctaatttcaatcctttaaatgccaaaactatttatnnnnnnnnnnnaattaattatcaaataaaattgttatttaatttatagtggtatcaatttctatagtgggaaacactggaacacatacaatcaagaataaattctaatagtttgttagttcgtttattatatcaatgtctaatcaaaatatgtgtgacatagagatactgtagtgtattgagtatagtctggagttcaaagttaaaagtgtttaaactacatgtatcaataacttcttccacccctaagtgttatagagattctgtgtagttttgaatataatctagagttcaatagatataaagatctttgaaccatatattgtttcttaacttcttccacccatatcaaatcaaaagatctttttattaaataaaatcttaataattgcttgagaaataacaattattcataaacattgaatttaatttctaagtgtttatgtggtattatctctttgtagagattattattataccatatattttgtatcatcaacaataataaaacacaaaacacataaaacatgataaacatttaaatataatatggtattggcatacaagttaaagaaaataaagctcaatttcatatataaaagcaattcataatgaaatcctcttaaagaaatttttttataaatactctcaaaaatatcacaatgaattgtctgcaaaatatgaaatagggaataaaatctcatactaataattgaaactaaattgttcgaaaactaaaacaattaattcaaaaattaaggaggataatgagcttcatcttcaacttggacaatctctacccttctgtccaaccgtccgactcaacttgctaggataacaatccaagtttaagcaactggagttgaaataagaa

SEQ ID NO: 147434 - DNA, 521 bp, Cannabis sativa
aaaacataaaaataggtatttataaaaattcctcttttatttatatatttactaggtttttatatttttaataaaaatttaatgtttttatttattgttttttttttcacttttctataaaaaaaaaaatatattatttttaactttaatgcattgaaatactattgtaaaattttagttaaatataaaattaactctttttttatacaaatttagttcaaagtatacaacatttaaatgcatagaatattgtaatggcattatattaactagcctacttttctttgaatggaagtatattagtagtagtagctaggtggagactagataagcatgcatttacaattttctaatgccaattatttattcattattgggttttttttttctcctaagcaaagttttcaagaaagtatctatctacttattgaatgcaaggtgtgtttggatatgaggtggtaattacatatgaattcctaatatcttgtttggtaaaatagttagtaattacatagaaaaat

SEQ ID NO: 147435 - DNA, 607 bp, Cannabis sativa
agaagaacgtcttgatttgcagtccttaatgacacattgtacaagcgttcattcgatgggatattgttgagatgtctctcgatagaagaagcggcacatgcaattcaagagactcgtgtcggtacatgtggcgcccatcaagccgacccaaaattgttggctcaattaaagcagttgggttactatttgcctactatggttcaagatgtgattaatttcactaaatgttgtaagtcatgccaattacataaagatttcatccaccaacccccttaaccattccattcttctatactgtcatgacctttcgaaatatggggaatggacgtcattggttcttttacgccaccctcttccaaagcccataaatatattttgaccatcacagattacttctccaaatgggccgaagccataccactaaagaaagtacgggcagaaggtgtcgctgattttataaggacccacataatttatcgatacatggttccttcaaaaattatctcaggcaatgccatttatttcaaatgtaaggcaatggtaaagttaatgaacaagtacaaattcaagcacagtttctcgactagttacaacccatcttcaaatg

SEQ ID NO: 147436 - DNA, 812 bp, Cannabis sativa
tttgtagcaccaatctcaactttctttctgagttcaataaattcaggatcattctgttggccaatctttatcctttccagtaaatcaaattgcagtgtaatatttgccaatttcctgaccactaactcaatcttggccctagtcatatcctcagccaatctaagagagatttgcttcaattcatagatctgccctggacctttttgttgggattttatgccctaaataaaatttatttcaatatgatcttatttgttattaattaaagattaaagtcatttcagttaacatgtaattttcatgattatggtttgatatacaatttctatctattaaatccaaaacatataattattcacaattacagtgatgtcaacacagtgggaggtaattgtgattaaatgtttcaaagcttatgtcccatgattaatcagtgcactggatttacagcgatgtgataatcagtgataaagtttacttacaccttggataattgttatgtctattccaggatattggtaaagtatgctagtgtcagatgtatggagtatacattggactgagccgatattaatcttggtaaaaatattatgaaacttaccactatatctttctaagtcaatatcaccaagtcaatcttaaatcaaaagatcttatcctgatatgttcaggttcgatatcaagagtgttatttatgttcttagaggtgtttgttaaaacataccaattggtttgggcaatgaaatacttcttgggaacatgatagtaaaattgagtgggagcgctaattatagcttctatctagacataga

SEQ ID NO: 147437 - DNA, 538 bp, Cannabis sativa
  modified_base (28)..(33): a, c, t, g, unknown or other
ttgaaatattttttttataatttttaannnnnnatattaggtgtactaatataaatgtgtcacgtgtataaaagtgtacacataaacagtccatatggacagttaactgtgaaaaatcaatattaccttaaatttattaacagtttaataatttaaagagttttattactattaaaatttgagcttaaaaaattaaatataaataaaataatacttgaaagggtttagcggtaaaaaaactcaaataattttttcttcacaatacaatgtattatgtaaagtaatatgacatttgtgctgaaaataacaagtgacaaccacaaatattgtcaatttaggcccataattgacttcactatatatgttactgtctttgctagtaaatgggctactagcagaaaaagagatgggccacttggcagatgttgaaagaaaggcccacttgtcattttattaaggcccacttgtcattttattgttggcagaaaataatagggaaatttacatggtatactaacttttgccatttttttacaaa

SEQ ID NO: 147438 - DNA, 1481 bp, Cannabis sativa
agttataatgttacataaattgttaatttaaagaaattagataattgaaaaaataattacagttgtgacaaaaaactatatttatcactaataggtgaaattccttaattaaataaagttttcatatattaattaaaaagactataattgaaatgaaaaaatttagaattaaaaataacattcaacattgaattaataataacattaataaaaatacataggtggtatgtaatatattataaaataacattgaatgaataataacattaataaaagtacataggtggtacataaaatagcataagacattataagatatcataagacattttaatatagcataaaacattataagttatcataagacattttaatatagcataaaaagaaatttttatcctgaattgatttctttggttataaaccaaagatatgatagaacaattttgtttgtattatcacatagtgataatttatttcacatagtggtacattctcaacaattataatgaagtggagaagtatatcacgtaagattacttttttatattcttagttctctttagttacgacattatctaatattttccccatttttcatgtagtgagcataggaacaagctataacttaggcgttatcaaaatcttgagacaattcaagagaatgagtttcttagttggtttaagtctcgagtaagtattgctttctacttattttgttattaaaatactgtgtattaatctagcatcaatgattaaattatttttcttcatgatagatcaatcaactctgagcagatagtcctgcagaagtatcagatgagttgtacgccatcgcaaatccttctaacccaacatgttattgttatcctggatgtattgttaacagtgttaaattcttagttgaggatcgagatgaaaatcgtaagacccaaaacagtggtattttggtgcttggagaggatggtaataatttttatagcgtactcaaacaagtgtacgagttcacttacttgaaggattgtagtgttattatttttaggtgcaagtggtcggacacaaacggtaataggacagaaagtgatggttttttcgctagtgttggtgttgcccgtgaatggtaccaaaatgaaccattcatacttgcatccaaggaaaattaatatattacattcctgacttaaagaatggagttgatttgaaccttgtcaatttttacacccctcgcaatatgtgggacttttcagatgaggatgatgatgagaccacgattatacaagaaagaaactcttgaagaatttctttaatcgttcaacttccacagttggatgatgttcaatatgttcgtgatgatgttgacccaattcaagtacaaacatgggtcgtcatgagcagactaaccgtgaagatttagatggcttcattgtttatagtgatgatgaagacactagtgatagtgataatgaaaataatgtagatgt

SEQ ID NO: 147439 - DNA, 557 bp, Cannabis sativa
ggagtctatttatgcataagtcaattactttgtatttttgagatctatctaatgaattttatctctgggcgtggccccgtggactagtaacaattaatctgagttgtctacactgtttgtttttctcttttggagttacagagttgtcttctgtagctacaaaaaaactgttttagtaccagttttattatttcgtatttaattaagaattaatttaattaaataataaaactgagaatatgaaaatacgaaattgacacaaagtgctttttctgctaagccgaagaagagactttgcagtatttgatctttgattgccccttctcgtcaaactgcttaaggaaaataaaagattggctttcttggaggatgacttccaattctttgcattgaatagtaaggtggatacgaaaaagcgaaggttaccgaggttaaaaatactacaaaaaactgccactactacaaatttaccttttagtgacactatttagtgacacacacaaaaagtgtgggtcactaaaaggttaggggtaagttttagtgacacgcacaaaaag

SEQ ID NO: 147440 - DNA, 603 bp, Cannabis sativa
gtctcgttccttagagcctacattcacccgtgaagcagcctcttcgccgcctgggttctgaggatcctggggggacaaggttggcgtgtgttgtttcgagtttccaccattgttgttctgattctttgactgttgtcttctcaacaacgcttccgacagctctcaatgaaagtaccaaaatgttgaccgaatttttcggcaactaattaaatgagataatgatgagagctttggaataattaatgcaggtagtttttacgtggttcgggcattaatgagtcgtaatccacgagtcttttatattaatgagagttcttatacaaagaatgttcttggtgagttctctcttgcttgttttttcgatcgctcccccttctcattttgttcaggggtatttatagagtttggtaaggatagctaaaaagggattacttgtctttgagtgtcagccatgtatgtgcaccagttcccaagagatatagaataggacatacatgaccttttgttaggctatttttagcctaagtttcgggtcacattttataattgttttccttctttattattatttttagaatagaattacgcttgttttctttgatt

SEQ ID NO: 147441 - DNA, 849 bp, Cannabis sativa
aggtatattcctaattcttctccttcaagaggttttaaaagtgcatgaggttttacgagttgcatttttagctcttgaaaggctttctcgcattccttcgtccattcaaattgtttgtttcctcgcaggatgttgaagaatggaacacacttgcccgttgactttgaaacaaatctattgagtgcgataatcccaccagttaaactttgaacttccttgggttttgtaggttatttcatatccagtagggcttgaattttctatagattggcttcaattcctcgggcattaacgataaagcccagaaacttacccgagctgactccaaaggagcactttaggggattgagtttcatattgtatttcttgaggactttgaagcattcatccaggtcatctatatgccccccaaccttcttggatttgatgagcatgtcatccacatatacttttatatttcgtccgatctaatctttgaacattttatttaccaatctttggtatgtagcttcggcgttcttgagacccaatgacatgaccttataatagtatagactcatatctgttcagaaacttgtatgttcttagtctggtggatgcattttgatttgattgtatcccgaataggcatccatgaagcttaatattttgtgtcctgctgttgcatccacaagttgatctattcttggaagtggaaagcagtctttagggcacgccttattgaggtcggtgaagtcaatacatactcgccatttttttggcttggacactagtacggggttggctacccacaccgggtagaaagcttcaattatgaaattgttcttgcgcagcttttctacctcttct

SEQ ID NO: 147442 - DNA, 583 bp, Cannabis sativa
aagagttcttctagcccatcatcatcatgatcatgaagatatagatatcaaagatcacggcccaagcattaattttgataatcttcttttcttcatcatctttttttatgatatgatttttcaggtttttaattaattgtataagtctgtgtatgttgattttgagagtttgactgatgattacagaacagtaattcagatctatattttgagggttaatttgtttttaattgtattgatggactcttgaatcttgatccatcaaatcattgtatatggtaattaatatatatagagttatatatggggcggtgagtctggtttggtgctctgccgtctctctctgtcgtgtaagtggtgaagttgaaaaactaatatataatatattaatatgtaataaaataaataaaaaaatatatataatgtatttacatgcgggttggcgggcgggttcgggttcaacccgaaacccggtgtccctaaaaactcaacccgcgaacccacccgaaaggcatcgggttgaacccaacccgcccgaatattttttttaagaaaaagattgcaggttgatcgggtcgggtcc

SEQ ID NO: 147443 - DNA, 906 bp, Cannabis sativa
gtgggatgggaaccataccatcagaaacgaaacaagtatccgagggacgtcttcaccagtgcatatggcgtggcttggtcccaaaagctacttacggacaaagaatgactttctgatgatgtaagtttattaactaagtattatatgttgttacttactgctatttaccgttgtcatttgttttatttttttttaatgttgtaatgtggttgtgctgacttatttgtatgtgttgtgcagcatttggatgcggctttccatatgatgaggaggaggcaacacttcttcctaaagttgtacccacgtaagtgtactgtcatgccatcttggttttcttcatcgtttgaagggtcggtgggacgcttggaagaccaatactgaccatgctggctttgtctgggatgagtccctctttgaactcgttcgtgggaatccaaaccaattcttgccgtcttggaagggtatggagtgcatatacatgtccatcttcttggaccggcagaaacattggatcgctatggaggcgaatcttgagttgtggaagctattcgtcttcaattcgagtcttggatctctaacgaaagacgaactgaagacgctgatggatgcttggtgccttttattatccaaattagtggaccagtgtggtgtatgtgacacccattacatggtgatggtccctcaaatgacagccgccgaaagccaggtcaaaaaattcgactgggaaatgatggacaataaagttgtacctcagacaaaattgaggtaatttaaatgcatttttgagaatatgtttactaatgaacataaattttttattattattttctatggtttattaaattttgtgtttacctactattgcagtggcgattgcggaatgtacgtcatagagcatattgagca

SEQ ID NO: 147444 - DNA, 1216 bp, Cannabis sativa
  modified_base (515)..(524): a, c, t, g, unknown or other
  modified_base (551)..(558): a, c, t, g, unknown or other
ttaaaataatctaatgaaaataaatttcatatattttaaaaactaattatgttgctaattcaattttaattaggttagactaatataataaacttaatacaattatttaaaaaatgcaaatgagtcttcacaattgggacggttcgtgtgaggaagggttgagttcagtatgtcgtacccactactaatgaccccctaactctcacacaaggtccaaaggagagaaatttaaccattaaataaataattaattgttattcattgaagaagcccaattaagcctaaataaaactatctaagtgatattttattttagcaacctagtccttttaattaattaaaacttaaatagacttcctatatgcatctaagccaaaagcaaacatatacgctcacacaggtcaaatgatttggatgggcactatcatgtttctaagtttacacagatgaaagaaattataaaatttatttgttacaaattatttataaaatttattgacaattggactatgatnnnnnnnnnntcattagatctgtcaacaagttaatcnnnnnnnnttagatcaaataaataatagatttcttaaaaaatttaaataaataaaaaacatgtaacagataattgaaaagtaggttaagatattctatttaaaaaaaattaagtatatcttaattagaatttaaaatttaggttgttaaagaatatgtaaaaaaaaattaaaatctaacaaatctcctaaaaatctaaaattctaacttaaattcaaatatctaactaattttcaaaattgtcagtttatttaaataattaattaaatatataataagataatataatataatatcttaattttaaaaaaaaaatttctctaatatttcatttataatcttataatttaataaattaaatataacaaaataaacaaaattaaaaataagatattttgatggttaggatattatcaattttatttaataattaaataaaataaaatatcctaagtttgaaaattttatgattaccaaaccctaaaatttctattcaaaccaaaattaacaatttttttcaaaatttcatgttatcttgccaaaaataaaattttaattaaagataaatatctagtaagataaaatgttaaatctaacattttttaatcttataatttaatttaataaaatatatttcaaaaataaaaaattttaaaaatctgatatg

SEQ ID NO: 147445 - DNA, 978 bp, Cannabis sativa
ctctctctctctcttatttttttcgatcgaccccctttcccattttgttcaggggtatttatagaattttgtaaggatagctaaaaagggatcacttgtctttgagtgccaggattgtgtgtgcacaagttcccatgagatgtacacaagggtatccatgacctataccgtaggtatcatagggattaggtgagagtaatctttatcctcctttgattgatgtgattcttcataatggagccatcactagaccaattgattatcgtgtaatcgctgtaaatgaggcttacgccatctgtcatgtccttttatgggcgttccaagacgtttccctcatgccgcattaaatgcgaagcgattgttcgaacaggttctccttagctcggagatgctttagtgtatttctagctcccggagaggagagacacgctttatgtgcccctccgggggctcacttcctcgtctatatatgacttagctaatttcgtgggtgaggtgtccttgagatccacgtgtcactcgcagccgcggccacgtattttgagaaaaattcaaggcaacagttaccactgtcttactcactatgattgactacttgacttgctatgtgtgggcataacactctatcaatcaaggtttcaaatatggtgaagaacaatgaaagagattgaaatcactattctctcatctaggttgaaggcaatagtcaaattgtcaaaagttgacaagaggataaaatgagagcaaccttttatagtgtttcaactagggcttagggatgaattatatggattaaaaaagaataaaatattaggcaaaattcatttctaaggccggccaaacaaagaatcaatctctagttacaattttaccacctttttcaacaacttatttttctttcaataatactatattttttaattaaattctataaatgtcaaaactatttatttaataattataactaattatcaaata

SEQ ID NO: 147446 - DNA, 649 bp, Cannabis sativa
ttgttatacctgaaattcggctgccatctcagtggaggacacgtgtcaagataaagggaatatggatcgaggcaatcactttttatggaataacaaattaattgtgtaagtatcagagtatatttgtaacctgttgactgtaaggtcttaggcaaggaatcaatatacaaactggtgctcagtaaattaacgagaaaccatatgtcgctgaaagcgaatagccaggcatcgaggacagtatacataggaagacgaaagcgacacatatcaaatgcgaaacacattagtatataatgtacaaactaagtgcaacagtcggatcgactcaagaccaagtaagcgaggtgcccatctcgctatgggaaggattcctgtaactccatccagttaacgtcagtgaggcttacagccctgacgagtcagaagctaacattcaaacaagctttgaagaaatctttgtaaataagaaccacaatcgtcacaagacatgcatcgtcgacctcggaaggaaaaatggccccggcttgctattgagatcacaagaactaagtttttgtcgagacgtccccagatacaacaattaaagacgtgtttaatacacgatcattttgacctagtaaaagcaggaaaatcacagatatatgatttt

SEQ ID NO: 147447 - DNA, 587 bp, Cannabis sativa
ggacgccgaacaattaagtgggggagaatgtggcatgctgccccatggcacacccacaatggggccattttgtaacatgagcatgccttggtgcttgatcatcattcatgtcttgcaccaagcacctcattggggtggggagatttttgtttattagctttctttcttttgaatttctattcaaatatgtatagagagctataatcatatatgttcttggacatcccttaaaatcccattaagctctttagggggggtgacctagtgacttatcaagcaccttgtcactagcatgaaagggcccagctatgtactcccttgccctatcaaggccgtataataataaaacgatgtttatccatacttcttgtgtatgcttcaatgttgcctttgtgatgcatgtttgttgccttagttgggtcattgcgtgccatttgtctatatgtttacttgtgggttgtgtgagagtggtccttggggacgatgtgtgtttgcttgctcatgcttcttgtttgcactcaacatgtgcgagacatgtatcgtgcctaacctttgaacttgtttgcctgcaggcgcgtttaggctga

SEQ ID NO: 147448 - DNA, 843 bp, Cannabis sativa
cgtaatacgcctaaattagttagggtgttacaatttgcttccttctacaggacagtcacatactccctctgaggacatctcacctgttcctaaacctgatgacacttcatcctctaatagtttgcctgtcaccaacactactcctgatgaagtaccatccacccccaggaacatatcaactacttctcctaaacgtctttctgattacatttgcaataccactactgcttcttctactgctcaccctaataataaatatgtgtcttataataggttaacacaacactttcgagcagcggctcttgctgcccatacctttgtagaacctaccacctacaaaatggcaacaaaaaatcccatgttgaaaaaagccatggatactgaaactgatgctcttgaacccaatgacacttggatcgttctcactcttcccgatggtcaccatgccattgactgcaaatcggtatacaaaatcaaatacgatgttgatggctttgttgatcgatgtaaagcacgattcgttgttaaagttttcaaccaaaaacaaggtattgattattttcacacatttgcccctgttgcaaagtttaataccatgaaacttatgctcgctgttgcggccattaacaattgatctctgtaccaaattgatatcaacaatgcctttcttcatggaaatttaaatgaaactgtctttatgacacccccaaaagggtacaaacccaagatcatggcaatttaaatgaaactgtctattgttggaaatattttaccaggatctagatttactaccatgtatgtttcattaacatcataatatgtttctaaaacaatgaaataaac

SEQ ID NO: 147449 - DNA, 522 bp, Cannabis sativa
caatgtttctcacgtttagttcttcttcttcaacttttaaatctacattaaatcttccttttaggagcctcttaaatcattcttgtactatgaaagacatcatataagcaatcaactttgcaggtctggctaccccttatttatgttagaacatagctggacagagtgtaccaaaatttttaaagttacttctacacataccataaccacaatatagatgcctcaaaaaacaataaatattctaagcaaggaacttgaagtaagtccatagaatttgtggtattttaggtaaataatactgtagaaaaagcatatatctaaacagccaaagcatttagcaaatgagtgacacaatgaaatggttcattttcataccttgcacatcggaaagcatggtcctttcacccaacagagtcaagaaattagatcaaactaactcaaaagttaataaactaaaaatgtataaacactcactcatatcccgtgtacttgttagggataacattatattaactccatgat

SEQ ID NO: 147450 - DNA, 531 bp, Cannabis sativa
atatatatatctttagggtggtaaccctaattcacgacaacataactacttaagataatatccctaattcacaacataaacacttatggtaatgaccctacttcatgacacatccttttttagagtaataacctgaattcgtgctttcatttgattgaccatattatagattaattccacataattactttcatattctcatatatcctagggtaataaccctagaccacattattacaaaacaaggtaataaccctaatctcgatttttcactaaagcacggtataatatccaacatgagcgccacagaacttaactctatgtgctcactactgtcttacctggtaatccaagtatgtggagattaaaaacccccggctgtttctgagcaagtagcggtaatcctagtcacacattcaagggattttgcaaataggattaatcccaaaattcaatttcacatcatcatataatttgcattccaattatagataaacatatagagcccgaaacgagctttccaacaatata

SEQ ID NO: 147451 - DNA, 535 bp, Cannabis sativa
  modified_base (495)..(508): a, c, t, g, unknown or other
cgttaagtatactgttagtgctctaatataaatataatatatatgtgtatatatatattaaaccccaatacaatacaacacccaatttgtgtataaatatacatataatatacgtttgacacttgacataatttatatatgaaaaatgcaagttgtctaaccaaaatgtgtctagcttttacgtaaataatatacataaacataattaggtacacgtgtgcccaacatataaatgaataagtatatatatatatatagaagtatatatatgtgtttcattcatgaactacactaacttaattactgcatatattatttatatatatatatttgtgtttgctcatcaagtgataaccatgaacccaccagatactcgatggtcggtactccactccacaccacaccaatgcatcctatagtttcagcaccacctatatatatatatatatatatatatatttttctatatagaaaaccacttagggttaggttagnnnnnnnnnnnnnnaaaataatagaaaaataaagtggcaaa

SEQ ID NO: 147452 - DNA, 725 bp, Cannabis sativa
  modified_base (326)..(334): a, c, t, g, unknown or other
  modified_base (485)..(486): a, c, t, g, unknown or other
ctaatcaaataattttctcgaaaattgtgctaaatgaaaacttttatattaaatattaaactttataatttacaaaattatttacaagtaccaggatcccatttttaaacttttatacaaaatacacacaatacataactaggtcgtgcagcgactacaaaataataaagccaagatgtcccgagacggaacactccaggtcacgctgccacgacatgtacaaccttatctcagccaaactcaccatgttcagcttttgcctttcctttacctacacatggaagcaaaactgtgagccgaaagactcagtaagaaaagcatataannnnnnnnntaataccgacttgtatctaggcgcccatacacctatttagaaggcttaagagatgagtaagaacgttccatactaaggcatagcctctataccacatacactacgtacctcactgtacgagtgttggtagggtttgtttcgtaccctgagnnccactgagtgatataccacacaccatgtactttcccgtacttatgttggtatcagtgtattgtactctttaaccacatacattataccaatgcactttgtaccctaatcgtataagtgttggtagtgtaacaaaaatatcagcatgcatatacacttaacatatacatacacttgcatattgatatcacacattatatacagttcttacctcctttcaagattcaagtgtgctggccga

SEQ ID NO: 147453 - DNA, 754 bp, Cannabis sativa
ttaggttgcagcgctagttgtaatagaggttttcatgtagaatttcgtaaaaatgtaaaaacaactgttttgaagtacaaaaataaaaaagtctctattttaaaatagaatataatcaattactatattatataattagtactctacaatacctaataattatacagttatttctaaatatatttacaaggttagtaagtattttgcataaatattaaaaaattcttatgactaatagaaatgatcatcttaattagagccatatatcatgtttctaattattatttttttaattaacattttctactaattaattaattgaatgttatgattattgttgtacgtgtatacatataatagcgtaaacccgaatctatgtttaaaattttacagaataaggtacacaccaacccaacactttgtcctttaagtgttggatatattgacaaaatttagtgtcctagctagctaagtcaactcttgattgtcgaaggaaaaaaagttttgtttttcttcaattttaaaattaatgtaaaaatttagggacgtttgaaaattggtaattactaatggataaattgcggcataaatacttaatgttttcgattttatacacttaaatacctaatgtttatttttagtgacaaaaagacctaatgttataattcttttacaccgttactaccacttccgttattaactcataaatatagacacgtggagagctcaaatacattacatttatttattttat

SEQ ID NO: 147454 - DNA, 1532 bp, Cannabis sativa
gtgaacaaaatcagcaacacagcaacacctaaccaaacaatggtgtgcaacaatatgatgatggcaacatatgacaacaactcagcacaggcagatgtgcagcaacctggaaacaacccaccaacaacttccaaacaactatctgcacacacaattggatcagttcaagatgatacattttttctcgagacagggattgtaacatcaaaatcaaccatccaacaaccagaaaacaacaacgaaaaaactccagcagtagatgaatattttgacttcaccgactgcgcaaagcttgtggctgtaaaaatggtacaacaacttgaaaacaaccagaaagaagaagaagaagtcgaccacacagaaatgattatcatcaatgacaaatgacatgaaataatagaaaatagacaaatttacaagaagaaagatacattgataagtaccctatgctactttgcaatgaagaaaacattttaatacaaagtagtgaaatcttgcaccaaagaatacaacatagtttgttaggacacaaactgcaaatggagtttacagccttccaaaaataggaacacagaaacattcataataaggagttatcaagaagaacacacatgtgtggttccaataagaattggagatcaacgacaagcaacagcaaagttgatagcagattttgtaaaaccaaagttcttaaacttgaaaacaaagtgcagtccaacagatataaagggagaaataaaagacaaatacgaaataaagatgaattacatgaaagcatggcgtaataaagagggagcacaaagccagctacatggaaatgctaaagaatcttacaatctctagctaagatacctgtacatgctacagaaaacaaatccaggtaaagaaaatatttttttccgcaaatattttttgaactgaaaaacgttgtttttgcgttgccaactggttgagtaacagttgctaaatattcctatttaaattaaatgcaggcacgataattgacatagagaaacaagaggatgatagtttccaatatgcatttgttgcattaaatgctgctattaaaggttggccaaacttcaagccaatcatggttgttgttgacgggacattcctaaaggccgcgtatggaggcactttgctcagtgcaaacacacaagatgcagaatcgaaaatatttccacttgcatattgtattgttgattttgagaatgataaagcatgggagtggttcttcaaaaaaataaaagaagcatttggggttcgagaagatcaatacctaatatcagacagacatgaaagcatcatcaaagcaacaagaagagtgttcctagaaataacacatggctactgcatcttccacctcttgtcaaatctgaaaacaaaattcaaaataaatgcaaaacatttcagaggtccattctttccaaccgcaaaagcttacacagaaatggagtttgaatttcatatgagggagctagacaacttggataagcgcataagaccgtatctggaacaaattggccatg

SEQ ID NO: 147455 - DNA, 561 bp, Cannabis sativa
tcaacccacataatcatcactttcaattcacctaaaatttcggacaatactcacaaattgtccccccattgagcgtacaatgtttaataccaatatacatcaaaatagcaattataatatttcccatagccaaaggaccgatacttgagtccccttgaatcataactgacacttgggacccgtgcactgttcttctttaatatctgtctctcttacttgtgggcaaggttccttctatgacccactaccccacaataataagatatggctctacattagaccaaatggtgtctttttacatcttgaacactcaggataaggtcgccatttcttattctcactttgactgctatcctggtggcccttaaacctttccttctatcccataattggtggttcatatatttcaccacatctagtggtacaacaggttgtgtcggtagtacaagaacagacacaagatgagcatgttgttcattcagatctcatatttgttttcccttgttgtctagtcatatcctgcatagtagaatttatatgttcccatcattacgataataa

SEQ ID NO: 147456 - DNA, 530 bp, Cannabis sativa
tcataagcttgcatgcttgcctttctccactaatgttgacagtattctttggaatcattaggtcttttaaaggcttaagtataatggctcagatattcagggataggcaaaagacactttttcgctcaacatatcataagcacacatatagaacccacaagctttttacttttttttttatctctattattttccaaacatcactgagtctcttttttttcaaacatatttttttctttttattgttcttccttttttttccattgtattttttttttcagtgacattgaattacaatttttcctcttctcaatcttacaagtttttctccctctcactaatttctctcactaaatgtttcctctccccccaaactaattatgcagcttatgatatcatggataacatggtgaagaaaaaattaatagtgtggttgcaaaatttttaaatcaacgggttaaaaacaaaacaggtttaggctcaaaaggttcactagggatacacattattatggtaggcttgaaaggctc

SEQ ID NO: 147457 - DNA, 646 bp, Cannabis sativa
tttcaggatttattttactttattgtatgtcaatttcaaaaatgtattgattttaaatacattagatttcgaattttgctatatatattttagaaaattaaatttaaattgaaaattaattttggaccaacttaaatagagtaatttcaaaatatatattgagaattattactaagatagaaaaaaaatcattttcaaatctatctaagtataattttataaatattaaattaaatttatatttagagttatctaaattggtaattttaattgaataaatatatatatagtaaaataatagattaaaataaatattagatgaaaatacacttgaaataatgagctttattataaggatattcaatctccattgttgaatctacatagttcttgttttagtgagtaatcatccctaatggattaacattcattagcaatttaacatcgtagaatctcgaaagataagtattatttgtcaaatttttattcttagtaacgtccaccccaatagtggctgctaatagtaagacttacaaggtataaaacaatggtagaagctcataagatagaatggccttaactctcgcctaatcgggacaacgctggatgattatcttgatcaaataaaagggtgctagaatgttta

SEQ ID NO: 147458 - DNA, 905 bp, Cannabis sativa
tgtgtaggtatgggactacacagttcaagaatacttaaatggattgatttgtactacctatatcaacaaggtgcatcttgttttctggtagccatcacgaaagaactccatgttaagggtgcttgacctgggataatttcaggatggatgacctcttggggagtttttccaaagagcgtgcgagtgaggacaaagcacgctgaaaacactggtcagtcttcacttcaggaagcagtcagagtgacgtacccgtgtatatgagtcattattctgtgggtgtaagggcccaataaaagcttgaagcagggacgttacacccctactatgattccaacttgtaatgaagttaattgaatactgtcattcaaattctgagcttttgttgctatgttgaagcggctcaggaacgctttcaatgattcacctagttgttgcttcacgtttgtgagcaagaaggcctcaggccttttgtctcgggctgcttaattttttttttatttcttgggataatttttcccaagatattatcaaatggctcgtaaatttatcaaactagctcttcgctactcccatcaagaaagtcgagaataacatacatcgtaggtttaatcctactgatgagtctatattcgtcttacagatatgatcaatttatgatataatattcttaaattgattctttaaattattgattagtgtgattttaattttttaggctattttaaagactattcatgcatttagagtgttttggagggactttatcatattttggtggaaaatagtagaagccggcaagctctattttagaaggcggaacttaattgcaaattcagacaaccttagaggcagaatttgttgggttttgtgccctatataaaatccatttcaatataatcaaattt

SEQ ID NO: 147459 - DNA, 615 bp, Cannabis sativa
  modified_base (318)..(322): a, c, t, g, unknown or other
ctgaaatttaaaatttctatttgggatctaaaatttaaagtcaaggacttaaatttataccaaatatttcttgagtaattattctttctcggaccacaactaagcatgtacaagtaggagattatctatgattgaattcatatcattttgggatagaatgtctggaatatagtcatctgcgccattccaattcaaagaagaaaatagagtgacatcataagcagatgatttataaactatttatccaataatatactttctaagcagtttcttagtgaaaaagctaagaggaaaaataaaggataatttcgattaaannnnnaatccaacgatgtcccggtaggcgacaatcaaagttattcttatattataaatttcttcattgtttcatattgtagacactaatctaagttgtcatctttggatttacaactagatgtcgcatttacaaatatttatctgtcgagatctaacgctattttggttgtctaatggatgaaaatcctttgggatttgtcccgttaaaataacaaattatgtaagactaataatgaagactcaaaatttatactacaattaataacaaaaaataacatgaaggttcaatataaattc

SEQ ID NO: 147460 - DNA, 588 bp, Cannabis sativa
ttgcgtaccatttgtggagagcttccccttggggaatattcccggtccaggactctggaggcaggatctggaattgggtaacttttatttggaatctgaaaatcgaaaagggtggacacagacaagctatttctttacgcctcgatcgtggtggatactatatggagaataagaaatgataaagtgcataactattatccctgtaacattaatactgctattgactctatctctcatttatttacagattatgttgcctgtttgcttccaccggtagtagatgtgtctcctcttagttggtcgacccctcctgaagactggatcaagattaattgtgatgttaaggttggcgatgactccatgtgtattgcggccttggctagagatcattcgggaaccattttatggggtgtggccaacttactcaatttcacagatcctttgatcggcgaggcagctgcgtgtcatcttgctttggaagctgttactaccaggaagcatgattttattatggtcaagagtgattctgaagtggttataaatgctcttaaaggtatccaggacaactggaacattgccaattatttg

SEQ ID NO: 147461 - DNA, 586 bp, Cannabis sativa
aatcgtaatgcacaatacgattccgtggcatcttacgcgcatctacggtgaaccaaactgaagcttgcggttcaatacttggaagctcattcatgatcttgctactttttctcagtttccttggtgtttaattggtgatctcaacaacataggaagccaagacgagaagataggtggccgcccttatcccccctctcttattgccggtttctaagatgtccttcaaagctgtgatttaattgatcttgatcttaggggatacccttttacttgggaacgcaacaaaggaacttcttcaagtgtggaaattcggcttgataaagctcttgtttcccatctttggcttcaatcttttccacaagctactcttaccaacagagacttctcttcatccgatcacactccgatcttccttgaaccgaagcctccatgggggcctaaaaaaacataccatttttggtatgaaaactgttggagtcgtgagcccctttgctccaagttggtagaagattgctggaacaataatcaacatctttctcttgttgaaagaatcaaagcttgtggcattgctttggattcttggggt

SEQ ID NO: 147462 - DNA, 583 bp, Cannabis sativa
  modified_base (528)..(529): a, c, t, g, unknown or other
gagagagagagagagagaacagtatactatgaattccattcgaatacatttttattgttagaactcaactcataatttttatttttatttttgtttacggaatagtttgaaggattttttttttttgttacagagaatagctgaaggagtttttttatttattttttatttttttatttgagaaaatgcaaatcgaacaaaatcaaaagatatagttcataaagcaaaattatcaacaatagacttacaaagaagttttaccttaaaaaagaagaaaacaaatctgttattttaaaattttgatgcagtagttagagttgtacagaaattttcttaaattgtccaacctaaattaatcatagtatcattctttttagttttttatttttcaattcttaacttttattgtcacataaataataatatataatataattatatatatatatataaactccaatgtcctctctcactctttctcactaatgttttatgtgttgaaattttatttgggtaaatactattttnnaccctgtgttttgcaaaaattacagattggaccctgtgttttgttaaatgacaa

SEQ ID NO: 147463 - DNA, 834 bp, Cannabis sativa
gggggattggggtttcgaacaacggagaatatgaacaaggcgttccttatgaagtgggcttggaaaattctgaactcagaccgatccttgtggagccaacttatgaacgacaaatatatgaagaacgaaggcttctttgacatggagattaaggcctccgatacaacactttggaaggccattcttcgcatccgtggtgacttccacaaaggaatttgtcggaaaattggaaatgggaatgcaacctccatatggttcgatccgtgggttccaggcgagaatagacaaccaatgccccgacttgatgcctctgaaggagtgagtttggtaagtaactttatctcgaaccaacaatggaacgaggagctagttcggaaatggttcacaagggatgatgctaaaagaattctcaacatatccctgcctgaaagctcgaccaacgattcctggctttggcttccggaacagaacgatcagttctccattaagtccgcctgtagactgatatcgaatcataattcgaatgcaaacttggacaggaaatggagaattatatggggtgcgaaaattcacaaccgattgaaatttctgtggtggagaatcttatccaattgccttcccaccaaaggtaagatcggatccctttttcccatcactgatataacttgtgcgaattgttcatcctctgaggaaagtagtttccacctattttgggagtgtaccctggctagagctatatggtttggttgttcctggaacattagaacatctattcctttcctttcaaattgggaggagtggatgcaatggtttattgagcgagataacagacca

SEQ ID NO: 147464 - DNA, 685 bp, Cannabis sativa
  modified_base (640)..(659): a, c, t, g, unknown or other
aaaaagctttccaagagctaaaagaacaacttgcaaaacctcccgtactctcaaaacctctggacagagaagagcttggaatatacttagctgtcttggagcatcctatgagtgccgtgctaatcagaaaagagaacagcatacaacacccagtctattacattagtaaaagagtcattgatagagaaactcgcttattgccttattctagcaacaataaaattaaggccttattttcaagctcatcttgctcgggtgtacactgaccaaccattaagccaaatattgcaaaagccagacgcctctgggcggctacttaagtgggcggtggggttgggccaatacaaaattactttccaacccctaaaaacaaccaaaggtcaagccttagcacactttgtggtagaatgcacaggcaagaaagcaagcataccagaaagcaaccctgagccggtacaaacacctcagccaagtaatagtgatgaaaaatcgacctggaaactacatgtagacgggtcagctacagaccagcatcaagtgcaaggattgcccttgtcacgcctgcggggaaattgttggaaatattttaccaggatctagatttactagcatgtctgtttcattaacatcctaatatgannnnnnnnnnnnnnnnnnnnacacatataaagtttaggaaacctca

SEQ ID NO: 147465 - DNA, 797 bp, Cannabis sativa
ccttgtggcaaaatatacctgctcctgtgtatttgtgagctccgtgtattgagtatactgaggggtgtatcccctctattgtcgcttatcctccgtccggttgctaccctttgaggacctcttgctccgggagctctgaggaggtcctgtcaggcttgcggtaggagcggactgagatggagctcgaccacgcgtccccgaggggttatttatggggttctcaaagtgtgatgatgcgggagccaaggctaggctctgattatatcctggtgtagcggagaattgtatgccgctcatttaaggagtggccgggggcatggctcttgggagctgaactccgggtacatatcttaacacactgattggatagtatcccctgtaggtcactatctgggcttcttccgaattgatgtacttttggaccctcttttggaaatcttggagattggctgctccctcttgttgtaatttattccagaatggggtccccgtacagatcccagcttggagaagggaaaactgttgtccgtcatccaccttcttggtctttgaagcttcctctttgaacctttttatgaagttctttaaggtttccgcgagcaattgttttatgttagtcagggcgctgacttcgagattaatctttctcgctacgacaaactgtctccgaaagctggcttgtagcttgttccagagtccactgatcctggttccaactttttgaaccattcctcagcgaaaccaattaatgttagtggaaaacatagacactttgcatcattgctgaccctcatgac

SEQ ID NO: 147466 - DNA, 846 bp, Cannabis sativa
tgatacgaaaagcctacaaaactgtaagtcagcaacctccaagtgtcatccccctgggtgagacgaacgaagatccaacgatgaatacttcccagactgcaaatggtcagcccccaaatccccggtcatgagttgcacttgtgggcctagcggtaagcgggcggaccttgtctagtaattcatcgggagaggtcatacctgatagttctaaccaggttaatggtgctattctgcctgtgaagcaagaaaatcaatcacaaagacaaccaggcgcttctgtatttgaaagattggggacgactcatgacctaaggagtgatctgaatagaaggagacgagtagacgttcagattgtcacgatgatcgtgcagcccagagcccgtgcttaaattcccgctcagaaggatacttgtgtggttcaaatcgaccaggatgccgagcaggttagcccagccgtacaggcacagctagacaaactgaacaatatgttccaatgcatggctggacagagaaataatgatctcgagctggaccaagcaagcggaactcctttctctcccgaaatcaatcttctggcgttgccccacaagtttaaaatgccaacatggaaaatgtacacaggaagagaagatccactttcccaccacaagtatttcgaaatgcaaatggatttggaaggggtacgaggagatgtgtgttgcaaaatctttcctcctaccttatcagaaactgcccaacaatggtatttcaagttggcccctggaaagtttagttcatggaaagccttctcttcagaattccatgcacagttctcctcctctcgccaacttccgttgcatctgggag

SEQ ID NO: 147467 - DNA, 826 bp, Cannabis sativa
aaatttgaaggatatcagaaagaacaaaccagtagattcaatgagtgacttccttgatcgtgcgaaaggttttatttagcttgaagaggcgatttagcaggcagaagttgagcaaaaacctggccggtcaaaagttccctctgctgagacatctgtccagctcccccaatacccaagatattcaagctcgggtggtaaatggtccaacaataatacgcaaggaaatgggaaaaagggaaagttcactggcaagaccgaacaaactcccagggagaatcctaccaagtttactgcattttctgtactgacagaagatatataaagtgtgtacatggctagtcagccgttagccccgtataagaagcctacacccatgagaaaagatgtaagcaagagagatatgaccaagtttagccaatttcatggggattatgtccatgacaccaatcattgcaacaatctgaaacgggaaattgaatttctgataagaaaaaataatctacacgtacagaagtatgtcaaggccgatcaaaatcagaggggcgataacaaccaagatttactactaccaccagtagatggacatctgcaagtcattattggaggtccgctcattgttggagattcaggcaaagcccgggaaaggtgtgtctgaacagtacaacatgagcaagaagaagtagttctggctatcgaagaaaggtaaccgaagatcccacgggcaggagagcccaccataacgttaaatgatgaagatgctatcaatatcagttttctgcacaatgaccctttggtcgtggaagtccagataactaacaagatggtg

SEQ ID NO: 147468 - DNA, 642 bp, Cannabis sativa
gaggatatctaccagccaaagagtacgcttattagaacattaacgcatgtcgcaaatggctgggtgtatctcagtatctcacgaaacatataaccgcatatatgaccattagaatactgtgatacatccactatttgaaagactcggtcaatgttctcacaaccaaattcacagaatacaaaatcctaaagatctaggcgacaatcagaagtaattaagtctcgcaaacatgcgagtattcgaagtgttcgtccgaatacccgctagttcaaaacatgaagcagtgcctattcaagcattttttatacagtatgcggttatgccaattttaggtcattttttatgaaatcacccagtttttttacctaaaaaacgtagcctcatacatatcccctaccaaacattcattcttaaattctctcatgcatattaaaaacccagaaaacagtgttccctctcaaacagaaaacgaaatgcagtgaagtttcgaaaactaacctttacttctggtaaatctgttcccacgaattgctgcactgtagaatcgagaaaaaaacccacgaagaaaagcaaaaatctaggaaatttatggaagtgttttttggtggtttctctgaaagagaggaaacaaagaagttaagg

SEQ ID NO: 147469 - DNA, 617 bp, Cannabis sativa
ttaacaacaaatttatttaatttaaataaaatctaatataaaataaacaaatacacattattttttttgaaggaaacaaatacacattattaaaaacatacatttcataaaaaaacttttgtgtccactttctccaaagtgctaaaaaattttcttaatctgaaaacaaaaagtatatcatattatcaattactgaaattaattaaaaaagctacaaataagcacaatacaatatacatcactactacaatatatataaattatatacacattaatatatactatatattttataaacacatatatataaataaaaaaaatataaatcttatatatatatttaaaacttctacacattaataattgacatatatacataaacaaaacatatatatatgcacagattaatatatacaatatatatactacacaatatgttatatacaatatatatataatatacagtttctatattttataaaataattcaatacaatacaatatatataataattatataaacagattataatatatatacacacataaaaaaaaatcaaaactcatatatatacccaattgtatatacacaaatatatataaacagatttttatat

SEQ ID NO: 147470 - DNA, 756 bp, Cannabis sativa
ggcatagaaatttttgtggcagatatggtcctcaaaagagtatttttgaaaacgaaagacagcacgactggtgtgttcgaactaaactgggaatggccatatcaggtggttgaaattctcgaatcaagagcggatatacttgggcggtatgacaaaaatatgaaactcattctagttccaaggttttggaatggagaacatttaagaaagtattaccaataaaagtacaaggtcggatgaccactctaagtacaaaattatagaacatttacttttaagtaaatggccttctgggcggaccttgcccaaaggttcgaatgaaacgattacgtacttaggtcagatgaccacctttgaaagtaaaatttcttttaagtgcaatttattttgtttaaatttagctaaagatcagattagatcaatataataacttttatgtaagttactacggtaacaaaaaatattccgaccaataaatgaataaatatgtctatttaatattgatcgtgtcaatatattagcaagttattaatttaccattcaatgcgtacaaaggtttgctcgaatctaaagaactgaatagacaaaaaactataattataaaatacaagtgaccaagagtcaaatgtctgctcggtcacttaggggaaaactatacctgtaacgccctagataattaggcacgctacccaaaatgcttatggaatcctaatcccctaattcgggattactaatcaaaaatagcgcagaatttaa

SEQ ID NO: 147471 - DNA, 735 bp, Cannabis sativa
tatttttctcttgattgaacaattaaatatgaagaaataaaataactagattcaacttcatattaataaataaattaattagttaacaacacatcgcattaactcaaaataaattaaaaaataactgataaataatcttaaaaaaaatgttaaagtaactgtaaaatactagtacattaacttaaaaaacatatttacctataaaaaagtaaacatatattcatttaatttttttacgtagttaaacaactaaataacaatgagcaaacaattagataacaaccctattttaatatgaaaagttattagacatcaacatgttgtattaacttgaaaaacacaaataatcttaaaaaaataatacaacaataattttaaattaattgtacattgactaatagtgtagaaaatatgaaagaaatcatcaaacaacaaaaagtatgaacccataaaatatatgcacccataaaaattaaataaactaaacttaaaaggaactagaaagcgtttcaaaaatacatgtacgcataaaaattaaatataaatttatttttcgtttggtcaaacaactaattaataacgaacaaacaactaaatagcaatccaactttaatacactgattttttttgctgcaatatgaaaattaattaggaattaatacattgcattaacttataaaacaacacttaagtaatctcaaaagaataaataaacttaaaagcaactacaaatta

SEQ ID NO: 147472 - DNA, 1116 bp, Cannabis sativa
aaaaaaaaaaaaaaaaagagtggcaaataaggcacaataaatgatgatttgaaagtggttgtcacatctgataatttttttaataagaattaaaatttaaaaaaaaaaattgatacataaaactcatttaacgttattattgttccattcttcttcttcatctttttttttcttctatttttgttctagtttcttcttcttcttctttttcttcctctggcttttgttagtaaattaaaaatgggtaagaaatatttcaaaaaaaatctcatagccctacatcttttatagtttcgaatcaaaaggaaatcaattattcactttgaaaaagagaaaatcaaaatgtttcaaatcgatcattgaaggttcagactctgatttgaacttgatgatgaaaatttttgcgatacccaacgtgttaaaggtatttatgttgtttttcagttattttagcattttttttttcctttttttcttatagatgttctggattttttttttctcatatctatgtcttctgctcattttaatttatttggtgttgttatggtagtcctgtttgtgggtgtggaagatgggtgctataaattcatttcttcttcgttctctttggctatttttgtagttttttttctgattctcctataaatacatttgacgagctcactgaaaaaagagttttgaagtgtgtggtacttttatatatttctaagcggttatgtctacttcatttgtttttgtgttgttttaggtttgttttagtagtttttttattttgattttttaggaatggacttgcaaatatagttgattttgcatctggtgttgaggttgtgcagtagattattttttttaatcattttttcttttgttatgtttgatttgttttagtgttgttttacagttattttgtcatgattatttatttgacgtcgatttcactacttttgctcaatcttgtcggaattaatggttatattctagttgttctgttattgctgtggtggttctgtttgggagtgtggaagatggaggcctcatacttttttttagtgtttacagtataaaagaaaaaaaaaaaaggaaagacagtataaatgtaatttctaccgtgtg

SEQ ID NO: 147473 - DNA, 691 bp, Cannabis sativa
gtcgcaccagaatcaattagaacagtcaataaagtaccagcaacagaaagctgacctgtcacacttgaaggaccagcatcagcctgagcttgagtcagggcaaacactcgagcaggagcgggtgtatcattcttcttttgctctagtcgtagcagatatggacaatttctctacatatgacccaccaccccacagtggaaacgagccctggcctaacactcgccctggtgacgccttttacatctcggacattcatgaaaagtctgccagttttcgttcccaccagaacggaaacattggttacccaggaaccttttatttgggtctgtagctgataattcactaggtcttttcttgcgatcaccgggataagtacccctaccagaaccagcacctgatgtttgcttccatgaatcccttctggcaatatttttctttcgtatccgagcttctgcaccctcaaaaactagggcctgttcaactatctgagcataagttcgagcaacccccggttgtttagaagcaacaatcacatctcgtgcaatatgttcatccaaccctcgaatgaactttgatttcctagcagcttcagaagcatcctcatctgaagcaaactttgccagtcggtcaaacttagtggcatactctgtcacaatcatgctgccctgagtcaaacatataaactcttctg

SEQ ID NO: 147474 - DNA, 729 bp, Cannabis sativa
  modified_base (35)..(40): a, c, t, g, unknown or other
ctggaccatcaaaaaaaccatcaatgaagggcatnnnnnntacaatatcagcactcggcatcatagtgtttaattcaggtaatacatcgacaaccaacacctttagatttatttctggaacaaaactcccaacctcactacgagtttccttaacagatcttggtgtgggactaggatcgacacaaacattcttctttaacaatgtcacaaacaagggagtaaattcatgtggcttcttcgtaactgtacacaaaaagtaccttgcacgcttatcatttccaataacttcagggcgatacatttagactttcatgtacttgtaatttacttccattttcaagttataatgcactttgtcaacatccagttcttcatacaaaagatcaaccaaacctgagtagcttatgttcggatcaatgtcaaatgtcaaatttttggccggttataaacccatttttggaccctccatcggacccgatcaaaaaaaagtccgaacccatttttcgaccccccatcgaacacccatcggaccctaatcagcccaatcgggctttcatcccaatcatcgaactttcacatgcattggacaatcatcaggtggtgatgcacatcgtaagtcacaacacatttactatttttttaattccaatacttccaattattttagtataatcgtaagtaagggtcgatcccacgaggactatatttattaaattattcacaatttag

SEQ ID NO: 147475 - DNA, 602 bp, Cannabis sativa
aatatctaaacctactctcgtcctatatcgaaattagttctatttcactaaagcataattaacactcacttctcagatctcgcatcaaaatcatagacagttaattggtgatcaagcaattaaaagtagttaagcaccaatgaaatagaatacatagaaactgggggaaaaataaatcatattaataccataaagcaatatcaaacaatatctatctaaccctaatcaagtgtttagctacacatgttcatggaagcaaaatcacacacattaactttaaaaaagaaaagaaaatagagaagaaaagaatgctgaaaactctctgaagaatgcctccagtattgcagttgatctctgaaattcgtgcttagtattttgctctaaaattgcttttgaattctctctcaaaaactattaaagtccacttcttttatagccaaaaaataataaataaaataaaaatcgtttgaagaaaaaaaacctattctcaagaattagaaaagctattctgcataggattagaagaggaggtgagttttttgctgcgtcaactgatagtattttagccataactctctcgatattgctcggaattggacgat

SEQ ID NO: 147476 - DNA, 772 bp, Cannabis sativa
atttagttagaaagaaagaggaaaaattagaaggaaataccaaaattcaaaggagaagctctctttcttctctctctctcttcgaaacagcaagaacaaggggaaggactgctgatttgtggtgatttcagcaaagaattcaagggggaatcaacctaaggtaagctttagtggaacccttctctagtttgttaagttgttgtttagtttgaacttgtgaaattgtaaattgggggctgttagggtttgatgtttgtttagttcgaattctagggttagtttggattgatttgagttcatagcagctggttttgaggtttgtagtaggttttgtgcaagtttgagctttgagttcaaagctttgatctctaatggcaagttgagagtctttgagtttttctttaaaatactggatggaatatattgtgtatgcccttattaggtactctagaaggtttcattgcatttggtggagaattgagcaaagaatgaaaagctttggggaaactggtgcaaactggcaagccagtttgcagagccagaaaaaccggctagccagttttggcaggattccccaggcctttcattttctcaattttcatctgtgcggtgccttggttgggtgtttccccatttccagagttagaataacctatagaaagtatagtagaacctagggttgaggtttagggtttcccaggattagggttttaatcatgtaacttacccggttttaaaatgtgattagggcatccatctagcacaagatttc

SEQ ID NO: 147477 - DNA, 614 bp, Cannabis sativa
agggcataaaacccaacaggtggtccatgagggcattgaaccagagttggcggaagatgagttggatctccgcgtgggatctgaaagaactgtagagcctatggaggacatcgaggaagtacaagtgtgcgacctcgaccctaccaagatcctccatttgggaaaaaactagagacggaggaaagaaacaaaattattgaagcagtaagggctgccatagacgtttttgcgtggtgcaaaggagacatgaccgacataagcctgcatgtgattacccatgtcctaaacattaacccagatttgccaccagtacagtagaagtggcgtccccttgatccagtaaaagcagacgccctggaaaaggaggtagacaagctaatgaccaacggcctaatccaggacgtgtactacccagaatggctggctaatccggtactggtgccaaagccaaatgggacatggggagtatgtatagacttcaccgacctcaacaaggcatgcccaaaagactgcttccctttacctcagattgacaagatggtagaagccacctctgggttcaagctactgtctttcatggacgcctaatatggatacaaccagattaagatgca

SEQ ID NO: 147478 - DNA, 555 bp, Cannabis sativa
  modified_base (27)..(28): a, c, t, g, unknown or other
  modified_base (55)..(56): a, c, t, g, unknown or other
  modified_base (84)..(85): a, c, t, g, unknown or other
  modified_base (113)..(114): a, c, t, g, unknown or other
  modified_base (144)..(145): a, c, t, g, unknown or other
  modified_base (177)..(178): a, c, t, g, unknown or other
cctcgtgcgcgcgcgtgtgtgcaaccnncgtgcgcgcgcgtgtgtgcaacccaanncgcgcgcgtgtgtgcaacccaatttcanngcgcgtgtgtgcaacccaatttcagatnncgtgtgtgcaacccaatttcagatattttnngtgcaacccaatttcagatattttcatccaanntcaaaaaatcataactaatttataaaaaattcaaattgagttctctaaaatcttaaattcataaattttccgtctactttccagtaaaaatatgtaatatccagtttatatacatatattggtatttggtatattaagtggatataattgtattgttattattattattattattatttggatatatatattccatatacaagtaatagtagtttagttaaatatatgtatatatatagtattaagtgcacgtgtgtgtgtgtcaatttaaaaaaaatgacagatatataattaaatagtgagataaataaatagtgaggcattagattagttagtttaaaatttaaaatttaaattatatcagcataattttatct

SEQ ID NO: 147479 - DNA, 679 bp, Cannabis sativa
tttgcaacaaagtgggttaatttgattatgggctgcctcaccaccaacaccttcacctttttgttaaatggtgaagtgacgggatctctaactccttcccgaggtttgagacaaggttgtcccctttcaccataccttttcctaatatgttctgaaggattatctcgcttgcttcaccaggaacaatcaatgggcaatctgaatggattcaagctaactagacatgctccgccaatctcacacttactgtttgctgatgacagcctcctcttttgtcaagccaatgaaaactcatgtctagccatcaaaagagtgcttgatatataccatcgtgcgtcgggtcaggttcttaatccagagaaatcagttatgtctttttcgcctaacactacgctagctgctcaagtattctttcataggcatctgtccatgcctatttgtgaatgccacgaaaaatacttggggctgccatcatactccgggagagataaaaaggaaatgttcagtgggattaaggagaagatctggaagctcatgcatacttggaatgaaaaaaaaatttctgctggtggtaaagaagtgcttctcaaagcggtagtgcaatctattcctacttatgcgatgagttgtttccggttacctatgtctttttgcaaagttgagtccatgatggctaact

SEQ ID NO: 147480 - DNA, 621 bp, Cannabis sativa
aacacatacatactctaaatgcttgcatactgcctaaaatggaaagcggtaaatagatgatcacacaaacagtaaagtatttactctcaatacttactgcacaatgagtggagcttttcactgacgataaatgtacatgttcggctggtctacaggaaaattaaataccttggcgctctgataccaaattgtaatgccctaaataattaggcacgctacccaagttacttacgaaaccctaatcccctaaacggtatttctaatcaaaaaggtgcagaatttaaacttttgtattaaacgaaattaatataaaacttgtaatatttaaaatttacaacagttgggatccctaaaatatttacaaactttattacaagtctttttctttcagtcggcctaaacgacaaaatagagtttcaaaatatatcactggtagacccttaacccgcttggtgtgatgtggctcggacatgtacattcttcgcccagctcatgaacacatagctgatcagcaaaagcgttaccctatcctgcacagtagagcatccgtgagccaagcccagcaagacagtataaatcataacaataacaatatgttcatcatgctatttaaacagtaat

SEQ ID NO: 147481 - DNA, 612 bp, Cannabis sativa
  modified_base (38)..(65): a, c, t, g, unknown or other
  modified_base (473)..(481): a, c, t, g, unknown or other
cgctcttccgatctaattcatattaggatgttaatgannnnnnnnnnnnnnnnnnnnnnnnnnnnggtaaaatatttccaacaactgatgccttaagcagaacggggcagagtcagataaatactgtgaatcaaatctcccaactgctagaaaatgagatgactcgagctaagattgagttggttgtagggaaattagctaatattaccctgcaatctactcttttggagcgaatcaaagaagcatagttgcaagatccatagttagtgaaatcgagagatagggtttcggctgggaaacctagtgactttacagtggatgaaatgggaatgttgcgattcgggaattgtgtttgtgtgcctaaggatgatggtatcaaaagggagactatggatgagtctcatacgactccttactcagttcatctagagtcaacaaagatgtatcaagacctgaaagccatgttctggtgnnnnnnnnngaagaatgacatcgctgagtatgttgcaaagtgtcttacctgttagcaagttaaggttgaacaccagaggcttgcagggttgttgcagccattgaacataccagagtggaaatgggaagatattgctatgg

SEQ ID NO: 147482 - DNA, 529 bp, Cannabis sativa
tgtgctaatcaattttctactttgtgtatttattttataggttttcttaaattgtttatttaggctatgtgccttttttgggatggcctcaaatggttttgtctaaattttcggggtatatatatcttttggctcgacaattagcatgttggctgaatgtccatttacatcgacgtttgtctttgtgattcaaatcactctatcaaaatatatacggtaatcatttagcactgtagtctgtactcattaatgagcaaccattaggggtggtaaaatgtatcattgtgtagtgttcgtgttatatttatttgactcgcttctacattttattttaggcgtgtctacccatttttgaccattgtctaattttctcaacactaacttaatctgcaagaaatcgtgtcgtgttcgtgttgatccactttaacctatttgctattaattaagttggagttgtataaaaatgataaatttcaaattctattaaaaaatttatgtacatttatttatataatttttttatatataa

SEQ ID NO: 147483 - DNA, 591 bp, Cannabis sativa
  modified_base (205)..(208): a, c, t, g, unknown or other
  modified_base (529)..(540): a, c, t, g, unknown or other
tcttcaatcaagcccaacgagcgagggcaccagccacaagattcacagatcttggaatagccacaacactcatagacccaaactccttgaaacaattaacacaatctcgaaacaaaggatatgatccccactcaaacggaacatagcctaccttaaagtctctcgccaccagagcagagaaatacaaaatttacatgttacaaannnnttataagatctattgacaattagactatgattaaaatcagatcattatctgtcaacaagttaataatagcaatttagatcaaataaataataggtttgttaaaaaaaaaagtttttgaataaacaatttaaataaaacaaacacaatatccatgtagcaaattgtgaagtaagatattaatataattaaattattattttaactaactaacaaaattttaaaatttaaatatctttttcaaaatttaaaatttaaaaatgaaactaattctaaaatatctagattttattttaattattttattaaattaaattaaatatnnnnnnnnnnnnatgatttgaaaataaccaaatagatattttcaatattattttctaatctta

SEQ ID NO: 147484 - DNA, 545 bp, Cannabis sativa
tgtggcaaggacacatacattgtctccccagagataaaaaggggaacccatgtctcccaaaccataaattcaaaaataagttatcaagtatattggaagatagatttaaggctgggcaagattatctacttgataggttaagttgatatgagcatcagacagaacttcaacagctgtagcatcctctgtagctagaagagaagagtcttttggatttgtactatctggaagagtgatctcatgaatatccttatcattatctctggaaactttctctccagcgtcaagtttcaagatctgttgtaggagcgtttctctttctacttgtcccagcatgtccaagacattcttattgattttccaaagctcagaaagggcaaccaccaatgaacgcttcagggcctcttgatgctccgcctcagctcagataacctctcttccaacagagaattttcctctttaagcttctcagcattagcctcagctttctcaagatcttcctgttgggaattattttacccggatttagatttactaccatgtat

SEQ ID NO: 147485 - DNA, 798 bp, Cannabis sativa
tcaatgggtttcagtttcaggctttagagggaaggagagagagttaattgggtttttgggggaagatgagtggactacggcctgggcttggtgtctaaagcccattaatagtacagcccaattttgagcctatttaaatgggttggtatttttctaaacccataagtttttggcacaataattttagggattatttcacaaatacataaaaatgacaaaaaaaaattacaaaagtacgattgtaaagaattttaaatattttcacgtttttttataattttattaacaaaaaatacagttttttgacgtaattttatgttgtactcttatgaatttgttattgattttttgttatttgtatgtaattttcttgttactttaatgtagttttcgtattgttttcatagatcattgtaaaaatatataaaaaaaaagtaaattctattttggaccatgcattttgtaaaagttacaaattggcccctctattttgttaaatgataaaatagacccattattttttaaaatagtacaaataggaccctgagtttaatttttgacaatttttttaatataatcaacttgaagataatttctaacacgaacaaatgtagaaaatttaacaagttttgtcataacacctctaggtcaagttattattaacttttattttcataaaaaatcacttcaaagtccaatttgtaccattttagaaaatataacaaaatagagggtccaatctgtaactttagggtttggagtttggggtttggggtttggggtttggggtttagggtt

SEQ ID NO: 147486 - DNA, 744 bp, Cannabis sativa
ggtaaaattaattccaacaagaaggtcttggcacgttggaggaacagttgagtaggcgcggtccgatagaagggagggatcctgacccactacgtaagaagctccgggcggtccatggcctggaaaccaaaggaaaagaagaagcggtggcagtactcttatacatgcttctgaaaattgaaagggaccgggccctcatttaaaggatgggaccggagtccataaaaatcgtctttaagtttggccccctttttggggacggaaacaagttcataaaaatacaaaatctcagcttggctgggcaagccccagatcctggcagcatacagaataaataagcctgaaagcaggcggtaggcttggggaattaattgataaggcgcgtggcggacaaaaatcaataaattaacgaagtaatcttaaagagggagcatggccccggacatgaggtgggtttggctcgaagctccaaaccccccataattgtgattgggcgtctcctcatctcgaggtaagcggtgaaaggtcccggaagcagatggcttgatgccggacacagtcacgatcttcacgagctggtaggcacaagtcaaggtggagtgaagctcgtccgcctcccatccgttagcgcgagatgtataattttcctgggccacgggatccttcataacctcctctaaggtggctagtggaactgcccccttcttggaagactttgacccggatgcagaagcagacatattg

SEQ ID NO: 147487 - DNA, 817 bp, Cannabis sativa
  modified_base (205)..(210): a, c, t, g, unknown or other
  modified_base (786)..(791): a, c, t, g, unknown or other
aggtcctaagttcaaatcccctccccaaagtaaaaaaaaaaaatatcttgcaaattttaaaaaaatcagaataatttacaatatagaaaacagtgttcaaacagtctatttcacacgtgtataaaataaaatagtcacacgtgcaacacactgtttggatgtcgtttttgccgtgttaaatttttttaaaatttcttaaaatttnnnnnnatgtcttaaataactataaagtacatgaacacgaaaaaaaattgactaaaaaattattttggataccaaaatagataggggtacattgcatctcttttaaggggtgtattgtagattttttttttattttttcttaaaaataatctaaatttaaaatataacaatttctgtgtggatatatttactgtaaaagtaataattttatttcttttatgaatataaaaagaaaagatatttttttttcttttgtgaatacagaaaaagaaatattagtttaaaaaaaaaaaagaatacataaaaaaaaatatatttatttttggcgtttagctttggtttaaagatagcaaatccctcgtgacattttgaggggtctagaacctcaagagcccattagcttttggattgaattggtagtttatagtagaaattacacaataggaaaattataagtgttgggaatattttaccagtatctagatttactaacaagtatgttgaattaagattccaaatatgaatatatctaaaacaatgaaattaaacacataagagttcagaaaaccttacattgattgnnnnnnaataatatgactccttccgcttagat

SEQ ID NO: 147488 - DNA, 625 bp, Cannabis sativa
  modified_base (296)..(297): a, c, t, g, unknown or other
actgttcaatcaccaagggttggtcaacaacaccaggatatgcataagaggatagctctacaaacttcatgtaaaattcattcacagtcagatccccttgtcttagacaatcaaatactccaataagagccctcctgtgagatggactaaaatattgctccctaaaaacttcctcaaaatcacgccaagtcatcccatcagtttccattgtcctagacaaggtctcccaccaatctgctacaccaccctctaacttggacacagcaaaagtaacttgatattcctcaagtgttccnnttgtgttgaaatttttctttatctgcctcaaccacctttcagctaccatgcgatcttgtccaccctcaaactcaagcacttggatccgatgaaagacttgaaaatggtgactctatcgagcgacaggagccatctgttgagcgggagctgctcttaaggcttcaagaagggcgttcatagggaattcaacttgtggaggtttgacattatcttgaggggcgtcttctccacccgttctctttgtcttccttccttttggaggcattttcttaggtctgagaaccaaaagctaatcagttagcgaggattggatgctaataatataaat

SEQ ID NO: 147489 - DNA, 615 bp, Cannabis sativa
caagcctatgaggagaaacaaaaataggaaaaacaagcgaaaggagaagatggagaaattactaaagctcaccttagaagaagaaaattctaacaacaataaagatcaaaaaggaagaggacgtaaccaaggaagtgaacgtggacgtggtcgaggacaacgaagagaaagagagggtggctatagtaacaataatttcaacaatggagaacgaagtcgaaattcacaagcaccaacagggcgcggaagaggaaactcattgtcaaggagtgacaaatctcacatcaagtgctacaattgcaacaagtacggttattatgcctccgaatgtagatcaaggagggtcgaagaaagagccaattttgtcaaagacaaaggtggagaagaaggaactttgttgcttgcctataaagacaaagatgaagctcaagaaaataaatggtatcttgacaccggtgctagcaatcacatgtgcggagaaagaagaatgtttttggagctcaatcaaatggtaaatgggaatgcctattttggagatgaatcaaaaatacctgtggaaggcaaaggttagattcttatacgcttgaaaaatggaggccatcaattcatctcaaa

SEQ ID NO: 147490 - DNA, 607 bp, Cannabis sativa
catcactatgaaacagataaaacggttttgaaggatgataaaaagatttaatgtaaggtttacgttggcttttggccaataaacaactttcacattgaaaagacgaatgatttaaccgtttaaatagtgctggaaacaaatgttttttaaaaaaaaaaaaaaaaaaaaaaaactaggatggcctaatctataatgccaaaccattatttgatcataaacagaaagagaactaatgctactaaatccttgaacaattttattttcagaagctttatcttcgaaataatagagtccattaatcatcctagcactgtcaatcgtcttacccaaactctggtcctgtaaaacacaatgagattcatagaaaaccacacaacaattagaatctttagataatttgctgacagataagagattgcaagaggacagatttaagatctatccctttagaaatcttaattaaacctttttcctgcaatcgatgagaaattaccatcagctattttaactttttgataacaacttagagcatttatttctaatactttgttacctgcatatgcaatagaggcagtaggaatagcggatgaggacgaggtagtgttca

SEQ ID NO: 147491 - DNA, 560 bp, Cannabis sativa
ttttattattattttcctgctttttaatttttagttatttaattattcaaccttattattgattctaccaaatagaaacaagaattcaattaatttgtacttagctaaagtcctcgtgggaacgatctcacttacccgagtattacttgttaaaacgatacgtatacttgcgtgttggatttatcacaacaagttttttggcaccgttgccgaggaatgttttaattgatatcaatatagttgaattctattctaatttggttcctatttccataactttactaatattttactgaatgtgtttgtcctaaaaggtaaatctcaatgttataccttgtcaattttgtccaacaactcgatgagcaattctattttgcttgggggaaatttaaggagctcggggagagttgctatcctaatttctcaagttggtgttttactctgttcttctataatggacttgatgatgaaacaaaaagttgggtggattttttagcagaggttacttgagagcctttgttaaggagaggccatgaagcaataaatctgttgaatgatat

SEQ ID NO: 147492 - DNA, 542 bp, Cannabis sativa
tttttttttttttttgggtaaaagttactattgaattttgttgatataaacttctacttacgctgatacttaaacaatatacaaggacagaaatgtaattacaagtaaaaataagttggccttcggtctctgaaattcttaacagaaattagttagaatggatttggttaaatccacacctaactaatttctgtatctacctaactaacagatactgaagaaaccagaagccctaagtgctatatatacttgcatcaaaacccaaatctagtcagttgagagagttcttcaagatccagggtttgaacacttgaagaagtagagattgatgcttgtacatgcacaagaacaagaaagttagtatagttagagagagggagataaaacacagtatatgacttggaatctccatctttgtatatctgaaccatctttgatagtggaatcgagctctcaaattcgaggagcaattcaaacggagacgtatccaatttattggtgaacttcgggaaaatctggtgtattctaactctaatctttct

SEQ ID NO: 147493 - DNA, 561 bp, Cannabis sativa
  modified_base (108)..(126): a, c, t, g, unknown or other
  modified_base (499)..(501): a, c, t, g, unknown or other
tgcattggtagtgtccttggatttctcattgtccaatattgtgcccaataaactatcacaaacattcttctcaacatgcatgacatcaatattgtgtttaagaatatnnnnnnnnnnnnnnnnnnnctcgtagaagatgctttttttttctgccaattttaattttctgcaactcgcctacgcttcacaccaccaaatagctcatgatttcccagagatggggtgggagcttgtttacttgttctagtacttcttcacaagtaaaacgtcttggaggaggtcttctctcaatttttccgtcgaatggttatttggcaaaaatcttctatgacctacgtaagatgtcttaccaattactcgaatggaataggtatcttcattgcaagtgggacaagctttgtatccctgaccactccaactagacaaataactatcattaactgtccatagaagagttgcgcgcaacttgaagacagtgttggtttgacaatctctcgtnnntactccattaacccacaactccttcaactcatccaccaagggtcttaaaaatacatctat

SEQ ID NO: 147494 - DNA, 777 bp, Cannabis sativa
aaaacaaataagcaagtaaatagaatcacacattttaattatcagtaaaaataaataaattaattattaggtttgaaaaattaaaaaaaaacaaataaacgagatgactcattttaattatcattaataaaatttaaatgggagtataattgtaactatttttaaatttaatttagaaagttacgcatgtcactcaattaagaagaaagtttccctagcacacttcaaaattatattacatattttattaacatattcataattttatatgtaaattacaaataaataaataaaaaaatatatacattaaatatatataaataataataataaatatgcatgttttatttataaaattattgattaaattttaataaatacattttattaacaatattatcacaaatatttttataataaatatattagattaataatttataaacattatcaataataatataaacacaatatttatacatgatgtcatatttaattataatcttgttgatttttttaacacatgtttgaaaaactaataaacatgattgtttattcagaataaaaaaaaataatataagtgttcgatttttaaaattatttatgaacttttgataaataaattatattaattctatcaaattattatcataataaatatactaaattaataataacataataaaccttaatagtactaataaaatatttaataaatatttatatatatatacggaacacttctcaattgatgggtactaaacaaatttaactata

SEQ ID NO: 147495 - DNA, 790 bp, Cannabis sativa
gtctaagttccggtcttggtacacgaccgtgtctgggatcgagttccagtctcaatttgggtctgaggctaggtctgtgttctattctaggtctgcgtacgggtcctggtcacagtcctagtcttggtctagggtcctcgttcggcgattgttgttcaggttctaattttgggtcccagtggttcgggttttgttcttcgtctggcttctggtccaagtctgagtcgaagatctagacaccgactactggtctgttctaggccctgttacccgaagcccgagtcaagaactggtctgcaattggttcaggtcctaggtcccatttttaagtttgggttctggatcgagactggagtgaggttctaggtcccgacccttgttctgggtccctagtctggttccatgtttgggtctgagttccggttcgggtttgggttccaagtcccagttttggttgggatccgggtccggctccgaattcgggtccaggtcttatttggagtccgggtcctggtccggctacggttctggatctaggtccaatttcagttacgactccaagtccaagtcctagttctagtgccggtcaacttcgtgttttggttccaattttgggtcacagggtaagggttcgggtccacttttgggtttgggactaggttcaggtctgggtgtgggtcgggtactaggtcccggtgctagttctgtttcattggtccctatcctgattctgggtccaggtcccaattattgtgtgggttttggtcccggtctaggttcgggttcgagt

SEQ ID NO: 147496 - DNA, 1390 bp, Cannabis sativa
tttttaaagaggttcggccccaaggaattcggtaatagcctactccccttgatttgtattgacttaagaacaaagaatgcagtgattcttctcttagagcttttacaatgatatctttgagtgtatctcttagataagttttttcgaccccctgctcagtgagaatagatcactatttatagggctacaagccttgagggaaaagtttcccttctgtttacaatgtctatatttggtaagattacacattaaatacagaatacactgattaagggatctggacagcttgccatatctctgtattataatcccaaaattatagggattgcttctgtgattcacaatgcgagtgttgaagttgttaagtgttggcatgctgttcgaattgtccactgttcggccaggaaggcttcctccgtgcagatgtatgcggtgttctgttcggcatatctctttcgagcagatatgtgaagttgattccacgtgtcaccagtatgtgatgccacgtcagagtacaaaaattgggataacagtacttaagcaagacttttttaaaaatatgtatttattcaattaaaagtggggaaatgttatattttgattgatgaaataaacattctaagtgtgtcacaagtgtgtcagacattttaatatagtggattattgttatattattttatgatataataagtatagattaaaatgtgataaatatattatataaataatatatattaagtgtatggtaaataaatgtgtaaactatagttttaacctatgcttttgtaacatatatgttgtaacttagagatgagttacaatttgttatcacttgtaactcttgtgttgatcacacattattagtgtaataaaatggttgttacacaatttgataataggatttaaatgttatgaaatatagttgttacaaattatattaatactcatttatatgagagaaatgagatggtgctcatttataagtgtgatcacctaaacactataaaaagaagtctttggtgctcatttaggatgagaagttttctatcaaaaaaatacattgtttgaaaaccctaaggcttgataatttctaaagctatttcctagagaatttccttagtgcttagagataggggaaataagcttttggatgtaatatcttgtttaagtcatggtgatcccactaatctacactcaaagttgtgagtgagtgtatatatatatattatacctttttaatgtatcttgattttctttcgttgtaataaaatctctaataggtttataatttttgttgtgtatagtatatcatttatttaagatgatatttagtatctatttaattatatagaatgattaggtatagttttttttgtatgtatatatattt

SEQ ID NO: 147497 - DNA, 664 bp, Cannabis sativa
attcaaaacaaaaaacaatataaattacacatcacaacataaattttttttgacttcatttttaatttatatcataataattaagaaaatagtattttatcttttaagggatagatgaaactgaatatataaatgttattaaaactaagtaagatactgtaattttttcatcttattttatttttagtttttatgtcgaacgatttaggaattaggcgattaattatttagttcgtttttctataattctaactggttgtgtattcaataaaaaaatgtccctattagattgcatactattagtatagttgattgctatatattaataaaattacatgatttattctatatatattataaaagtacaactaaaaaaaaaatacttttggtcacaacaaaacttgaaactaattataaatcaccaaatatatgttgtgactaaaatttccgtattagttacaaaaatcacaattaatttgttgtgactaaatatatttttagtcataatatttattgtgactaaaattaaattaatgacaacttatgtaaatagtatattttagtcacaaataattttttattatgactaaaagttacatttagtcacaaaaaaattttgttgtgactaaaaagttgtcactaaagtagttgttttttgtagtga

SEQ ID NO: 147498 - DNA, 1753 bp, Cannabis sativa
aaagcaataaaactaatcctaccctgactctctaattcagccctagcaaagtcttgaactacaatgctggcttcgtcatccccaagaaagctgtctgaggggagaaatcagctggaggacaagtgtgctgaatgatccaggggaatgggcgcaggaggtccagagcccatcggggactgacccaagaaatggcccaagtgggagaagtagtagtctttggcatgatccccccaccgagtggaaggcatcctaaacttacaaagctcatcaaatcctacgggcctacattgggtatactctcggatagaggagacatcgtgaataactaaaggagacttaccagaacctgaggtactggcatctggagcaccagtgttaggaaccggacctgaaggcttaggcctggagggcctccgcttcggagcagcttccagacgaagggtcctcccagctgcagcttgggccttgatgtaagccagctcctactccctccagaagagatacttctggtaccgctcctctgccgaagtgattatgtccacccggagcgcccttttcgtggccggagtccttacgttcgaacagatgaccttggaaaggttaaagtcatccactgactgactctcggatatcagcttggcttttcaacagttctctgtcgtgactaagtccccaacgttgagggccttcctgtcgtaagtagaaaaagtcttagcccgctgaaggaatacttaagtaggcgcggtccgcaggtagggagggatcctaacccactccgtaagaagctctgggcggtccatggcctggaaaccggaggaaaagaagaagcggtggcggtactccttcacgtgcttctggtaattaaaagggactgggccttcattcaaagagtgggaccgaagtccataaaatccatctttaaatttgtcccccttcttggggacggatacaagttcgtaaaaatataaaatttcagtcgggctcggcgaaccccagcttcgggcaacgtacaaaatgaataaacctgaaagcaggcggtatgcttgaggaatcagttgatacggcgcgaggccaacaaaaactaaaaaattaacaaaatagtcctgaagagggagcatagccccgaacatcagatgggtctggctctaagcttcgaagcccccatagttgtgattgggtgtctcctcgtcccgaggcagtcggtggaaagtcctggaggctgatggcttgatgtctgccaccgtcacaatcttttcgagctggtgggcacaagtcagcgtggagtggagctcgttcgcctcccaaccgttagcacgggacttaaaattctcctgagccacgggacccctcatgacctcttccagggtggctagttggaccgcccccttcttggaaaacttggagcaaaatgcagaagcagacattttggttctgaaaaaatagagaaaatccagcagttaggccccaaaccaaatcctaatgtttaaaaaaagggagtgggggtcccctaaccgctggaaagaggccccctccggacgcttgccaaatagggaaatcccaagagactttccttagcaagcatcaggtgcaaaatctcaaaggcagtgacattgcaaaaggaaagagaaaaaagggaaaataggcgaagccgagaaagcacgaactactctaagccctaaaggcgttattacgaaaggtaaaggcgattcctcaaaagaaacgtagtaaaaaggagcaatcaagacacaaaaaa

SEQ ID NO: 147499 - DNA, 673 bp, Cannabis sativa
  modified_base (646)..(646): a, c, t, g, unknown or other
gaaaaaccttagtattgggttaaagggcaatttagtcttttggtttatttgagggttaggtggctggttatgttagtgacacctagcaattcctaagggcagcaaggattaataagtaatcattttcccatttgaagaaaatcaagaaaaatagaaaaaaagagacattacccttggagctccctctctctctctttcagctgagacaaaacaagagaaaaagccaacttttcctcctcaattttctggaattaagctaaggattaagtgctcttgaagtggaggtaaaccctagaactcttgattgtgtgtttttaagctttttacttagtttgaacttgtgattttgagaaatagtggctgttaggtttaggtatgcttagggttcgaattctaagtttattttgagttgattttgagttctggatgttagttttgagctttgatgatgaatttgagcaagcttgagttttgaaactcaagtttaggtctttaatggcaagttgagattcattgaatttttctatgaatttctggttggattatgttgtatatgcatagtacaggtatattggaaaatttggtagagtttggcttgattttgaggtcttgggggcatttttcgggttcccagcacagaaccggnattccggttctgggggacctgtagcaa

SEQ ID NO: 147500 - DNA, 632 bp, Cannabis sativa
aatataaagaaatcggttatatttatcaactagttaaaaatttaagacaaaaaactagtttcgtaaaataactaagataaaaactcacacacaaaaacttaaataaaacagctcaaacaaaaatatccattcaacatgctccaacccaccaaataattacacccataccatatctacctcaaaaatactcattcattatggtatataaccggttctattttaattataaccgatttaagttatttcgtgttgtttgtttttattcattataacattattatagaaccgattctaatttaattataattagtttaagttagtttgttttatttatttttattcattaagttacaaaaccggttatatttcaattataatcggtttgagttattttgtgttatttattttcattcattatattataaaacctgttctatttttgtttatatttgagacatctacttcttgtgattttttcagtgacttttttcggcgacagtgactttttcggccacggtcacttttctggtaacttttccagtgacactaacttttctggtaacggtgacttttccggtaaaacttattattgtttacaaatatgagatttctatctttttttacaaaaatat

SEQ ID NO: 147501 - DNA, 623 bp, Cannabis sativa
  modified_base (130)..(156): a, c, t, g, unknown or other
  modified_base (200)..(215): a, c, t, g, unknown or other
  modified_base (335)..(346): a, c, t, g, unknown or other
caacataattaattttgaaataaaggaaattaatttttcattggtttattttaaaattaatttagaataacacacttagtttaaggaaatattctagatagtaatatctagtaactaatttatattttcnnnnnnnnnnnnnnnnnnnnnnnnnnntttaagttaaaaattaattttagaccaacttaaattaggatatnnnnnnnnnnnnnnnnattagaattaataattaagtttttattaagatacttaattatttgtttctatttcaggaaatttaattaaattagaaaatatatttatgtttaacattaattttttaattaattttagannnnnnnnnnnnagaatattttcttagatattaaactaataattaagttgaatttattctatctacttaattatttttattttaatgaatttaattaaatagaacgttatatttaagctggacatttttcaatttcaaatcgacttgatttagaatgaattttagaatatattttattttattttaagtatcatttccccatgctaatttcgaaatacatttattttaaaatgtagatatttcgaaatttttcaattttgaaaattagactaaagttgaaaattaattt

SEQ ID NO: 147502 - DNA, 616 bp, Cannabis sativa
  modified_base (96)..(97): a, c, t, g, unknown or other
  modified_base (557)..(581): a, c, t, g, unknown or other
gagccagtaccacagccaagtaataaagaacataaactgacctggaaactacatgtggatggatcagcaacaaatcaactatctggtgcaggaatnncccttgtcacacctgggggaaacacctgcacgctgcagtcaagttcggattcaaggcctctaacaacgaagccaaatacgaggccctaatcgttggacttaagctagccaaggaaatgaaggccgaacacattgagatctgcagtgactcacagctggtggtaaatcacgtatccagcgaatacgaggcccgaggagaaaaaatgatagcatatttgagcaaaatacatgacctgctcgcacaattcaaaagctatggtctcagacaaattccaaaagatgaaaatacaactgcagacgcgctagctcgattggcaagcagcaatataggtgacaaggcaaacttggtccctgtcaagttccttgaagagcctagtataactggcacggaagaaatcgaaatgattgacacatccccaaactcgatgacgccaatatcatcctgttggaaattattttannnnnnnnnnnnnnnnnnnnnnnnntatgtttattaacatcctaaatacgaactttctaa

SEQ ID NO: 147503 - DNA, 530 bp, Cannabis sativa
atataacacaaaatattcctaaaagtgctttaatattaaaaaccgtaaatcataaatctataaaacatttgctaaattaagaagaaaatgatgataaaagatgagcagacactaacctgaagtcattgttaaagattgcagagaaagttttcatcttccaagaatacactatttctaaagtattttctcagaaggagagaatacagaaaagcttgtgtttcttggaaaccactacctatttaaatactcatcttagaatgagttttaagtatttataatttggtctcttaacaaattataaataaacttatggtacctacacaatatttctacgataatttagtaccttttttaatagctataatataattgattacttaattctgtattgcactttagcatatttttgtactgtgaagatatgagattgagatatcaacaaattgctcggcaataaatatataattatttttcttaaattatagtactatatctttctttatgattccatcacaaaaaaaaaaaaaaaa

SEQ ID NO: 147504 - DNA, 591 bp, Cannabis sativa
ttggttatctctaataggcgcattaggtctatgccggttaggattgaggatagggagttgagtgctgaccttatagaagtggagttaatagagtttgacattatacttgggatggattttctgtccaagtattcggccaatgtagactgtaagcagaaaatggtgacttttcagccagaaggtgaagatccacttgtttatgttggatcagtttaggggtttaggatcccagttatatctgtactaagagctacggatctactacatagtggatgtttaggatttttggcagtggtgattgactccagtagacccgaaacatttaggcctaaggtagtcagagtggttaaaaattttctcgacgtgtttcccaaggagttgtcgggattgccgccgcaacgagaaatagattttgtgattgatttggcatctggagccgaacctatttccaaagctccatataggatggcttcagcagaattgaaggagcttaagttgtaactttaggggatgcttgatattgggtttacccgacccagtgtgtcaccctggggagctccggttctgtttgtgaaagagaaagatggttcc

SEQ ID NO: 147505 - DNA, 711 bp, Cannabis sativa
atataatatttcaaattaaaaggataaaattatcttttaatttaaaatcttaacataatttaaaaataaaataatcaatttttatatttaaaaactcaaaatttcataaattaataataatctagtaaaaattaaatattattagtttaaaatattgatatttaggtttaaatgataaaaataatattttatcattgaaaaaatccaaaattgaaaaatccaaaattgggtgaaaaaatctcccaaaaaaattggattttcgggtgaccaacacacttgttgggcacaaggctccgtgcagccttatccgtgcgcgtaggaggctgctggcatcctcgttcgcacacgtaggaggcttcaatgcagcctttgtgtgcgtgaaacgtgggcgggcgtgtctgaaggggggttcacgcggcattcagacaggatttgtccctgtcatgcgcacgcgtatgggcttcttgttcgaagcctggtgcgtgcgattgagcaccatgtgcacccaattttcaaaccttcataactttctcaatttttcataaggaatccaaataatattttcagaaagaaaataaaattattttcaaggaaaaattttgtaattcacatacaatcaccaaatagcacataaacaaacatgaacacatccaaatcaacatacaaacaatattcatcgttttaaatccatattacatgaaagtaaatcat

SEQ ID NO: 147506 - DNA, 796 bp, Cannabis sativa
  modified_base (36)..(55): a, c, t, g, unknown or other
taatataaaataaaaagtgtatttcaaataatctcnnnnnnnnnnnnnnnnnnnnaagtgtagtatgtagtattcttttagtaatgggatctgacatgttgtattcaatacaaacttttatgtgtttagtcagaaagtaacactagtagttaatacattattagtacaatgccaaaaattgtatagaatgttccatagactgaataagtatctttcctgtaactttacattcagtctcatcgatagagttagagacttcatataggtttttacacttttccaaaatcactgctccaccccagagtaatcaccatctcatcagtagaccttctagcatcaaggaaagtctagaaacctgatctggtgtagtctaagagtattaaataccacccttatcgactaatatatatagttcctcttcttgatcttatgattcatttaattgtcttcaaaagttcttttcctggattaatctgatacctactcattacttccactcaacagcagatgtctggtctaatgcatagcaaagcatatctaagacctctcactgttgatcctaaggaattctttcgttggcctttatcttttatggaatagttaaaaattttccttagataaataaaatctatgtctaaaagtcgataagtttctatagattgccattagaaaaaagctccagcatcttactaaagtaagttgatggcactaaagtaagtaaactaccaggtataccacaagcaataggtttagataaatgcaaaccaacaatactaggaacaagaaattttgttaa

SEQ ID NO: 147507 - DNA, 613 bp, Cannabis sativa
  modified_base (580)..(587): a, c, t, g, unknown or other
gtaagggtattttggtcaaactaactatcccgacttaaaccaatatctcaatttttaacctagtccggtataattcaaatataacatagttttaaccatcgtgacatttctcattactccatcgagttccacagttgtcaggcctaaaaatattttattcgaattatggtatctacgatatccacatattctaatacaagctccgtaattaataaattgcgctttattattaatttactcatatttctctaatcaactcgtaattagtctacgtaggattataatcctactctaatactcactgaatcacatatttattaaaatatgtccaattaaaatatcaatatattttccgagatattacagcagtgattttggagaagtgtaaaaacctatctggggtctttaactctaccaaagagactgaatgctaaagttgcaggaaagatacttattcaatctatggaaagttctatacagtttttggcagtgtaccaacaatttataaactactagtgttactacctgaataacacaaaagtagttatcaaaaagtaaagaatccagtatccctagaggnnnnnnnntatagagaggaatttcacaatatcaa

SEQ ID NO: 147508 - DNA, 699 bp, Cannabis sativa
taacttaaaaaaataatttttagataaaatctctaactaattataagttatcacctataaaaatattttgcactattgatactcaataaaaatactcaattgaaaaatatttgtattgaacgcatagacaaattaaatgtggctatatagtaaatacaattttttatgcaacactagaattatcattttcttaatatattattttaattttctaacaagaactaaaaaccaagctaataaattccacaagaaaaaaaaataacaaggctataatataaattagggaaatttgtgtcaaaaatacttaaaaagtttactataatgcagattaatctctaatctcaaaaaataacgataataatgctcaaggttacgtattttgtaagtcttatagtcctaaatttgacggatccgttaagttattcataactgacacatgttgagtcattattggtctaaataataattttaataaaaaataattaaaattaaaaatatattttaaaatataacctttttttctccttcttctactacctctagccacacccgacccctcttcttcacttttttttttcttaaactcaatcctctcatagccatagaagaagtgtggaaagataaaccttttaagcctcgaccccaactccaaagctgtaacgtccccgcgtcaagcttccattgggcccttacacccac

SEQ ID NO: 147509 - DNA, 699 bp, Cannabis sativa
aatagtaagaggataaatgcacacttgtatatgcattaaactagactcttactactgagtgggagccatcaaagatgtaatcaaataaggaacattaggagacaatcaagaaagaatctcaaaaaagtggcctatatatgttagaagataggggtgtatttggaatccttatatctacaccaactcagaaattaatgtatgagatggtgattactctaggggtgaaagaataaatctggaagtgtgtaaaaacccatctatagtaatagttcaactagtgaaggtaaatatctgagttactacttttacgagacactagaaagttattcaaactgaagaatgttcatgactaatttatctctattccattttggatagaattagagttgtgtcttctatacatttagatacacttatcaagcagcaaagaattaagtgtccctagaggagtaatacatataaaaaatgatgatctttaatcttttatgaatacaaaaggaagtagtggtgaacaaagttatttctagttacaaccttccaactcctgttatttgggtatagttaaatacactacacttgatatgaatgtaaagacagtagattagttgaaatgcacttctagttttatgttagtgcaagtgagagttaattgggattttatgccctaaataaaactcatttcaatataatattatttgc

SEQ ID NO: 147510 - DNA, 1324 bp, Cannabis sativa
taagtagtcgtcatagttcttggcatgtcttccttgttatgtacaatcttcctccctagttagtgatgaagaggaaatttaataggctttctttaattatatcaggcccgcaacatcccgcagataatatcgatgtatatttggaaccattgattgacgatttaataaaattgtatgagaatggtgttcaggcttgtgatagtttttaaaaagaattctttaatctgaaagcaatgttattgtggactgtcagtgattttccagcttacaataatttatcaggcttaagcacaaaaggttacgaaggttgtctgatttattgcactaacacatgggctcgtcgcttggcaaatggacacatgatgcgttatatggatcacaaacggtacttgcctacaaatcatcctgatagacgaaagaagaaagcattcgatggtactgaagatgaagatatggctcctttgtcactgtcaggggaacgaattctccaacaagtagaacttgtagattttaagtatggaaagatgcaaaaaaataagaaacaaatgtttgtttttaaagaaattcaatcttttttcatctatcatattggaaaagtttactggttcgatattgtttggatgtcatgcatattgaaaaaaatgtgtgcgagagtattatcggtacgttacttgatattcctggcaaaactaaggatggtttttatactcgtttagatcttgttaaaatgggtatacgacaatctctagcacctaagaagaaaggtgaacgattatatttgcctcctgcttgtttcactttgtccaaaaaggaaaaataaatagtttgcaaatcattttcaaatatgaaagtacctgatggttactcgtctaacatcaaaaacttagtaaatgaggctgaattgaaactaatgggtatgaatacacatgattgtcatgcattaatgcaacatctacttccaatcgccattagatcagtcttgccaataaatgttcgagagtgtttgatacatgtttgcattttctttaataagttatgcgagaaggaagtagaactagataagttagatgtattacatgaacatgtagtcaaaatattgtgcaacctcaaagttttttccgccatcttttttcgacatcatgatacatttaatagttcatctagtgagagaagcaaggttgtgtgggctggtttgagcgagatggatgtatccatttgaaagaaatatgaaggtacttaaaagttatgtgcataaccattatcgggcagaagcctctatggttgagtgtgttggaaattattctaccaggatctagatttacta

SEQ ID NO: 147511 - DNA, 530 bp, Cannabis sativa
gtccaccctcgtcttcgtgctaactctccttctagagaatgaatttcttttgcttccgtactcatccataggatgatggctcgtactaagaaaaccacgcgtctggctgacgcttctgacccccaagtggctcggctcgccactttgcccgacgccgaacaggatttggcggtcccaatggaggaggaccgtgagggggacgccaaagtccaggaggttgaggagctagacgaggcgcgtccgggcagtcctcccgctgctgagggagaggaagagattggacaccctaattttggggagtacaatgacgctgggcaaccagtcgatactgacggggacgtcctggttgagggcgttgactacgtcagtgaggagtttactgaggcggttcctcacaggaggcagggtgccttggccgccaggtgtgtaagtcctccgtccaagatttcgaaggcacgcctccacactttcgaccaggacggatacctgggcgagctggactgctacattcccgcccacgacaatcgtgc

SEQ ID NO: 147512 - DNA, 642 bp, Cannabis sativa
tatcttaattggcctagatctttaatctcaaatttgctggagaaaagctgcttgagatgataaatttcttccacgaaattatctgtaaacacaatatcatcgacataaacaatcaatgttgttaatattctaccaactgagtgttttttaaacaaagtatgatctgattggcacttggtataaccatctcctttcaacacttttgtaaacctgtcaaaccaggctcgaagggattgcttgaggctatagagagattcttttagtttgcacacttttccctttgagaatcggtcctcaaatcttggaggaatgtccatgtatacttcttccacaaggttgtcgttaagaaacacatgctttacgtcaagctagaataaaggccattcattgttaatagcaatagataagagaactcggatggtgttcaacttagcaacatgagaaaatatctcttggtaatcaatgccatatgattgggtgaatcctttagccattaaacaggctttgaatctttcaatgctcccatcagccttatacttgaccaataatatccatttacaactaactgtgtgtttgccattaggcagatctgtgatgatccatgttgtattcttttcaagtgcttttatttcctccattgtg

SEQ ID NO: 147513 - DNA, 803 bp, Cannabis sativa
atatcatcaatgggtaaaaattagtattatcatggatgttgatgttgtacgagctttttcaatatgttagtttgtttatagttgttttgtagttttattatagttttgcaacttgcatatgctcattcattatatttactttatttgtaaaatgcaggattgggttaacaaattcagtcacaatgatttctacagatcgaagtgcgtatgtatgagcaatttctctgttattgataacattaagaaaactgtatctgtgaatttgttaacaatgttccgagagacccagtttgggcatttttttagatattcctgactttgtttttcgctcccaagtagttcacaaccttcttttgagggaggtttaccagcccaattccaaagaattttgggctaaggttgtcggtcgttgtatgcggttcagctccgaggagttttacttgatcactggtcttgattattttggggattgcaataaattgttgttttcccaggaatcaaaccagttaattgaggtttgtttcccaggcataaaaacgattgatcataaggctaaagtggatgctttcttgggcagtaggtggggtcaggatgaatccttaggtttgaaactctctgtgttgtatttcatccaatatttccttcttagcaatactccggataagcaagtttgtaggtttgatttaaatgtcattgacagcggttgatgggatgagtattgttggggtagggagtcgtttgagttgactattgattcttttaaaggcagaatagagcatggtattaaaatgaaaaataaaaaa

SEQ ID NO: 147514 - DNA, 1067 bp, Cannabis sativa
  modified_base (62)..(72): a, c, t, g, unknown or other
gaaataaatcatgtgaatcatgcagcataaaagcgatttctgatcttttattaattagtaannnnnnnnnnnttaaaatgagttttatttaaggcacaaaacttaacagaagggccatgggctttacatctgtatcaattcattgggtaatgcccgagggaccttagaaaatctctagcacttgtcacatttcacataagcttttgaatcttctatcatggtgttaggtttttattcgtactatttttaggttaatttaagcgtgtttttaaataagttttactcttattttgagtaatttgctttaaagacgcttagctttaatgtaggaattagcagataattaggactttattatgaaaattatttattaatattgaattaattatttatgatgacttattttaattcagaatgcatttttacgtcacatatagaaattttgtaattttgcatatttttgtgcccaacaacattggaacgcggtgaatggctattagaatcacatctttgtatttttagtttaatgggacaatattttagacattggaaatgttgagaatagtcgggattttgaaatttcccaaaataccccttagtgccattttatgacttttagtgtgggcaaaggcattatggtcttttgccttatgggtttttgtcatttagtgcgagtttaatttatgttatttgatttttatggctggtatgtagttagataaagatcatttattcatataatttttttaataaaaaccaaaatttagagaaaaagaaagaagctctctctctctccatagttctgtctctcgtgaaccctagaaaccagcaatgaaatcaattcttcttcagcaattcaagcaagttgcagcaagttttagtgtgaatccaagccaaggtaagtttctagcaattcctagttaggttttcttgaattttaagaaatggattttgcatgattttgagttggtagctgctgtgattattgtaggtgtttgaatcatgtttttgtagttagaatatgattaaaaatgttgttttaagcatgaattggtagttgtttgaag

SEQ ID NO: 147515 - DNA, 744 bp, Cannabis sativa
atttcaaacaggttttctcaacaactaccaacccgaaaaacctgttatcattcaaagttccacatggtctgtattaccctctattccacctgcttcaagctctcaattcacctctgtcaatccatctgcaagctctcaagaggcagaaccttcagcatctcaggatcacaattttcaggtaaatactcctgaatctcctactatgtctcacactaatgctgcctccccttcaggtagtgagaggggaacatttccacaacatccttcccgtgtttccagtccaattgcaacaccttttgctccttttgctgatgatcccgaacctgttattgctcccactgctgctgcaatagaacaacctgctgctacagcaggacacccgatgatcaccagagcaaaatctggcatatttaaaccgaaggtgttcattggacaggctgcttggaaccccagttctagagaaccaacaagtgttgctgaagcacttgcccacaaaggttggaacaaagctatgaatgaagaaatcatagctttaaaaactaacaaaacctatgttctagttcctccttcacctgatcagaatttaattggaaacaagtgggtgttcagagaaaaattcaactcagatggaactctccaaaggctcaaggcacggctggtcgcaaaaggatttcaccaaagaccaggaattgactttggagagacttatagcccggtcattaaagcatcgacagttagaattat

SEQ ID NO: 147516 - DNA, 969 bp, Cannabis sativa
agccttataaatagtgatgcatgttcactgggcaaagggtcaaaaacattctggtagagagatattatctaagaattcatattcagagatactgttgtaagagctataagaaaagagatctttcttcttgttcttgagttaataaaaataacgaggattaggctattaccgaactgctcggggttgaacctctataaaattcctgtgtctatatattgctttactatatatcaactgttataaactatttgtcgcttactaaataagacactctgtcgttggctaaaagcgaggtaaacattatcgattgattactttattaagtatatgtgatgtaatcgataagtgtcgacaaaatatcgataatatgttgataatattatgttgacaaaatctcaagatgcatgaatcttaaatgccttaatatcgacatcatatcgacagatcttaatatgcaagaatgacaaaacattggccattacatcaataagatatcaataatatttcgataatatgtcgacaaaattcaagatacaagcatttcaaatgcagactttaacatctaaaaattgtcgagaaagcgtcgataaactatcagtaaaggaaatataagaagttttatataacaaatccagttcaaaaaacatattattacaactaatagtagactaagcctcaaatacgggctttacatgttgctctgttatggcctgaaccgccacagaggccgcagtttcaaggtatcataactttcttatcacgagaggggaatcgattctcctgtcttcttccagacttgcttttccttggacgacctattagttttttctccacaggtaccccaactttcatattcttgatgtgttatgggagaacccaatcatcctcgtcaccaggaagagtgatggtatcatcataatgttggattttatgctctaaataaaactcatttcattataatcagattta

SEQ ID NO: 147517 - DNA, 700 bp, Cannabis sativa
  modified_base (431)..(434): a, c, t, g, unknown or other
aacttaattatgaatttcaaaaattattcaaattcaagttgattcaaaaattagttataagtaactaatttacaacttaaaaaaaatatttaatgaaatattaaattattaaacatcaaaagaatctaattagttataattctttatttagttaaatacatatagtttatcttgaaaaagtttcattaaactaagtgtcttttgcttaaattaatttcaaaatatttaaatgaaaaattcatttcatatatttcaaaattaattatgttgttaatcaatttttattaggttaaactagtttaattaacctagtaatgttattcaaatcaggcaaatgagcgttcacagttggggttattcatgtgagggagggctgggttcaatatgtcgtacccactggtatggtcccctaactctcacacaagacccannnnagaggaatttaaccttaaaatgagcaactgttattaattgaataggcccaattactaattgggcctaaataaaatctatcaaaagtgatcattttatttagcaacctagtccagtttaattacaaaattaaaggagctacctatatgcatctaagcctaaacaaaacatataggctcacacatgcacactgatttggatggatcctatcatgttactaggtttatacatagatgaaagaagattgtaaaatttacctattacaaat

SEQ ID NO: 147518 - DNA, 591 bp, Cannabis sativa
aaaccctaaatttatttcttcacaaccattatctttacacagatctgaaaaataaaaatcacaataatacccaaaaggaacatttatacacagatctgttaacaagattccaaagaaatattatgaaaaaccctaaatgagagagagagagagaggtatcggacagacagagagagaaagagaatagggctagtgatcaatttacctaggttggggtcctcgtcaacggccggctcggtggtcctcgtcgacggcaactggacctattctctttatctgcatcatcgagagagagagagaagagggatgagagagagagagagacagagaagagggctgagaaagaaagaaagagaagagggctcgacttacttgggtcgggggagcctcagcaacgccgtgcgcctggcacggtggtcatcggcgacggcgccggccgtgggtgtaggtacctgcatcgagaaagagaaagagagagagactgatatcaatgaacagaaagcgaaaaaaaaagaaaaaaaaagaaagaaaaaatattattttttatttataattttttttaattttaaattaaattttttaaataatttg

SEQ ID NO: 147519 - DNA, 626 bp, Cannabis sativa
taaaagggaagtaagtcattatccactaaataagggggctgaacctctatacatctttgtgtctctattatcatttattattattcttatctacacatggtaattgtctatcataaatacaactctagttgaccaaattcggaatcaatgatgtaaaataacatcttaaaaataatcttttccaacaatttataactgttgggaatactaagtatacccaacgatttataactataaggaatacttagtattaccaacagttataaaccgttgggattcactatttccttttaaaaaattccatttagtatatatttctcacggttccctagcattggcattggtttttcccagtgacttctttatttcggttctaaatcaatgggaaaaaccttcccttaccttttctaacatttttcatacttgacccctcttattaacctttggtaaacgccaattttatagtagtgtaattacttctttatcctttagtactattaatttaccagtggaaacataatttagatcacatctaaatttctacacaactttctagttctaaaattaacacttaaagggaactaacattcgatccgttacaaaagtcaagattctataattgtaga

SEQ ID NO: 147520 - DNA, 900 bp, Cannabis sativa
gtatttatatatataattatgtcttagtataaatttttaaaaatttctggggggccacagcccctgttggggtgcatgtggctccgcccctagttattattatatcagcactacatgtataatttaaaattaaaatattatattctcttattaactataacaataatacaaataaactaattttaatttttttttattaattattgataagagaatagattttttaattttcaaattaatttttatttaaattatacctgtgatgcttatgtggcaatgatatattaatcacatcaatattttgttagacacatgagataaaatgatcaagagtcatatgtatttttaacattgtgaatatatatagttcgaggagaattatttacgggtaaaaaagttcaaaaaatatgatttagtagtaacaatagttcaaggagcatagtggattacttgaatgttgtacaaaagtggtgaacaaaatttctctcattttttctttgagtcttgtcttagatgaaattggtaatctttgtaagagttttaaaggtgtttttttttttttgaaaaggaacctcagttcgaaatagattaacaccaaaagagagtgggattcacaggggaaaatccctcccctttacagttcaaagaaccgctttgagaatgtctagcattcttagcaagttcatccacaaaagtgatattgtttcttttgacaaacacaacacaactagtagtaaaagagttcattatatttaaaatagaaaagaactgagcagctagttgccaatcaggaggcttcttgactcgtagtaaaagagtccacgccttctctttgggtataacccttggatacaagtctagctttaaaagttttgacttcgcctccagctcctcttttct

SEQ ID NO: 147521 - DNA, 769 bp, Cannabis sativa
cgcggaaaggctgcgtgcagcctctagcgccgagttttctcgcctgagcacccgctagcacgcgcgcggatggtacacaaatcataccatccataccaaatcaaaaaaaaaaatcaattttttattttttcatgctttttcatgaaattaatttcgaatattttgtgtaattttgtacttagattttttttttcatatttcaaatctagttatcagaattaaattaactaatttaagatattaaaagtttttaaacttgaaaatagataaaatctattattttgcttaattggttatcttatctttaaaattttgattattttatcttatttttaaatttaagttcatatattttatattttgtattatttaattaattttataaattgatcttatttgaaatttaaaataagattattttaatatagaaattttaaaaatgtaactagatattttgctaactttcaaatttttatcattaattttttaaattaaattataaaattagataacctaatttttcaaatttataggtttaattttgaaattaataatgtaatttaaatttaatatttttctaaataataattaattatttagatttatcgaaaataatttaattattttattaatttaaattaactaaatcctatatccatttatccaacgtgttacatgtatgtgtgttttatatattgtttattatcaaaacttgttttaaaaaatctattattgtttgatctaaattgctatggttaacttattgaca

SEQ ID NO: 147522 - DNA, 619 bp, Cannabis sativa
  modified_base (547)..(562): a, c, t, g, unknown or other
cacatgaaccaaataacatactaaataagtaatgaaaataaatctgtttcttcattgataattgaatagaaaagattacattgaaatagggttttatataggacccaaagcttaacaaaaagtaccaagagcgtgtcttccgatagcgagataggcgcctcgctattagttgcttgggttcacccaactattatacttagtttgtatattatatattacgctaattattttcacaatcattatatctcgcttatgtctactcatacgtaacgaggttatggtctcgcttttcacatccaatgttgtataatttcttgttaatacacaaggcaacaatttgtatatctttatctcgcgtaagaccttgtagtcagcaagttgtaaatatactctgtggcttccacatttaatgagttactccattttcaaatataattaccgttccatgcattgatccatattctccttagtttgacacgtgtcctcctttgaaacgatggtctaatttttggtataacagaccccaaaaccttttttcttcacaatnnnnnnnnnnnnnnnngaaaattcataaataagacatggtataattttagaattataattgattaaatagatc

SEQ ID NO: 147523 - DNA, 529 bp, Cannabis sativa
cactaaaaccagctgctaggagttaaaatcaatccaaactaaccctagaattcaaactatacaagcatcaaaccctaacagcccccaatttataatttcacaggttcaaactaagcaaaaactttaaaactagagaagggttccactagggcttaccttagcttgattctcccaaaatttctttgctaaaaacaccacaaatcagcagcccttccccttgatcttgctggtttcgaagagagagaggaaagaaagagagctttcccttcaaattcggtatttttcctttagttttcctctttctttctaactaattaaaattaattaattaacttacccttggctgagaaaaaggttgcaaggtgtcacaaagctagggcaaccacctatcccactatttaaccaaatgaccaaaatgcccttactcataaaactagcatattccaaaagctaggggtaaaatggtcaaattccataaccccgctcaatcctgatactttattttctcaaaaatatttcccactaagaa

SEQ ID NO: 147524 - DNA, 1149 bp, Cannabis sativa
  modified_base (55)..(55): a, c, t, g, unknown or other
atttgaattctatatccgatccagagtttcataagtacattcaaagtgaaaaaanacgaatttacaaagaaagggcacaaacatccgaagttggagaacaagaaaaaggataatatgagggatctcaatatgagggatctcaatatcagggatcacaatatgaggagtcacaatatcgcgagcatctcaagattcgggacatggcgttgaagatgaagatcaacgatctcaagatcaaggtgaaagagctaaaaatgactcataagtttataatccgtattatgactatctctacggatcaagaaataatcttccattgtatctcattttgtctttgaaggttcatatctgtgttattacttttccgtttaatgtttggtattgtattttaatttttaaatgtatgtttaagtttgtgatgtttttattatgtattattgactatgctttaattatataatgttctattgtgtaatataaaatatgtgtactcttgattaataagaatatgatgtttagtgtgtttaattttgattttaattaatatgtgttcaattttaaaaattatttttattgtttaatttaaaaaaataaaaatatataataaatttttacttaaattataattaaaaataaaaataatttatgatattcacatttaaatttacacaaaaaaaaaatattataaggtgcgtttacaatgtatctttctaaataaaagagttacgcgacagaaagtttgaattttattttcggcatgttaaatttttttaaatttttcaaaattttgcaggatgttttatataactataatgtacacgaccataaaaaaaaaagactaaacaagtctcccgaatgccgaaacaggtaggagtaaattagtacaccacttttaaagaagtacattattttcggcgtattaaatttttctaaatttttttaaattttacagtttgtcttaaataattataatatgcacaactgtataaataaatagactaaaaaagtttgtcgggtgctgaaatgaataggagtagattcgtaaatcacttttaaaaatgtgcattaaaaaattttccaaaaaataattcttaattttacaaatataataatataaatattaattaaattataaaaaaaaattaaaaa

SEQ ID NO: 147525 - DNA, 620 bp, Cannabis sativa
  modified_base (300)..(304): a, c, t, g, unknown or other
  modified_base (364)..(368): a, c, t, g, unknown or other
ataatcatgattatatgttaaataagtcccatgatttgtcaatacactggatttggacttacatgataataagcgatacggcatacttacaccttggatagatgttatgtccttccagggcattggcaaagtataccaatatcagatgtgtggagtatacatgggattggactgatgttgatgttggataagatatcataaacttaacgttatatctttctaagtcaatatcaccggttgatcttaagtctatagatcttaatccttatatggttaggttcaatcttagttgtattattnnnnntcttcaagttgttcgtgaaagctagccaatggtttcggtggatacttacatcttgggaannnnntagttcaattgagtgggagcgttaatcatagatatggaatctgtagcttctatatgtttttaaaagtaaaacgatgatttccttcgagcttgcttaatagagataaacgattgaggcctcatttgagaaattatattattttactaaaatattatttatagataggttattgatttaaggatataatacattgaagggtagaacggtaaatttgtccctattcgatgaagatcatctatagaggatctttga

SEQ ID NO: 147526 - DNA, 751 bp, Cannabis sativa
  modified_base (295)..(296): a, c, t, g, unknown or other
taaagagagagagggtggggaacgttaaagaaaaaaaaaagttttggaaaaatatctttggcaattgatacgtaggagtgaaacagagaaaatagatctgagagaagagagaaaagagaaaagaaaacaaaaaaaactgcattattccaagtgatttttcaagctctacaagggtaagcaaagatccataaatggatctacctctctttcttctttttcttgatttttgtttcctgcaaatggtcattccaatctcctttgattcactaaacttcagaaaataagttgatgtganntataatcaaagggaaaggaagagactaatattttatgctgccaatttcatcattgatttctttatttctcttcgattcactagacttcaaaaataagtcaatatgtgatatataatcgaagagaataatataaattttatggtgttatgctgtccaatttattgtaaatttctatgattttcttttggttcactagacttctgaaaataagtcgacatgtgatacataaccaaagagaagaatataagatttaaagaaattattatgccaccaaaattatcataaagtgtagattctcataccaaagaaatgagagcgatacaagaaagttaatcgattacttactaaacactccaaaaaaaaaaaatataggttcaatcgattatattctaagccaaattcactttgtcgatatgataattaatggtgaaaattctctctgcaaaaaaaaaaaa

SEQ ID NO: 147527 - DNA, 1308 bp, Cannabis sativa
aaaggaatttgcatgatcggagaccgaaagggagagtcatcaggcgcctgtgcctactaaccatctcggaggtaggagtaggtctcgtgagaagagctgtcaaaacaaacaaaacattaggcaagtacttgaaaaaggaagactgatgtaaataagtaagaagagaacaatcacttacgaagtttccgaaacgtggttgtgccaatgggggagagaccagacgtccagaagaagttgtccttgaaagacactttatttggcaagtctacaataatttttggctcgctagcgtgagtaccaagatagaaaaagcccactgcgacattcttcctcgatggaatggccttaactgagtaaatatactcgatctctacgggtgtaggacaaccccaattcataattttgtacaagactttcaaactagtgagaatcctgtaggagatggcagtcagttggaatggggcaaccccaatgtgatttatgtagtctttgaagtagtcccggagagggaggatggccccaacacaaatatgctcaaggctctaggcgcccatactagttgaactactagtactagtctcaccactggttcctgggttactgctagcaaagcgtatagggggtagcaactgaattcaccctctcgtactgacctaacccgacatgattgcctaattgtaattccataggtcttcaacatctcgcccgtatagcctgagatagattgcaccttcgattatatcaactcagcctcgaaggtgacgctgggatcctggggagttttagacgtgcgtggtttgggaggcataatttcaaaatctaagtcacctggtttaaaagcaattgtgacgttgggtaaaaataaaggctttgccacaggaataaaggacacgttgggtggttctggccaagctgcttctcgcaagaatcggtgtctgccttcggatatttcttgcaagaagcgcttgtagcgactagaaatatcttcctgttgggttctcactatgtgttccctagccctagcatcgtttagctctaatttggaggtgggttttgaggggttgggtttgtatgggatgaccgattctgtaggaaactcaaactctaaaacttctggacgattaattcccaaaccagagtgggacattgctgccagcaaaaagcagtcccaatccctagagaggattttatcaaaccagaaggttatgagttggagatcttaaaacaacctacatattgcctgaatcctagtatgaacagttttaacccaaaaaaaaaactaccaaaaccagatgagatgataacgat

SEQ ID NO: 147528 - DNA, 651 bp, Cannabis sativa
  modified_base (592)..(602): a, c, t, g, unknown or other
taagcagtttaatgctgccatggacgatgattctgtagcaaaaaccatggctcgtggtgaggtgtcttggtctacgatggaaatggttgagaggaatcgttgtgtgttggggtcgggttcgatgatagtggaagaaacttcgggtcaacgtgaggtagggataggatcatcaaaggttgttaatggggatcctataattaattgtggaagatatcttaccagctgctaagaataaggaaatatctaatgatatcaatgaggagacttgtcttttggttcttgacacgaagaggagaagaataatggctttggaagatattgatggggccgatgtgaggggtgatgtggcaacgggtgaagaggtaaatggttcaaaaaacttgagtttggtgggtactggtgtccacgcccaccaatcattatgaatattttatcttagaattgccattagcttgggaacccatggactttacaattccttaaggatctagtgatccaaaagaagcccaatattgtgtttttcagtgagactctatccaatcgttcttagacatggagagtgcgtgtgacgttgggatttgatggcatgatnnnnnnnnnnntcaatggtaggagtgaaggtattgtgttgttatggaaaattgaggatga

SEQ ID NO: 147529 - DNA, 794 bp, Cannabis sativa
tagtaaatctagattctggtaaaacatattcctactgtatcacccagatattatgaataccccttttccttcgggattcaaaaacctgcatgtctaatcctatgacggaaccatagatttggtatcacatttgaataactttaacacgataatgcgagagagtaacgtgacgaaaaatttacgctgtattttgttccctacctcgctagtttgagcagcgagtaggtggtttaacaagttcactcatcattcaataatttcctaggagcagctgtctaggtattttaagaagcaattccaagccgctaaggataggcgactcgaagcggcctcgctaagcaatataaagcagcagcctgaagaaacacttaaggcttacttaagtcattttagcacggctgccactagggttaaaaacttggatgacagcatgcaactcacagcccttcaggcgggaatctccactgatccattaaccgcagagggcgagttgtgggatgacctacaaggatgtccggtacgaaacatcactgagttcaatgagagagctcaagtgcttgttcgaaaggaagaagcccgaaaggaaatgaacttgttgaaaactagctcgggaggtaaacccagcaatgtttaaccagtgattgtttccacgagaattgataactctaaggtttctagttcgaaaagaaaggacagaggtggggaatcgtcgaaagatagaaagaaacaaaagaagcacgaaaaatatgtgccagtgtatactatttacactgagcttaatgaaactcgggaaa

SEQ ID NO: 147530 - DNA, 755 bp, Cannabis sativa
  modified_base (629)..(630): a, c, t, g, unknown or other
  modified_base (703)..(709): a, c, t, g, unknown or other
cgtcatatagcttgttgcaatacttttggcctcaatattttgatttttcgtgatcttcttaaaggctatacaaggaggaatgtgtcttctcgttgtatattgaaaatagacttgagtaaggtgtatgatacaatagatttccagtttgtggaagacctcttaaacaattttttctttccctagagatttatccaatgatcattttctgcttaagaggtactaagtactttctgttacgtaatagattacaaggctcttttaaaggggaaaaaggtcttcatcatggtgaccctatttctcctattttattcgttttaataatggaatacctttctagattgttagctcattatttgaaagaaaaaaaaaagaaaagatttggatttcattctctttataagaatatgagattaacaaatctttgctttgtcgaagatctcataatattttgcaagggaaatgtgaactctgtgaaattagttttgaagctgttgacctcgcttttagccaatgacagtgagtctaatttagtaagcgacaagtagtttataacaattgaaatataataaagcaatataaagacactgaaattttatagaggtttagtcccgagcagttcggtaatagcnnaatcctcattatttgtattgactcaagaatatggagaaaggttccttctcttatagctcttacaacaatatcnnnnnnnatgaattcttagataatatctcttaagtaaaatctttcgacccttt

SEQ ID NO: 147531 - DNA, 570 bp, Cannabis sativa
  modified_base (506)..(522): a, c, t, g, unknown or other
caatcactaaaggctgaattttaacggtgatgaatactatagaattcgaattagaagagaaaataagaagaagaagtctcaaactctctagttgtctgacaagaagaaaactaggtcaatagtcattagttggattatgagaccattattttctttttatattaattcacttagggttatgattgaattattttgaataaagaatgataaaataatggcaaaaaatagacttagtgggcgaccctacgtgtgtccaatactagttagatttttgctatttttctcaaccatttatctatttttcacaaatactgttttttacaatttcactcctataaatgctaaaattatttatttactaattaaattaattatcaaataaaattgtcatttttattatttattaattagactccacaaagtctctcaattaacaaataaaccataaaatcctatttcttcacaatcaagacatgtcttattaaaaattcataaactagacatannnnnnnnnnnnnnnnntaattgattaattaaaatcaattggctgagtcttacaagcagtttgtc

SEQ ID NO: 147532 - DNA, 1009 bp, Cannabis sativa
  modified_base (301)..(302): a, c, t, g, unknown or other
  modified_base (421)..(433): a, c, t, g, unknown or other
aaattaaacactataaaatacaaactttaaatgtaaaatagtttaactattaaacataatttatctattataatatagataattttagtaaaaaatatgtaaatcggtttattcgagttatttgggcgggttagaataatattcaacccagcgaatatatttattgggcggtttgaattttttgtaaagttattcgggttgtatttttttttcagtttattcggtttggtttaggcggtttattcggatcgggttagggccggcaaaacgtgtcaaacacaatgacacgactcgaaacccnnacgagagttagcgggtttgggtttgccttaaatgggttcgaatcatgttcgggttgactcgtctaacccgtttaataaataggtcgtgttcgggttgacacggctaacacgaaattgannnnnnnnnnnnntatttaaagttattttagtactttaacatgtcataaaagggttacaaacatgttgaatacttcattaacgtgttattgattgacatgtttaaacaaaatatacttataaacgggttacacgagtcgtgtcgtgtcaacccgtttataaacgggtcgtgttcgggtttcatttttttgatacgattattaaaagggtcgtgttcgggtcgagcatgtacctgttatacatgagtctcgacacaacacgaacacgacccgcgaacacgaattgccacccctaagtcgggtggtttgtaaatttttttgaacagtcctagattgtactgtgcaacgtgtaaaggccacgccagtgtaaattttgaaataacaactgccattaaaaaaaaatatttaaatatattctgcatgtattttcggatataaaaattaactaaataattataataagagcttgaccatacttattcacaattttcctaaactaaattatatattgcatttttttctccgcaaagtacttaaatattggttggtgtcgaaaattaggacttgaaaaccataaatcaaattttaaac

SEQ ID NO: 147533 - DNA, 588 bp, Cannabis sativa
tgtttagagacttatgtaaattatataaattgctaaattatgtaatgtttgatcatatgaaaactaattaatgttgtttttttatatttatgtgaagtatttatttattaatattaaacgattaaatataattaaaatacatatatattaaaataaataatattacaaaatcagatattgaaaaagaaaatacataggacttttaattccaatttttatgaaaaaaggggattaaaactaatattttatcccttttttttatattaaaaatataattaaaagttaaaaatacaaatgaaaaaaataggagaaagtttttaatctcaatttttacaggaaaattggggtaaaagggtggatttaatcctgggtttcctacataataagtgggattaaaagctaccattttatcctaatttttataagaggcttttatcctattagcgaaaattgggaaaaaaaatactcataaaaatcaggattaaattttatttttgtagtaataattatatgtatatagagtttttttattaaaaaaatgtgtatatatcaattctactaactctatatacatatatattttttttt

SEQ ID NO: 147534 - DNA, 531 bp, Cannabis sativa
  modified_base (472)..(473): a, c, t, g, unknown or other
caggacccggacccacagacatagaagcggacacagaccacgcctcagacccaaattgagactagaacttaggcccggacacggacgtatgcccagactagaactgagacacgaacatggacctaaatcttagacccgatcccaaacaaagacttggacctagatagggacccggatacgatcctgaactcggataaagaccaagactgggattgaaatgctggacctagatcttaaccaagatcctgacccagacccaaacttggacccgcactcgtgaccctaacttggacctgaccctgaactagacccagatcggggtccgcacttggatacaaacccaaacacagactcggacctgaactcaaacacccacacctagaatcagaattgggacactgacccagaattgaatccagactctgatccagattggaacttgggacactgacccaacctagaccaagacccnngacgcgaacccacgcccggagcctgatctggacctagattgaaatctggacccgaacc

SEQ ID NO: 147535 - DNA, 821 bp, Cannabis sativa
  modified_base (293)..(303): a, c, t, g, unknown or other
  modified_base (759)..(759): a, c, t, g, unknown or other
gtagggagttaattacatttaaattcgaatcccataacaatattccctaaaatcgtgggctttaattacgctccatttaaatatatgtagataatattagagaataacacaactatgatttaaaccatctttaaggtgatcaacgctgacatggataggaacacgttgccaaatgtatctcgctaaattgcctcacctagtaaataagtgagtgacttagcttactcgcattccagcaatggcatgagcaccaatgtactgagcaaatttaagaactgctctttgaccataannnnnnnnnnnctggacaatcatgtccttcaagttattacactttagttattataacatgggttatatgctaagtgttccaataaccaattttcctcgtcgatacttcttcacatacaacaaggtagatgcctcgctatgtgttgtttatagctccctcggtattatgccttctgagacaaaatggtttctcgtcaatacgtgaatcgatagtttttacatccttgtctcgcttaagactatgcagtcagcgagttataaatatactctattaattctatatttaatgagttattctattttgcatttaatgacataattatcattaaatctgttggttcatatcccacgagattgatacgtgtcactttctgaagtacagtcgaatttcgggtgtaacattatgatatgttaaaaagtccaatccgtatttggattagacactacaaaaaataactatttttagtnacaactttttagtcacaacataagttttttgtgactaaatgtgatttttagtcacaataaaa

SEQ ID NO: 147536 - DNA, 975 bp, Cannabis sativa
  modified_base (238)..(238): a, c, t, g, unknown or other
tatcccaatttttgcgctctgacgtggcatcacacgatggtgacacgtggaattgactctgaatacctgctcgcaagacataggccgaacagggaatctcacacattttctcgaacaaagtcctctagaccgaacagtgagcattctgcgcagaatgccaacacttagcgaattcagctttcgcatcgttagtcatcaaagaaagccctataactttgggatcagattacagagatanggcaagctgtccaaatcccacgatcagtgtattatgtatttattatgcaatctttatgcttatattaattgtaattagaagggaaatacttcctctacaatcttatagccctataaatagtgactcatactcactgggcaaagggtcgaaagattctgtctaagaattcatattcagagatattgttgtaagagctctaagaaaaggaaccattttccatgttcttaagtaattacaaataacgaggtttaagctattaccgaactgctcgggactgaacctctataaaattcttgtgtctttatttgctttattatattttattcatattaaactacttgtcgcttacaaaattggactttttgtcgttggctaaaagcgatgtcaacatttttcaatgtaatattttctattcaattatcaataaagaaacaaatttaatttcattacttgtttaatgtgttatttagttcatgtgatcattcatttatttatttgatttataaattcatccaaatccttatcacgttgatattcttatttattgtgttgtcaacatagtggaaagtaatcacggttgtgtgattaaatgtattcctatgatttatcaatttacacggtttaattgatttgataatctgcgacgtagtttaattgcaccttggataagtggtatttcctttccagggtattggttaaagtaagcttggaatggatgcatggagtatgtatcggaa

SEQ ID NO: 147537 - DNA, 588 bp, Cannabis sativa
aaggcgttattacgaaaggtaaaggcgattcctcaaaagaaacgtagtaaaaaggagcaatcaagacacaaaaaaagaggaattcaacgcatcacacagcaaactcatgcaaaattatccccagatttcaacattcaacccagaaactgtaaacatgtaatatgaacaaacagtaagcaagtgtaaagtgtactgagaacttacatgaagtttgaaggctgggggttggtgttgattgacggtaaagggatgactggcaacggcgaacgaagagaagcaagtaatttatggtgcctgaaattctttcctctctgtgaaagctctgagaaaatttggtgaaatggtgaaagtaaccaaatgaaatgagaaggctggcttttataggccagaatgggtgtgagacatatgtgatcgaccatcatcgtacggtcagaatagcaatcgatttgcattctacagatccaacggttgggacaagcgtttatcagggcggtaaaaaacgtttgagtactcgactgacacccatttaatgtgttgtatcattaaatggacaggaaacgaatcgttgtctgcaaaaagcaaataact

SEQ ID NO: 147538 - DNA, 561 bp, Cannabis sativa
tgaaaatgaactatacagaacacaacgacacctaaataaatagttacattaataataaaaattattaaaatttataatttcaaaatgaagtatataatatgatagttaataaataattaaaacaacaaaaaattaactagataacaatataattttaaattgtcaatatctactagtgcatattgtattaatgaacaaagtaaaaacaaacttgtcattatattaaaaaaaatgtgtcaaaacaaaaactaaatatatgtatctgtatctacaaaaaaacacaaaataaaataattgttaggaataaactaaaaatatacgccataacaaatatacataaatcaaaaaacaactaaaaaataaccgtccaacataacatattctaaaaaccactaaaaaaataactaaaatataatgtaaaataacaaaaaaaaatgcaaatatatgcaacaaaaaaattattaagaataaactaaaaatatacaccataacaaatgcatatatattaaaaataactaaaaaataattgtacaacaaaaaaaaaatacataaaaataacta

SEQ ID NO: 147539 - DNA, 579 bp, Cannabis sativa
atgaatgcaacaatctgaagcgggaaattaaatttctaataaaaaaaataatctgcacgtacagaagtatgccaaggacgatcaaaattagaggggcaataacaaccaagagttactaccaccacaagtagatggacatttgcaagtcattattgtaggtctgcacattgctggagattcaggcaaagcccgggagaagtatgctcgaacaatataacatgagcaaaaagaagtagttttggccgtcgaggaaagaaaatcgaagatcccatgagcaggagagcccaccataacgttcaatgatgaagatgctatcaatatcagttttccgcacaacgacccgttggtcgtagaagtccagataactaacaagatggtggcccgaacaatgataaacaatggagcctcttccaacatcttactcaaaacaccgtatgaaaagatggagctccagctcaaagagttaacccctatctctagcccgtatatgatttctctggccaaggtgtcgcacctctagggcaaattcacctacccctcactgttgggcaagctccaaagagcataactataatggca

SEQ ID NO: 147540 - DNA, 649 bp, Cannabis sativa
tcaaggttgtgagtgagtgtttatatattattctcttgttgtatatatacatatattatattacatgtgttatatcttcttctacctttcttctataatatatagtgtatatattgtatatgtattgtaacatttatttaatatctttgttggttcttgtattatattgcaatagagttgtaatacatcttgattttcttccattgtaataatatctctaacaaagagtattttgggttaaagggtattagagcatctctaaccatgctctctaaacacactctttagctaaaataaagagcgagacttaaaaatataagctccaaccatagaaaaaatgattttatagtaagaataaataaggaactctctacttttttgataaacttttttaataatattttaataaaaattattattacttttttattattttataaaattaatttatatttgaaaaatataaattataaaaatattattaaaataatcaaacaataattataatagagagcatagttggagcaacaacaataaaaatgaatttctattttaattttttagttattttagttaaaaaaagaaatttttacaccaaaaatctattttgcacattttattacatttttacccctacatgcctacatca

SEQ ID NO: 147541 - DNA, 808 bp, Cannabis sativa
tttctttgaatttcttaggttttaggttagatataagttagggttttggtgacttcgggattgggatattaaactacaattcgaataagtttctaggcttgaattagagtttgtttacgattggtttagttagaatcagttcagttagggttgagttaaaggaatttaggatttctaagcttaaattctacttgattatgctatattggttaaattgatgaattgttgtgtaataatgcttgggatgtgttgtgtatataatattagtttgatatggagcggttaggcaggtgtggttgagttttggttcgagattggaggagaaaactcaagattgcaaccctgtgagaaccggtcgaccggttgattctggtgcagcagaactggtcgaacagtttgcctgcaggggtaagttttcagttttcttcaaggccagttttagggctcgaaatgatttccatggctattgtagattgtttaaaagtggtaaaacctattttcgagctaatagaagttaaagtttactagttatgggaattaaggttattcccagaattattgatttaaggtatttgttgaatgttgttgtcgtgacataggcccgggttcgtcaagccttgtttccacttgggttggcctgtacgcttgacttctggattgatgtaagaaaagtattatacaccgtttatggttaacgattataattgtgatagtctcgattatgatcgagatcctaatatgtgtttgttttgactcgattatgatcgagggaaatgatatgaaacgttcaattgtcaataggtcaagt

SEQ ID NO: 147542 - DNA, 569 bp, Cannabis sativa
gagaagaagtccaaggaggaggagctgaacgctgaagtagagaggctcaaagggaaggtgaatgccttagagacaactggtctcgagattttctactacttttggaaggctaatcctcaggcgaattttgactacctgggcgatgccaaagacatgtatctcgagtactctgcttcccaagtggcctatggagagtccgaggcaaccacttctactttcgttcagaacgttgacatgccccccgcccagacaacagatcctctagcttctaccggcccagaagacccgtacaaggagcctgggactccaaccgtctgaacacttctctttttatctttctttttttatatctgtcttgccatagggccttttttttaagacaacgtgaccagccaagcggtctttaaacttggaattatttttcattttttcgacaacaagctgaccgggcagcttttaatcccagtcttacgtgattttgttatctttattgaatttcatcctctgtttataatcatcgtgcaactatgtttgtattatctttaccaaatgctttgtacaggtatagg

SEQ ID NO: 147543 - DNA, 801 bp, Cannabis sativa
ctatgatctttatcgttttcatgacgacggttgcaagtctgatggtatgttattgacaacatcgattgcattatttgaagattcggtgaattcgaaattatgtagtcatatatatggacccttctacaaaaaatgttgaattattgaaattggtagaagatattgtaggatttagcagtagtgatcttgatgtttcgattatacctaatgtgaaagatgaaaaaataatagtaaataaggtagatgaaaaaagtttgaatgttagttatggtaaaaagtattgcattggtgatgacaatgttcagtttgaaaacagtgggaaaattaaagaagtgtcatttgaaaaggaatcatcaatattggatgaatggaaaattgtttcgagacgaatgatggagactatatgaaaggggggttgttcaaatctaaggtgttagtatcaacaaaagataaggagtcaatatcaaatgaaggtaactatagttgcgtagaatcctcaaagaggaaccatagctcaattctagacacgagatttgcgcgaagatatggatgttctgatccatatgttaaggaagagaaagagttagtagctattcatggtggttctggatttaatttaaacttatatgatgttactcaatttgagttgtttgcattggtaagtgggtaattatttttattttattcttttgcttgtataaatatatattttagtagtgtctgtaaatgtgttaatatatatatatatatatatattaggatggcaaagtaaaattggcttgtgagagaagcgaggagcac

SEQ ID NO: 147544 - DNA, 960 bp, Cannabis sativa
gaaacgacttgaagatgctaaaggaaactggtcaaaggaactccctaaagtattatgttcgtaccgcacaattgataaaacagcgaccggacagactccatttgccattgcatatggttatgaagctatgctgcccgtagaactggaacctctgtcccacagaagattgacatataaccaagaggttaatcatgcgctcctcgcagagtcctttgatgaaatcaaggaaaagggaaccgcaacaaacttgaaattggtagctcaccaataaaaggtagctcggtattttaacaagcaagtgaaaggacgaaatttctttgtgggagatatggtcctcagaagggtatttttgaacaccaaagacagcacgacaggtgtgctcagaccgaactgggaaggaccatatcaggttatcaaagttctagaatcaggagtatataaactgggtaagtatgacgaaaaaatgcaactcgttctagtaccaaggtattggaacgaggaacacttaagaaaatactaccagtgaaagtaccaggtcaaatgaccatgtcaagtacgaaacaaaagaacatttactttaagtgaatggccttctgggtggaccacgcccataggttcagataaaatgacaaagtactcaggtcgggtgaccacttatgaaagtacaatttttattttctacaatttgttttgtttatgctaagctaaagattagactagatcaatataatagcttcaatgtaagttactatggtaacaaacatattcccgatcaataaatgaataaagaggtttatttcaattcaaattgagtcaagtttattaacaagttatatatttaccattaaatgtgtacaaaaggtctgctcgtgccaaaagacccgaacagacaaaaaagcatacttgtaaaaaacaagtgaccaagagtctaaagtctgctcggtcacttggggggcacct

SEQ ID NO: 147545 - DNA, 802 bp, Cannabis sativa
aaacaaaaaatggcgagtgtgtatcgatttcaccgacctcaataaggcgtgccccaaagactgctttccacttccgaggatagatcaacttgtggattcaacagcaaggcacgagattttaagctttgtggatgctttttcggggtacaatcaaatcaagatgcatccactggacgaagaacatacaagtttccaaatagatattggtctgtactgttataaagtcatgctatttggtctcaagaatgccggagcttcataccaaagattggtaaatataatgttcaaagaccagatcggaagaaatatggaagtgtatgtggatgacatgcttgtcaaatccaggaaagctgaggggcatatagatgacctggacgaatgcttcaaagtcctcatgaggtacaacatgaaattcaatcccctaaagtgctcctttagagtcagctcgggtaagtttctaggctttgtcatcaatgcccgaggaatggaagacaatcaaaagaaaattcaagctctcctggatatgaaatttccaacaaaaaccaagaaagttcaaagtttgactggtcgaattgccgcactcagcagattttttgcaaagtcaacagacaagtgtgtcccattcctcaacatcctacgaggaaataagcaattttaatggacagaagaatgcaaaaaagcctttcaagagctaaaaatgcaactcctagaacctcctatactctcaaaacctcttgatggagaagaattaggtgttgggttttgtgccctaaataaaaccctttacaatctgattagttat

SEQ ID NO: 147546 - DNA, 512 bp, Cannabis sativa
ataaataattttatagtggtgactatgttattgtccttatataatacatatatttttttaaccgttcatttatataacttttaaaagtcaacattttgtaacatgtatttgtttgtagcttattaaattttctattttacttcacatttattatcaagaactaactatgcttgattttttatttatttgcagtgatcatggcaaactattgtaatgggctatagcttcctactgtttatgttgaccactagatatattgtaagtatctctagatgttggcaacaagtgcaacaatatattagtgaaataaagatgattttttttaattatttattgatctaaattgactattgcagagcatgaaatggccaaaacttgtttggttgttggcaattgccccactaacatcagttattctttcaactcttcttgtcttcctactgaaatcaaaatcacaccacatctcatttgtaagaacttattacaacttttcatttcatttcataaatcaa

SEQ ID NO: 147547 - DNA, 601 bp, Cannabis sativa
gaagtgacggttacccttgatgtgatggtggaacctcgagaactgttttttcttataaatgtcctattagttccctaacctccctctatattttggcagagcactcttgagtataagactaccaattttgaaaattcacttcgtgcttttctctatgctgctcgtttcaacttctctgtgttagatcttgctgtcttcaggtatatatattatgtttctctatttatcttaagttttatttcttccctcttttttcttatccctttttatttttccctctctcttttttatattttcctttcatccttacccttttttttatttttaccctttttgtacattttgtttttaattgccgtgtatattttcgtattttcatccttctgttgtcttccctctcgttttttttctgggatcctcccctttcttctaccctattcttctatttccccccttctagtcatggcacttcctcgtttcctaaaggcagtcttcttcttatggttagcctttctcccttccgctttctttttcttgggtaggttttggttctcgattgttgttttagtggtggtgtaatgtcgaatacggattgtccagg

SEQ ID NO: 147548 - DNA, 502 bp, Cannabis sativa
aattgataccaataaaagttcttgtacacataatcacagtaccttatttgagtgggagaattttaaaattcttagcccgactttattttggatgaaacttgtgataggaactttaaaatacaactgagaaagtaaatctaacaattcatatggatagaaataacttatcagaactttgagaataaaatagtagaattttcgcatagtctattcgaatgacttaggaaaaaattcataatcctcatgaaaagttttatggtatctctaatgattacttaatcttaagcaagtatttaacattaatgttaatactagattttatgttgatgacgtagtctagaaggaacttacagtttgagagtatatttgtaacctactaactgtaagattttaggcaaggaatcaatctacaaactggcacttagtgtattagcgagaagccatatgtcgctaaatgtgaatagcgaggcaccggagaaagtgacacataccaactataaaa

SEQ ID NO: 147549 - DNA, 779 bp, Cannabis sativa
aaaatttaattacttatccaaactaaataaaaatactaattagtgtgattggttgtaattggatcgattaattgtcattgaattggatcgatttatacacagcctaaatattaatagtgcctaacacattctagaaatgatctacaattggttagccatattttttaaaaattattccattaaattgtgatatatatgacagtatgacacatttctctcgcaatattcattgttttaatgatatgataatgagcttacaaccacgcaaagacgcaaagttatatagggttgttgggcaaaattccatacccaaaatggtcatttcgtatccttattatataattatttgccaacaaatctaattttgcatgcaaatataatttgttaatttattaattaattatgttcaggtaaaatctgaccacatccatctacactatcatttacacatccttttttatattattataagtaacctaaaaaagtaaaataaaacacaatataacatgtccctgtggaagatatttatatattaattaatgtaggtataattataacatggcttatgtaattttgcatggtattaatataaaaaccaatgagaaaagtaaacagacccctggtggctgtattatcattggttgaccctttgtgtggttaggtatacatatttgtatctatatcatatctgtaatctcttaaattgtacgtgtgcagtgtcctaatttgaatttaattgattgattttcttatttatttttttgaaattattaaattaa

SEQ ID NO: 147550 - DNA, 824 bp, Cannabis sativa
ataaacataataatattaagatgggtgagaataaagggaactgtcttgtaggaaaatatatttgcattcctttggcaataagcaataccttgaagacgttttagacatgattcagaaacagcacatggaatggaatgaaatgtacatatcgtccttaaggaaagtatatgttataatatctagtataatataatatagattaaaatagtttcatatcgtatatatgtatatagaataattttatagtaagaaaattagttttgttcttatagtatcactactataatgttggcttttagagactgttttttcacttacatttataaaaaggaaagctaaagggtgtgaaaatacccgctttgttcgaaattgacctttaaaggcggtttttttgataaaaatggtaaatataaaattgcattataccatttagaggcagttggaaaataaagtacgctgggttttaagggtaaaccctatggcatcggttcctatgtaagaaccgacgccatagggttatataagtaaccctatacgcgtctcattcatcaccttcttcctcactcgaacacagtagcagcccagccaaatccaaaaactagagccccaaaccctcgccgaccaccgcctcccccatttctcaaccatttgagcccatttttattgcaaaatcttctattttcgatacttaatcctatacacccaaaaagttttaattttgttccctatttaagtgtcatccaaacccatacaaaaaatagtgggtataactccggccaccatcatttgttgagaaaacattgaatctcaacatcctttaaggt

SEQ ID NO: 147551 - DNA, 1013 bp, Cannabis sativa
aggttaatagattacattaggattattgaaactatattttgggatactcggtaaattgagattcatagtttgaaatagggaaatcaatgctctaggtttttactctttgattaaaaaatcgttgtttgtctattactttccatttatattattatttgattcttaactataatttactttatgttatctaattaaagtataaaattaaaagtataataattagtaaaatttaataatcaacccatgtgtgttcgacaacctttttattattaaaactttgttataacatcgttgtacacttgtagtaaaaattgtgtatcaagttttgtgtgtcgttgttggggattgaaaattcttaaattattgctaatattattactaattttttttttgctttaaattagattttactttgtttcttattttgtttgttgctttgtggttcagtttatgtgaagaaatcaaagtgccacaccactcccacgactgaatcttgagattgaaagagctttgaagcagttgaaagcgaagaaaaaactagacttcaccacgacagccaataacaacaatggccttaataacaaccaaccagcacctgctgcagctgatgcacaaccacaggctattcgtgattattgcttacttgtggtgaatgaaaatctgactgatattgctaatccagtcattgctgctaataattttgaattgaagcatgctttaatcaatttggtgaaacataatcagtttggtgggttggctactgaagatcccaatatccatctacccatatttctggaagtatgtgctactgtgaagatgaatgatgttacagatgatgccataagactaggactctttcctttctctttaagggatagagccaggggcggaggcaggatcatataatagggggggccattttgtaaaaaaaaattatttgcacctataaaattttatgtacaccgcagtattaaaatttatttttaatattttttgaattatttttcacttta

SEQ ID NO: 147552 - DNA, 795 bp, Cannabis sativa
  modified_base (48)..(52): a, c, t, g, unknown or other
tttagatcttgataatgctctgcttcagaaaggaatcaagggctagannnnngaacggaaggagtcattatattcgctgcacccaatgtaagatttcctaaactttaggtgtatttatttcattattttagaagttcatattaggatgttaaggaaacatacttgttagtaaatttagatcctggtaaaatatttcaaactactggccttgcagccatggtaatgatttactttcatgaaatatgaagtaaaacgatgatgtgtgttgatttggatggcttcatgtggtttatttgttactttatgatgttatgtgatttacaaaatttttccatgaaaataattttattttgtttatggaaatattttatttggattccttgtcaaaaattaagtaatttttgtttttacggaactttattccgctaaaaattgagagagtgatgaattttcaaaaattgggtgacatgtttgtcaagtgggtgcatcgagtgcaccaggcactcaaacaactcaagacacacgcgcggaatgctcagacaaacccgtgtcttcaaacacggtttgctgctttagacacgctcgccacgctgcatccacccgcgaagatgctgctagcgccgagttttctcggcgtctccctccattcgcgcacgcgtctttaggatttgcagcctcctagggatgcacttgcagcctagctgcaagccgcacccaatttccgaattttatgggattttttcccaatttcagatttttttcaattttcaaaccctaaaattaaaataaaatatt

SEQ ID NO: 147553 - DNA, 532 bp, Cannabis sativa
gaaacaagttaagggtgcatcagtacatccctttttaagggggtgcattgtagaatcacccctaaatttattattataatttttttattctaccagcaatcataaaaattaatggaattttcaaaaatatatttttcccattaaaaaataaaaaataattaaaaattaactaacaaaaactataaataaatcataaatcaattttatataagaactataaaataaaacaactcaaaaacagttttctttaataaaaagtttattaattttactgaataagtatttttataaataaaaaaatttaaagtattaaaataatttttttccatgttaatgtattttttaatttttttaaattttttaatctattatataaatatttaaaaaattaatggcatcaaaaggtactaaaacttaatccaatacatatttctaattagataaattattattattattatgtataaaaatgataaaatatgttatattattttataatatgataagtgtagattaaaatgtagtaatatat

SEQ ID NO: 147554 - DNA, 925 bp, Cannabis sativa
tagagaacgagacaccttcagaagataacacaactaaagaaaaaagatttagaggtcaatcaatttgtaaagaaatttggaagtggaaaagtaagggattaaaagttcctcttgaatggaatgattatggccaaccaattggaaagcattgtgctatgcttcaaacttatcttggttatcttgcacgcacacaagtacctatagatatcgttgattggcctagtgttccatatacattgttagttcatctatgggatgatgttgaggtaaatcatacttccaagttgattcatttaatttaaatatatgaattgttaaaatttgttttatttttttgtaggccacatttgaagttgatccaaattatgataaacgctacattatggaatctatttcaaagaaatggagggatagaaagtcacaattgacaaagatcatattttcttatttagaggaccctgagtttgcaaaggataatccaacaacattaacagacccgccaaaaaagtcaaatatcacaaaggaacagtggaaaacttttgttgcttctcgagataatcctgagtttaaggccatacaaaagggggcacaagagcaacgtgctaagctcgaatacaaccatcggtctacaagaacgtcattagcgcaaatagaggcaaacttacaaaaagaacgtggtacatcagaacaaattgatcgagctttaatttggaagaaatcacgaatgaataataaaggacaattcttagatgagtcaactaaagaagtggctgaaaggattgtaagtattcactaacttcaatcttttataactaacaatctagtaatgttttatatatataaactaataatcatgtatatttgtgtaggatgaacttttggagaagaagggcaaaggtgaggtggtggagattggctcaaatga

SEQ ID NO: 147555 - DNA, 759 bp, Cannabis sativa
  modified_base (588)..(588): a, c, t, g, unknown or other
aggggacgggtacttgtgggggcgagctggactgctacattcccgccactacaatcgtgccacaaaccctgataaggggatgtgcggctggtcgggggctcacggccagcaaggggcactgatgcctttgcacaaatacttcagggatgtggcagacttctttggtctctgcccggcccactttaatcctaaaggcattaagtatttatccgccctcttcgtcctctatgcttctcaaggatgggatgctccttctccccacgaggttgcctagttctttgaccttaagtctaccacaaaacaaggcaggttggggtacttctacttctctcagccaggcttcaagtggttgaccggcacggacgccaaggccattagcaaaatagggcgttttgctgatgagtacttcatggtgaaggatccgagcattacccggactcggtttcaacagattttgacatatcaccgtcctcccctcactcttgctcttagggatagagctaagaaacttgcccggttgccgggggaagacatggataatatctagttgacctccagtgataatctggtgcagtacgggctctatcncggggacttttctcctaagtccgtggtggggaagaggaggaaatttgatgctggccggcctgaacgagctcatctgcacaatgagttgactcaactgaagcgtgaagctaagttgaaaggaggtgccacggccaagcaatatgctcaagagcctttgaatcctgaagatga

SEQ ID NO: 147556 - DNA, 799 bp, Cannabis sativa
attattatatagttgtttaaccaattagagaaatatatatatacatatttttttataatttgtgtgttgtttttattttttatttttaactttacgcaagtattgatgtccaattaattttcatatcaaaatagaattgttattatgttgttttcttgttattattaggctgtataacaaagagaaaaataagtatatatttatttttttaatgtgtagatatattttagagttggtgtacaagtattatgtagttttttttaaatttattttatagattatccgtgtattttttttcttggatctgatgcaattcatggagttgttttcatgcctatttaacttgtgtattatattatagagttgttaattttttgttatttagttattcaatcaaacaaaaatgaatatatctatatatacatgtttattttattttatacattagtgatattttttatttttttagagttattttaatgcctatgtaatctgcatattgtagcggagtttatgcacttttttttttttttgttatttagttgtttaactaagagaaataaatgtatatatatatgttttttttatttgtatgttgtttttattttattttttaagttgacataagtgttgatgctcaattaatttttatattaaaatagaattgttatcgtgttgtttattcatttgtattaagttttttcagtattgtattttttgaagtttttgtcttataaatttatttttgtttgcataatatgataaactttaattgatttatatgttatggttaagttgt

SEQ ID NO: 147557 - DNA, 648 bp, Cannabis sativa
gtggagtgagcaagtttgggggagatttaacacccccaaacataactttattttatggattgctgtgcagggaaggttaaggactaaggacagattacacaagtttggaatctgtgaaaatgctacctgtgtttttcgcaacatgcaggaagaaacacatgaacacctgttttttaattgcagaaaaatagtagggtgttttggtgaaattgcagcctggattggatggaaatcagctgataccactctttcccgagtcacctgattgatacaaagagcaaaggaagggaaacttaagaagaaaatcatggctgcttgtcttgctagcctagtgtacaatctatggaggatcagaaataaggcctcatggcaaggtaaagaacataattggaataacatagtgaattgtataaaagaaaatgtaaagcaaagagttgtattagtgtggcctaagaaggttagcaaaaaagaggaagagtggttttattctttgtgaattgtatagaaaattgaagattatggcatgattgtcatggtgcttttagattgtacaaaaatagtttatttgtaataacactcactgattcataaaagaaaataagattaaaacaataatgatgacaatgaacatataagaatagaaacaat

SEQ ID NO: 147558 - DNA, 567 bp, Cannabis sativa
  modified_base (45)..(48): a, c, t, g, unknown or other
acaccacctgtggacgtcgttaatggcggagtagggagaggtaannnnagacctctcaatctattccctgaaatagctggccctcaagtaggggaaacatccacaccaccagcaacaatgcactttccgcctgtcactctggcggtggtatacgagggaatcgtccaactcaccaccgactaatatactgcgattcaggatcaactacgcgcgttgcaagccgaggtggatggacagaacagggcctgacgcccccctcgagcccctactactcgcacagataaccctcaggtaatgaactctagacgtcgtaataatcgtgtttgcagggaacgaagaaccaatcatgaaggtctggacctaaaccagccaacctcgagagaccaatctgcgaggtatcctaatcaggaaacacaggttgatgaagaccctgagcgacgtaatcctcgcaaccggccttcaagagataataacgcagaatccgcctcatcatcctcgcatggtcgcacacctagcagatacacgaggtccggttctgtggagacgcaacagggaggacggtaccaa

SEQ ID NO: 147559 - DNA, 746 bp, Cannabis sativa
tccatttccaatcaaatttccaatcaacatccaatcaacatagaaatcaacatagagtcaacatagagtcatgatacaaagtcagttttccagttccaaaatgaagactatcacctagtctatcgaaaatagatacagagatcaaattcctcataatagagggtatataagcaacatcatgcaactccaaaaaatgcccagtattcagctgaagattaacagtcccaaaaaattaaactctgactttagtatcgtctcccatgtatacatactcctccaacctactcggacttctttcatttgtcactgcctgcaaagaatttgtaacatgaattgtagcacctatatctaactaccaagtgtttgagagcacatcaataatattggattccaaacaaaccatcacaagacaattacctttcttctctaagtgagctttgagctttcgacaatcagctttcttatgcctaaagcattgacaaaagttgcacttccctttaaaaaactcattcttatgacaagttgaagatgagcttgcttgtccatttctcttaggattggtggatttcttcttatgaaacctttggtcactagagttgttagaagtgaactttctcttgtgagaattgtttcggtttgtcaccatggagatacttcttgctcttccctttttcatgtcctcttcttctttggcaagaatagcagtcatctcctcaatggtccactgctccttttgagcattatag

SEQ ID NO: 147560 - DNA, 897 bp, Cannabis sativa
tacaaaattaatatttatagaagaaaattaaaaaaaaaaaaaacaaaaggacaaaaatgagcctcttatataactgtcaaatcaattaagggtaccgacaaactaaaaatattaaactgagatcacgaaaaaataatttaacaatagtattaattataattttttgtcccaatttttaattaatttttatgtctaaaatcaaatgataaaatattcttaaaaaaatattataacaatatttattataattaaaatatcattcttaaaatttttaaataattttcagtactaaaaataaaattttttaatattttaatcttctagatatgtttagagaattttaaatttatttttaaaattataaattatttcagcattttttaaaatttacatgtaaatgatattaaaactataacaaataatgctataaattatatttgtatgataattttttaattacaatataaattttacgtgattaaataaagaaaattacttaaatataatactgatttagttttactaaattaattaaaacaaaaacaaattataattttttatgactaatattttttattacatttttttaatgatactacagaaataataattttagtcatttgacaattttgttgtactaaaaagtaaacttttttttttatatatatataaacttaatcttgtatatagagaggttaacgaaatcagttgtatattaatactgatcaaacgaaataatgatcaaacgaaataataataaaaggacaatatatatatatatatatagggcaagactatagtatgacctagcaaaagttccttacggtagggaactttttttgaccattgattttagatcatgtggttattatgatataaggtgtatactcttactat

SEQ ID NO: 147561 - DNA, 502 bp, Cannabis sativa
ttcaaaataatttttgaaggaaaaacttggaacttgggatgtgactttgtgttcgttcttgcttagagcttaaggaatttgtggtaaagatttttaatctctttttcttatgttaattttgatatttgaaactttataatcgtgttctttgtgttcttgatatgtttggttgtggtgattgcttgtttatgaaaattgactaaatttgtgtgaatatcgtatgattgtgttattatgtctttgattgattcaaccttcttgttttgggaggctttgaaatgttgtattgatgtctaaattcttgaaatttctttgaatttcttatttaagctttgaaactttgagtttcaaagtttgtgaacttatgtgcacactactacaaaaaagtctttttatcccggtttttaaaggcattttatcccggttttcactaaaataaaaaccgggatatatgccagtgggataaaaagtcatataaaaaccgggataaaaagagaccttt

SEQ ID NO: 147562 - DNA, 524 bp, Cannabis sativa
  modified_base (271)..(280): a, c, t, g, unknown or other
atgcccagggtgcttccgtgtggcatacaaagacttagcaaatatttgcaggttatctgatctacgtgtccctgttcgattggtccacgtatattgggtgaaattaggggcaacaatgaattgcataatttaatactatttaactatttaattttatttgataaaactatattaactagttaaatgtaatattattcttaaataatattaaagagagaaatatagtattttagtgaaaataatatttattttagttcttgtgaaataagannnnnnnnnnaattaatcaattattatttattagcaaaataaatgataaattttatttgtagtaaaattgagaaatcaattttggaaccttaaaatatgacccacacttgtaagtctagcccacacatgtagggtgacatataaagttccatgctaattttgtttgattattttattcttataataaattaaattaaattaattaattatcttttaattattgaattaaatatattaggggaattaccccatat

SEQ ID NO: 147563 - DNA, 1053 bp, Cannabis sativa
  modified_base (184)..(192): a, c, t, g, unknown or other
  modified_base (291)..(303): a, c, t, g, unknown or other
  modified_base (988)..(1001): a, c, t, g, unknown or other
ttattgcgtgtggcagttccaacatgcctcctcccatgcggcactaaatgcgagatgactgctcataggaagcctgacatctcgcggagatactttgatgccacgttaatctccgggagcatagaaagcctcgtatgccttctccaggaggcacgttcaggataatgtctttctttataaagannnnnnnnntaatttgagtgttaaaaccttcgtgtccacgtgtccctgtctggttggtccacgtattttgggaaaactcaggggcaacagttcgcaagatctttaacnnnnnnnnnnnnnggttttccaccatagctagaaattcatgaaattctcaaacatttcaagtttctttgcataagataaatatgtagagtgatcattttaagaatataacgataactcatatccacgcctaaatgtacatccattttctaatacagatgatccttctttcaagtggatataggcatatattctctttctagagaataatttgtcaaaactactatgaacaagatgcaactgccaaagatatatcatgtggtttgatgaatcttgggtctagttataataaagagttcttagaatagtccaagtggatcctggtcactgaatacaaaattcatatttcatacataaatatacagtttgaatccattgacagaaaaataacttgtaaaagtcgtactgtaatattcaatgcattcttagaaactgaaattaaaatttcaatttggaatctaaaatttaaattcaaaaacttaaatttatgccaaatatacaatgagtaatgattctttcttagaccaccactactaatctaactctaagtttaggttgcctatagtaagtaatacaagaaggagattttaagatcgaggattgatatcatttcgggatagaatgtcgggaatatagtcatctgagccattcagtttcatagaaaaaaatagaatggcatcataagcagatgatttataannnnnnnnnnnnnngatatactatctaagcaaattctatatgaaaaagctaagagaaaaaactaaa

SEQ ID NO: 147564 - DNA, 887 bp, Cannabis sativa
  modified_base (502)..(505): a, c, t, g, unknown or other
  modified_base (836)..(844): a, c, t, g, unknown or other
aactatttatttaataattataattaattatcaaataaaatggacctttattttatttattaattagacttaacaaaatctcttaattaacaaataaactccaaatcctcttttcttcacaattaagcccttgattagtaaaaattcataaagaatagtctaattttagaattataattgattaattaaaaccaataaattgagtttgtaagcagtattatctcaactagtgtggggactatgagcctatataatcaagcttccaataagtagatctaaaatgtatcaagtaaattctctaacttattaattcctccttgcgtcattatgaattcaaaattacactattaattatatagaatgctctaaatgtaccaagatatagatacactatgaattatacatcgttcttatccaaatagtcaaagatcctctatagatgatctatattgaatagggataaatttaccgtgctaccattcaatgtatattatccttaaannnnttagctacctataaatgatactttagtaaactaatataattactgaaatgatgcctcaatcatttatctatatcaagccaagctcgaaagagtataggctgatatcatggtcgatctgtactacttgacagtatcacattcggcacgactagagtacaactagggtatcgagtataggttgatattatggttagtagtactgtcgtacgaacgttctagactcagcaccatgttggacacggggatagggttatgggttggtgtatgggtggctgattataattcgggttatagagcaactgtgagagcgagcagatggagattgtacatnnnnnnnnngttaggcctagagcgtacagtctttgggacatcaaggcttatt

SEQ ID NO: 147565 - DNA, 527 bp, Cannabis sativa
ttcaaggaactcaccctgttatgacttgggagacacttgtgatttaaaatccattattagtttaaacaagtaatggattgtgtttggttgttgttattgctgctgttgtttgatgatgtttttgaagttaaattatgattagaattaatgtttagagctagtttgatggttgtttttgaggtttgttcaaggtttgagcttacaagcaactttgctctcacatggtggattttaattctattcatgttgaggtgttttattgctttgatattgttctttgaggtctaaatagcaggtctgcaaggtttcattgagtttggggttgaattggttgagttatgaatttttgttggattcctgcgcagaatcggaattccggttcagggggacctgtaggaacaagaattccggttggtccccaggaaaccccgcggaaccgaaatttcggttggggtagttttgggaaccctagttttttcccatttttgtgatgtttagggtattgccatgttattcatcgataggga

SEQ ID NO: 147566 - DNA, 592 bp, Cannabis sativa
aaattactatccctattgataggtaaaaatacctattgtattagcttccatatatatatgggtgactacttaatgattacattcttattgtaatttgtaaccatcatgattacatttttcttttacctataatagcaaattaccaataggtaaaacttcatttttttgaatcaattaattataattaattattttttaaaataattatttgaatatttaacaagaccttttagcaattagtaattataaatatatttttttttatataaatctctgctaaaattattttaacagttaagctattttattataatatttacaataaaactttatttttttttacaaaaattagattttttttttttgcacaaattagaattctcttcttgtataataaaatttttaaataattaattattttgaaatgttattaaattattttttcataactagaagaattaagtatgagtttttctattcgagtttgacgttgctttgttttttggagcagtttgactttattttttgagtaaatgactccttataaaaaaaaaaaggatggaggagtttagctattttttttttttttgaa

SEQ ID NO: 147567 - DNA, 685 bp, Cannabis sativa
ggtagaatttaggtatccccctcttgaaaaacttgccttatgcataatccactcatcttgcaaattatggcctaacttccaggcccaatcaaagtgttaattgatcaacccttgagacaagttttatcaaaactagacgcttctggaagattgataacataactggggcagtttgacataacttatcaccctcaaacatccatcaagggtcaagctttggcagatttcttaatagaaagaataactccaaaagaaaattcgcttgtccagcgaggcgcagacacttggaaattattcatggatggagcatccaacgagaagggctcgggtgcgagggtgatattaattttccagaaggttttaagtttcattatgctttgagatttcaatttgatgcgtcaaaaaacaaggcagaatatgaagccttgatcgctggtttgaggatagcagaagcgttgaaggtcaagaatctcatatgtcatagtgatttgcaactgattgtaaatcaggtgctcggggaataccaagctaagggcctgaaaaatggctaagtatctagagaaggttcggaagagcttggaaagattcgattatttttaaatcgaacaaatcccaagagaacaaaactctaacgctgacgccttagcaaaactggcctcggagaatgacttggatgaactaaact

SEQ ID NO: 147568 - DNA, 651 bp, Cannabis sativa
  modified_base (438)..(444): a, c, t, g, unknown or other
attgctataaattacctatcgcttactaaataagactcactgtcgttggctaaaagcgaggtcaacagagaccatgggcctatataactgagcatccaataaacagatccataatttaccaagtaaattatctaacttaattccttctttcaccactatagatttggaattggactctttattatatagaacactctgtatgttccacgatatagatacactataaattatccatttgttataatcctaataattaataatcttctatagataatttacattgagtagggacaaatttaacgttacacccttcaacgtattttatccttaaaactcttagctccctagaaatgatattccagtgaactaatataatcactaaaatgagtgctctttcatttatctctactaagccatgctcgaaggaaatcatcgttnnnnnnntatatccaaatagaagctatagattctgtaattatgattaatgctcccactcaattgaactaccatgtccttaatctatatgtcacgagaagaaccattagtcgactttaatgagaaaattgaagaacacaaataatgcaattgaactagaacctaaccatctcaggattgagatcaattgatctaatatcaactaggtgatattga

SEQ ID NO: 147569 - DNA, 953 bp, Cannabis sativa
  modified_base (365)..(369): a, c, t, g, unknown or other
agtgggtaatgccccaattaggtcgatcccccatatggaaaatgggtagggtgaggtcatcattctaagttctgttggcgatacgcgaggtatatgttctaacacttatcacatttcttgacaaactcatgtatgtccttattgatctttggccagtaatatccttgcctaatgatctttttagacagactttgccaccccgcatgattcccacagaagccttcatgaatttctctaatgatttcgtttgcttctacgagaggaacacaacgaagtaggggcattgaataccgtcttctatatagtttgccttcgatcattgtgtagcaaggcactgtatacaatagtttttgcgcctcgttttnnnnntttggaagttgcccgtcgagtaaatagttgataataggcatcatccatgttggagagctatctatcatctcgacgtcttaaatttcacacatacttggctcgctcagcatttctaccggaaccagatttagtttatccaggtcattctgcgaggccagctttgctaaggaattaacgttggggttttgttctctcgaaatttttttgattttaaagtaatcgaatctttccaagttcttccaaactttctctaaatacttcgcaattttcaagcctttggcctggtattccccgaggacctggttcacgatcagctgcgaatcactatgacaaatgagatttttgactttcaaggcctctgctatctttaaaccggtgatcaaggcttcatattcagcctcgttatttgatgcgtcaaatcgaaacctcagagcatagtgaaacttaaagccttccggcgatattaatattacacgtgcacctgaaccctgttcgttggatgcgccatccatatataacttccatgtttctgcatcccgctaatcaggtgggatttcttctagagttataccttctattaagaa

SEQ ID NO: 147570 - DNA, 910 bp, Cannabis sativa
cgaatgttatgtcgacgatttagtggtcaaaacaaaagaaaggacaagtgatcttgatgatttaaaacgagtctttgacaggctcaaacaacacattctcaagatgaatcctttaaaatatgcatttggggtaacatcaagaaagttcctcgtttatcgtcagacatcgaggaattgaaattgaccctgcaaaaataaaagaaattttggaaatgcctcccctgcataatttacatcaactacatggactacagggaagacttgcgtatatccaaagattcatttaaaacctgtccggtagatgtcaacccttttcgcggttgatgcaaaaaaatgtcccatttatttgggatggggcatgccaaaacgcttttgaaagcattaagaagtacctgttgcacccacttgtgttgagagctccaatcttaggaaaccattgatattatatatcacttcactcgaccgctccttgggagccatgttcgtgcaaaataatgaggagggaaaagaaattgctctttactatctaagtagaactttagtaggggcagaacaaaaataccctccaatcgagaaagtgtgtttgactttaatttttgctgtcacaaaactacgacactatttgctctcacatcctgtgactttagtgtcaaagctgaccctcttagatgctatcagaatttgaaatcaactttgtcccgcaaaaagcaataaaaggacaagctttggctgattttctggcagcacacccaattccaggtgatatggagttgcgagaagatcttcctgacgaagaagtcttcacagtcaatacttcatcatggcaattatattttgatggggcagcaagaagtagtggggcaggtgttggaattgtcgttgtgacaccgtcgggaggcttgatacctta

SEQ ID NO: 147571 - DNA, 1028 bp, Cannabis sativa
tttcttctcaaaggccactctttatcacttggatggaaatcttcttctacagtcatagtttttttacttcaaattttagttttagcaaaaagcctctatagcaaaagagaatatatgtgctttaaatatattcttctccatatacataaacttagataaaagcaatattaagtactatttgggaaaagacatatatagttggaaaaagtaaatgcatattacattggaaaacacatgtatatatttatattctatatactacaatatataaattaataagattcaaattaacaataaattattctagcagatatggtaagttgtcctaagtgacatgggttaaatccttgtaatcttcatttgatgattttataccacttaattttcttctattttattttatttcatttttttaagatttttatctccactttatcagtcgagtgttcatccaatccatttcgcactaagtgcagatttcatatttttagattcaatgtataagaaatattattgatgtcttatcacacgtcttattttagtgtatacaataattaaatctataagaattgtcccataataacaagtttaattaatatactgtttacagaaataaccagcaagtatggaacataataagagttctagttatagtcatttctttttctggttgtcccatgtggatcaaaccaagtaccacaagcttggttactcctagttatgacaagtttggttactcctatttgctaatatttgttatagaaaattttccctttaattttgatacgatactctgttgtgatctaacaactgtagcttccttatttgtgtgttggaatataaagggaaatcggaagggccttctgggaatgcacggttttatctctccggtctcgtggtacaggacatgtctttctggtacaaattactgaaggcataaggctttacgactgcggaaccaagatatgttcctggaaggacatatccaggtgggattggcccacttctcctttgctgagggtcccact

SEQ ID NO: 147572 - DNA, 808 bp, Cannabis sativa
taggatgttaattcaacatacttgctagtaaatctaaatcctggttacccttttcaaagccccaccagaaatctctaaccatgccatcaattctagtcaaaaaatgactagacaacatggtagttttcatggagtacataggcaaggaaagttccatagacttgattaaagtcgcacaaccaaccttagaaagagttttcaccttccaaccctagagtttggcagaaagattatccaaaataaaattgaagtcagcatctctctgcttcattctaaagagaggaaggcccatgtattttttaacaccctactagtttaggcgtgctacagtgcttttcataataactgtgcaacctttgctaatcaaaggatttatcaaaattgataaattttaaactttaataaataaacatataatttattacatttataaaatacgagctcccgtatctacatttttcaactgtacataatcaaaagatgtcacacaacgacttctaaattgtgagccctaactgtcccaaagatctaacactctaggtcaaactgtctcgatatgtacaatcttcatccagctccaaactcactgtagttcagcaacagctttgcctttacctgcacataacatcgcatctatgagtcgacaaactcagtaagaaaagcataaaacataaacatataactgacttgtggctaagcgcccgtacacctatcaacaagtcataaaacatgtctgttgcccctaattttgcccaaaatacgtggaccaaccagacagggacatgtggatcaagcaattttacaatat

SEQ ID NO: 147573 - DNA, 534 bp, Cannabis sativa
aagaaactaaatatgtgcaacaccttaatgattaggcacgtcacggtaatcgataatgaaaccctaattccactaattcagaattattgaaaatataagcgcagaaaatttaaactttatttacatcagaatgaaaataaaatttgtaataattttaaactttacaaataaaccaaaagttatgtttcgggatcccataaacattttcacaaaatattacaagcttaagtcacgtgccgacctaagcggcaaaatcagagattacaaaatacatcactggtagactccaacctgcttggtctagtgtgacctgaacatgtacaagcactgccaagctctcgcactcatggctgatcacaaacagatttaccttttcctgcacagtagagcaccatgagccaagcccagcaagacaatataaatatcaataatcacaatatatatatttcacacatacaataataacgctcacacgcctaaatacgtctatgtggcatagactcacgtgttacgctcacacgtctatttacaata

SEQ ID NO: 147574 - DNA, 501 bp, Cannabis sativa
cttgcactttataaagcaagtagaaaatatgtgggagtgagatcattgacataacatagtcacgaaatatatgaattacactcaataaaacagtatcattaaaaattctatatgaagataacacgaaatgcattgctcaactaaagctataataaaggagattgaaccaaagatattcttaccaagttcttcctactacatgatattcaagaaaaaggctatattgttgtccaacatattgaatcaagtgttaatcatgcatacttattcacaaagttattaccagcatcaacatttgagaagacgacatataagatcggaattcatcgattagaatatatctacaaatgcttaaatgaaggggagttaattcatattgtactctttttttttttggtcgagtttttgtcatattaagttttctagcaaggttattaatgaggcagttattatagacattcaagagagagttatgaaatattatataaatatatatgtgga

SEQ ID NO: 147575 - DNA, 1593 bp, Cannabis sativa
attccaagtttaaagaccgcttcgccggtcatgatgtcttaaaaaaggttttatggccgaataagatatataaaaaaagaaagataaaaagatatgtatttaaacagctggagttccaggctctcagtttgggttttttggaccggtaagagctggagaattttttgtctgagcggaaggtacctcaacattcttgccagaagtagaagtagtcgcctcgctttcaccataagccacttgagaagcacagtactcaagatacatgtctttggcctcgcccaagtaatcaaaatttgcatgagggttagccttccaaaagtgataaaaaatctcgagaccagctaaggcatgtactttctcttccagcctcgccacctccgatttatgcttctcgacctcagctgtaagctcctcctccttcgtcttcttctcttcgtccagccgacggaagactatctaaagaactcccctttcctcttgaagactattcacttctgccgacaaggtgccgatggtagcttcaagttgatcggaggcctctaggtccttagtcaacttggctattttcctctcaccagtaaaaagcttcttgttgacttcagctagctctatttggacagctccgagttccaccctggcgtcatcatcattcttcctggtcaagtccacctccgcccacatggtgttggacatggcagcgttcttggaggcatcaaatttggctcgggaataggtgtaagccaactttagactagcctacacagagaagaaactttagagtctgagccaagtaaaaaggattaaaggaaactatcaagaaagacttacccttgtaaattccctcaagactcctcccatcagcagctccagtgaagattcgttgtcagagccggccagctgctcactcacctcaggaaccaatcgcttcatgtaatgggcgagcatctccttgcctttcttggcctctagatgcagtggagagggtggagtaggagcccacatctgctcagattcgctcttagccagctcggatctgccctttgactcctcaggcctgttcgagcttcctccccgagaatctttggacttagcaactttcagagtagaagggtccgtgacagttagctcctcggaaagatcaataacctccccggccggtgtcttttccttagaaggggtcacctcaccgcccctagatttcttagctagaggagatgagcttgagcttcctccaactctcttcttcagagcatcgagcatcttctgagacatgtctgcacgaaataaaaacaacatggttagaagaaaaaaggcattagaagcataaaagcatgttaatcaaagaagtttaaaaacaagacggagtatcctgtgcttcatgagaagcgtttgtctgagcaagactcaagagtccatgataaccaaacaagcctcttatctccgccatgacagctttcccttttcatagtacgggagaggatggcgagcaggtatactgggctccctaattcgaatggcatgttcaacaggcctgggctgggccggaagtttcttcctccttttgagcggagtcacctgctcttcctcaacctc

SEQ ID NO: 147576 - DNA, 746 bp, Cannabis sativa
aatagccaatttttttgggcttggtgcaatactctccaagtcctaatgccaatggcttcgacaccttgagaatagccaatgcctctgggcttggcgcaattctctcaaagtactagtgccaatggcttaggcacaatgtcataatgtcaatggctcattggcattaggcacaaagtcctaatgccaatggcttaggcaccttgagaatagccaactcttccgggcttggcgcaattctttcaaagccttaatgccaatagtttaggcacaaaattctaatgccaatggattaggcacgaaagtcctaatgccaatggcttaggcaccttgagaatagttaacgcctctgggcttggcacaattctctcaaagtcctaatgccaatgacttaggcataaagtcctaatgccaatggcgtaggcataaagttctaatgtcaatgacctaggcacaaagttctaatgtcaatggcttaggcaccttgagaatagccaacgccttcgggcttggcacaattctctccaagtcctaataccaatggcttaggcaccttgagattagccaacgcctccgagcttggcgcaattctctctaagttctaatgctaatgacttaggcaccttgagaatagccaacgcctttgggcttggcgcaattctctcaaagtcgtaatactaatagcttaggcacaaagtcctaatgccaatggcttaggcaccttaagaatagtcaacgcctctgaactc

SEQ ID NO: 147577 - DNA, 551 bp, Cannabis sativa
agttcctggtaaaataacttccaacaaccccctctcaaacgaaatgatgtgggagacatcttgagtttggctgtcaaatagttgaacctttcagttgataggggctttcttaaagcatcagcaatttgatcaaaggcgtggacatatcgaactgataactccttggctagtatgaggtctcgaacaaagtgcatgtctatttctatatggttaggtctagcatgaaatacagggttagcagcaatagctgcaacactttggttgtctatcaataagataggacattgagtttgttgaatgtgcggctcagacagtagagaaacaagccactttatctcagcaacagcattagcaagagccctgaactcactttttgagctagaccgtgccacaaaatgttgcttcttggcagaccatgagacaagattccctccaaagaacatgacatagccacctgtgcttttcctattattatcccaaatttggcactttgatgtggcatcacaagaatggtgacacgtggcatcaacttagagcacctggtcggatca

SEQ ID NO: 147578 - DNA, 517 bp, Cannabis sativa
atatgctatattacatacactatatatatatagtctaacattttttatatatatttttattttaaaccaagttcctttttgaatgatttttttaaaaaaaaaaatcagctcaaattatattatgcacaaaaatatttacaaacaccaatcaacaatcatatttaattacatttttaaatcccccacccaattcctatgttatgctttactaatttttatttttatttttatttttttattcaactacatcattttattacatacatctctctctttatgtctctcactacaacaaatttcattcctaaccttccaaatatagtaaatacttgcacttatagcacaagtaaaaatgcttggattgatttcttgtatcttctaattaatccatcgattaacccaggaagctgaaacttatataaaccaatgtccaaccacaaaagcacctgttggatacattgcaagctaaaatgatagcaatgaacccaaactgaaacaatctatttggggttcgcaa

SEQ ID NO: 147579 - DNA, 650 bp, Cannabis sativa
tgttccttaggtcggggctatctcgtgtcctcattactgcaagaagcctctggtacatcattacgttcattcccttggtttataaatccttgggatctttgagaaacgtctcgatgttgctcttgattattttgttgttcatccactagaacatccctagtacccccaggttattccttctggatgttttggggatttccttgatttttttccagtctcctagttcttgaacctcgaagtctgcctcatggccttctcaccccagaatcaggtttattctgagtattagttccttgagttgccctagctgctacagcctctctttccaacccagcgttttgtcggttatagattcaactaagcgttgccggagttatctatttttcaattccactaatggtacatacctagttagattataatcctcacttctaggtacatatccaatagaattattggtttcttcgttccttctttctgagttttgattatcaccaccatagtttctccttgaatgtgaagttctagtagtatggggtcttttagaacttattggctcttttcgtggaatttttccgagttttatcactaaggctctcaatgaaagcaccaaactgttaacgtaaattttcgttaactaaaaataatga

SEQ ID NO: 147580 - DNA, 685 bp, Cannabis sativa
ggtcgtccagcattgatcgaactacgggcagttagttcgatcaagcacctatccttgaagttccaaacaccagaaggtgtgggagtggtgtggggccaccagatgctggcttgcgagtgctatcgcatagagttgcagcatagaaagccggtcaccagttaatggtgatcttggcagaaaaaagtgaaaggaaggacgaagatcttgaccccgagttcaagatgaaagaaacctattaaaaccaattgaaaaattggaagaagttattcttgacccaggaaatccaacaaagtgtgtatacattgggaagaacctagacgagaagctcaaatagcagctaataagtttcttatgggcgaaccaggatcaattcgcctggagccatggagatatgatagggatcgaccctaacattatctgccatgatttaaatgttgatcaaaactaccttgcaaagagacagaaaaggagacccttagattccgagagacaaggggcactaaaacaggaactggacaagttattagacaatgactttatactcgaggtgttttatccctcgtgggtagctaatccttttctcgtccctaagcctaacggaacttggagaacttgtattgatatttctaatctgaataaggcatgcccaaaagattgttttccactacctaggatcgaccagtta

SEQ ID NO: 147581 - DNA, 647 bp, Cannabis sativa
aaggttaatttttgaaacttttgctaatttttctctgcattttgtgttttagggaatggaaaatatatgtcattgtagggaatgcgtatagaaatttatttctctgctaaaaacttggtaattctcacgagagaataagccttaattttgcataatcgtgaaccttaggaggagcactttgagtattcgcatcttttttgtttgctgccttggatactcgcgagtattgagatgaagatcttaaatactcacgtatatacattcttaggaaatatggggatttggtcatcccaactcattttttagaacttatggttttccttatgttttctgtatgattttgttgggaatattggttaggtccttcaaatggtgggtgtgtcgtcgtaacttaatgttcatgtgtgtgatcgcatgctccttgagttactgcgatacacctagccttttgcgacatatggtcagtttgatagaaagtttgcacaagccatgtgatatttatgcttcggggtttggaaccctggtaccctcaggagaccttttagtatccattagttggattcggtctttgtctttctggattgacggttgtgagttgactgccaatttgattgaattacaactgtctgattttgatataatcatgg

SEQ ID NO: 147582 - DNA, 651 bp, Cannabis sativa
tacatattaccctacacaaccaaatacagtttacacatttccctataatcatattctccttcataatatttcctataatcaaattattttgaacacctcatacaaaacgcccccttagtgattaatctacaaattgttgttgcttgtttttttttttaaaaaagaaaacgttcattagaagagaaaattagacctcacgatcattgcataaaatgtttataagaatggcgaaaatagaaagtcgaccaaactagttgtgggtaaatgcctacttaactatattatggcccataaaattacatattctcaaaatattagaaaacaaacaactaccaaaccggtttgtttactttagttattttccttatttcatttcatcttcttgaaactatttttaggagtaattaattttgtaatttaattttcaattttcaatgtatgacgagacgataattatttattatatattttttttgaacaaaattaattcattaaacaacaatatccgctatcacaatagattgaagagcatttggaacattgctctcagtaaaaggacgatcagaccaaaaacaagcactgcgagcaacacaatgtgcgactttgttagcagatcgtttaacatgacaaatagaaacattatgtaaagaa

SEQ ID NO: 147583 - DNA, 602 bp, Cannabis sativa
gcgttaagccaagctcaaaagaaattatcgtttcacttctaatagttatagaagttatagatttcatatctatgattaacgctcccactcaattgtactaccatgttcccacgacgtagtattgagaagatctacttggtaaactttaacgaacaagtcaaataacatgaataatacatttaagccaaaacctaaccatctcaagattaagatctattgatctaagatcaactaagtgatattgacttaaaaagatataacaataagtttatgatatcttatccaatgtcaatattagtcctgttcaatatatactccacacatctgatacttgcatactttgccaattctctaccacatattattttgtaagtaaactttatcgctaattatcacgtcagtgtaaatccagtgtactgacaaattatgggactaaaactttgaagcatataatcatgattatttttcactgtgtagacaacactataatcatgataattatatatttaggatttaatagaatttatacattaaacatataattatgaaagtaatcatgtgaaccatgcaatataaaatgatttctgattttttattaatta

SEQ ID NO: 147584 - DNA, 617 bp, Cannabis sativa
aaatgatataaatatcatttttctaatttataatttttaaataataaattatgtcataaaataaccaatttatgaatttaaaattattatggctagaatatctatgaaattatctaaggtaatttcaaatttattgttatttaatttatcatataagataatttttaatataatattttaaattaaaaggataaaacaaatatctttaatttaaaatatatctaatattataatatctaatcttattattaaataatctgtaaaattaagaaattaacaaatttttaaaatctaaccataaatcaaatatacataactaatttttaaattcaaacttcaaaatatcaaaaaattaataataaactattaaaataattaaatatcattaatttatttcaaaattttacatttaggtaggtcaaaatattaaaaataatattttatatttatattgagcgttttgaaattgaaaatttcaaaatttggtgaaaaaattacaaaaaaattgaattttttggtgcaaagtgttgggttttgtgccctaaataaaatgcatttcaaaataatccaatttactaattaataaagatcataaactgcattttatgttgcatggt

SEQ ID NO: 147585 - DNA, 786 bp, Cannabis sativa
gcttcggatagccaagtacaattatgcccttgacgagtactcccgggggcatgccgaggtggaggccttgaggagggttttgcgagcggaggtgtaaaattccctcaacgaggagaactatctgaatccgtgggatctaaacttggaccccttgacggactggtttaaccgtttcctcgggcctaccttggatccttttgccgctgagatgaccggcgagtacgtctcccagctgactcggtgtgcgcccaagaggtacgctgcttgtgcatccttgaactccgtcttccaagttcaggatctcagccacgccttggccgcggtaagtactttgtgatttacttcttttctcattattttacttaaggcctttactcacttttgcttcccttttcagattactgccgaggctagccgcctttccaagaccatcattaattaaggcttcgtcttgtccgaatttgggggcatagacgaagtcgtgaagatcctgcaagacctgtctgctgaaaggcaagcgtttcgggaggaaactgcgcggcaggaggctctggctaaggccaagttcgaggaagaggccaagcaaagggacgcccaagcggaggcgatgatccgagaggaggtccttcagagggataggctggaggcgaagcaccgggaagcgttgagggcagagggcgaggctactgctaaggcgaagcgggagcttcgggaggccaaggaggccttagacgagatggccgccaaggtgaggtccctagaggaattgcaccaggcggacttgga

SEQ ID NO: 147586 - DNA, 720 bp, Cannabis sativa
ggcacgggcctgccacttggatcccccagggtgctcgtaccagtttgatcagctgtagtggccaaacttgtagcgcctattgtggtgacaagattccccacatctgcagtgctcatggggattccagttgtgactggaacctaagtgcttggatctgcaatctatgggtcttgagggagacccaaagatgtagatggtgcaacaggagttcttcttgtgttcaccatggcgtttgattagatcatgatttccacgctctcaatgaaagcaccaaactattgacatcaaaaaatgatcaaccgacatcggggttgtatggatttgatgctttccatgtttttgcataaataagaatgaaaaataataaacaaaagaattgttatagaggttcgacccccttgtgatagtgggtaatgacctactcttcttttagttttatttataccaagggttaagactatccagatcactataggtgggatctgctataccacccttaggaatacaaggtatgaatcaataatggcaaaactcaagagttgagatgatgctaaggtaggcgtgtgagagagcgttaattagacacttagagtttagtgttaggatttataaaacacttaaggaatatataaatcacagatctaaacatattcataaaagtgctttaatatagaaaaccctaaatcataaatttatagaaccttcgctaaattaaagaag

SEQ ID NO: 147587 - DNA, 612 bp, Cannabis sativa
  modified_base (221)..(223): a, c, t, g, unknown or other
ttttggaccctgtattttgtaaaagttacagattggatcctctattttgttaaataacaaaatagaccttgtattttctaaaatggtaaaaataggatctgagcttaatttcgacaattttttttaatataaccaatttgaaaacaattcctaacacgaacagatacagaaaatgtaaacaaatttgtcataacatatttaaatcagattattattaaatnnnattttgacaaaaaataattagttcagagttccattatttgtaatattttgaaaaatacagggtccgtcatttaaaaaatagagagtctaatcggtaacttttacaaaataaagagtccaaaatagtatttacccttaataaaaatatatctaactaaaatgatatatatttattaattttttagctaatatatctttaaaaaaaaatcccataaattagttaaaatatctatccaaccttataattttgtataaatatataaaaaaattctaaaataagaacacttcatttgtccccataggatagtgacattttattagctattgattatattgacttttgaagatttaaactatttattatggaatagcatgcacattatataaatt

SEQ ID NO: 147588 - DNA, 1240 bp, Cannabis sativa
taaaatacctcgcgtataaaatcgttgactaacaacttgtcaacttcctattttagtgccccttgcctctcggaatccaagggcctccttttttgtcccttcactgggtaatttggatcaacatttaagtgatggcagataatcttagggtcgatccccatgactcgaggcaaattgatcctggttcgccttcaaaaagcttattaattgctatttgagctactcatctaggttcttcccaatgtacacacatttggtggggtttcctgggtccagaataacctcttccaattcttcagttgtttttagcaagtttctttcatcttgaactcggggatcaagatcttcctctttcttctcgttttctcctgccaagatcgccatcaacagatgattggcctttccatgctgcaactctatgcgatagtaatcgcgagccagcatctggtcgccacgcaccactcccacgccatctggtgtttggaactttcaagataggtggttgatcgaactgactgcctctagtctgatcagttctagacgaccgaacagtatgtagtaagcagaaggcaggtcgacaaccaagaagtcttgcataacagtagcagttaaaggtgccttgcctaaagttaatgcgagctcgattatgccaaggctagcgatgctatccccgatgaatctgcaaagattcaccatacaaggccttaacttgacctttttgagccccattttctttagagtctccttataaatgatatttaccgagctcccattgtcgattaacactctcttaatccttttattggctagttgaatggttatgaccagcctatcgatgtgagggtatctcacgttcttttcgtcttcctctgtgaacgtaatgaggggtttttcagttttccaccttctaggaatggtgttggccaaagatcgactgcttgttctttatctccttcaaatatctcttctgagcgttattgctttcccctgcaatagacgaccctcccgaaataaccaggatgtcctccccttccacaagaataggttgtaacccctggttgtttgggttattaggctaacggggctggttgtatccttggccctatcttttcacatacagtttaaaatggcctcgagcgatgagactctcaatcttatatttcaattggcgacattcgtcggtcgtatgcccaatatctttctagaatttacaatatttgttaggatctgttttgctcct

SEQ ID NO: 147589 - DNA, 536 bp, Cannabis sativa
cccttctcattacaattcaaacattgaagattatgactaataattgtacttgaagaagcagctttgttagaagcttcatgcttaatccttttcttctgattaaagttggcaaaaccaggaggtttcattgcaatcagattccgttcatgagcttgtaattctgcttcgagcttatccatgtcggaagagttaaaattgttgatcatgtagatacagcaaatgcattatactctggaggaagactattaagtatgaattgaacccattgttccttcgataattcaattccaagtagatttgccatttggaacttcagattcatcatcaataggtgcgagtttttgcaactaccagggtgcattttcacactatagagttcatttgctaagacattgactaggagtgggtcggggtgttggttgatcatattggcactacaaatatcaataaacagaagtaaggttttggttcaataaattcatacacaagtttagaaaataacaaataatcatatacgtttataaaaataccaaaat

SEQ ID NO: 147590 - DNA, 562 bp, Cannabis sativa
cagacccacctttcaattgttcggacctgtctgaacttcctcctcaagactccttggacttagcaacttttggagtagaggggtttgcaactgttagctcctcggaaagatcaatgacctcctcggcaggcgtcttttccttagaagaggtcccctcaccgcctctagacttcttggctggaggagatgcgctgaagcttccaccaattctcttcttcagagcatcaagcatcttctgtgacatgtctgcatgaaacaaaaacaacatggttagagaaaacagacatcagaaacataaagcataatagttaagaagcttaaaagcaagacggagtagtatgcaagatgattgcccgagtaagactcgaaagtccatcatcacctagcatgcctcttattgtagacataatagctttcccttttccaagcacgggagaaggtggtcgagcaggcgaacagggctccctaatgcgaatggcatgttcaataggcctgtgctgggttggaagtttcttctattgggttttatgccctaaataaaactctttacaatctgattagt

SEQ ID NO: 147591 - DNA, 740 bp, Cannabis sativa
  modified_base (224)..(226): a, c, t, g, unknown or other
ttgacaagatcattctctgcaaagagaaatataccaatatctacttgaaaataagaccatctgtattcgaatatatagatgtacattcaggggtggatgagttattgttaaattcttaaaatgatcactctagatgtttaccttatgcaaagaaattttaaatgtttgagaaaaatttcatgaatttctagcaatgttgaaaaatattaaggtaagtggttaannntcttgcgaattgataggggtggaaaaatatttggtggatatgcaattcaaagatcattaagttgaacttcgaattgtatcctaacttaccaccccagaaattcaaatttcatagtaatgaaaatgaaaggtctatgattagttactagtagatgcctaagtccttctagggaaataccctagtgatgggataacttctgaatgatggaatggttatatacttaatgcacactattacttgattcaaagatgtcttgatcatgaacttaagaaaagttagaactgttaactaaagtttgcaagtttgatagctttctaaagtgattatgggtggaccatcctatggtcattaagataagaaagtttgcaagtttgtttgatagctttctaatgagtattcttgtaaattaatcatgtcaaataggaatttaaaatgtcataatcctttttccaaagtatttatggtttgattctctaattaattaacatattcctatgtccaattaattttaaga

SEQ ID NO: 147592 - DNA, 812 bp, Cannabis sativa
  modified_base (401)..(403): a, c, t, g, unknown or other
ctagcttccagacaccatgtggccggccagcatgcactctggcaggtgcatggccggccagcttttgcctggcaagtttttgatgtatagctttcattcgtggataataagtcaagtaacgaattgggccttaacaacacacaaaaatagagcgaaaatatcagcaactttcctattttcgagggacaatttagtcatttgaactttattaatttattatttaaataatagctttatttacatatctttaaggatgttagagatgtaagctctactatataaatggtattagtcaaaccctaactctctaagtcttaaaccctaagtcttgatgtaaagaccgcttagctttattttggacatagcaaataattagggtttatttatgaaacttgaataannnttataatttatcattttatggagatttatttgaattcagaatgtattatttatgtcatacatgaaattttatatttttgcatgttgtgtgctcgacaacactagaatgcggtatttggccaatagaatcacattttggtatttagtagtagcggagcaatatagttagacattggaaatgtcgagaatagtcaaggttttataattgaccgaaatacccctaagtaacaagtgtagttttagtatttaagagggcaaaatggtcttttgccaaagagttcctttttgtcttttagtatgatttgctttagtttattattcaaaatattaattaattaacttagtagataatacctaagttttccattttgtcatttattcattaaaaaaaaaaaaaagaaaaccaaaca

SEQ ID NO: 147593 - DNA, 520 bp, Cannabis sativa
gcgagatatactttgttgttgttttggcatttgaagcagaggtggtttctaaggcaccatatagaatggctccaacaaaactcaaggaagtaaagtggcaacttggaatttagacttagggtttacctgacctagtatgttactgtggagctccgatgttatttatttaaaagaaagatggatcgtttcatatgagtgtttactaccaagaactaagcaagttggaaattaagaataagtaccatctgtcaaggattgtgctatgatttgtattacaaaatataaatatgttaatgtatattattaatgtagtatttgtttttttttttttgaagggaaaccgatacaagttaaaattacaaaggtaacaaagttacgcaactagaggaggattttcttattccatctataacaattcattgtctattctaagggcattcaaagataccccaggagaactagacaataaaaccataatatcaaaaaagaaaacctcaaaactgagagttgtcacttccaa

SEQ ID NO: 147594 - DNA, 509 bp, Cannabis sativa
aagtaattttatcatttattacttccttatcttgcgcgaaccgttaatattcagctttgtacgcaagttataacttattgattttcctttctcgtcagacaggtttaaaccaaaaagttatagtggtttgatccctttctcgttagaaaggtttgattaaaaacttcaaaaagaaaattttaaagttatgggtttgcattatatcatgtatttctagattaatcccagttaattatacacaaatgccccttaagtaatttgaaagagtaaagctttgcaattacttaaataacagaaatgattctctttattcataactgaagttaaaatattacatcatcaatgtgagttacatcatttatttattggtaatagggtcgcaaatgttccgcgttccaatagttctttattggcgagccatttagccgagccaatttgtaaactccaattctaactactacttcgattacatatggaatctcccagttcgggttgaacactcctgcaga

SEQ ID NO: 147595 - DNA, 914 bp, Cannabis sativa
  modified_base (862)..(863): a, c, t, g, unknown or other
tgtaaagggttttatttagggcacaaaacccaacaatatcaacgtaacagcctttaggtcatatgaagctagtcgacctaacatgtcattaaaggcgtatggaacgtccaatatcaagaattgtgccattacagttatgctctttggatcttgcccaacagtgaggggtaggtgaatttgccctagaggtgcaacactctggccggagaaaccatacacaggatgaagacaaggagttaagtctttgagttggagccccatcttttcatatggtgttttgaacaatatatttgcagaggctccattatctatcatagttcgggccctcatttttctggctatgtggacttccacgaataacgatcattgtgtgggaaattaatcttgacagctttttcatcattaatatcagggtggttcccctgcccatggtatttttggcttcctttcttcgacggccagaaccacctcttcttgctcgtgctgtaatgttcgagtaaacctctcccaggctttccctgaatctccagctatgtgtaggcctccaaatgacttgcaaatgtccatctactagtggtgggaataaatcttgattattatccgtctgggtggccctttgattttgatcggtgctaacatatttttgcacttgcgggttattctttcttatcaaaaactcaatttcctgcctcagattgttacattcattggtgtcatggccataatctccatgaaaacggcaaaacttggtcatgtctctcttgcttacttcctttttcatgggagcgagtttcttatacggagctaatgactgagtagttgtgtagatagtctctaaatctcaagagtactatacatgttnnttgatttgttagttaagccgacttttgggtcagggtgatacgtaagatcgg

SEQ ID NO: 147596 - DNA, 1802 bp, Cannabis sativa
  modified_base (1184)..(1191): a, c, t, g, unknown or other
gatagaaaacttacttgatatgttgttgagagatattgaggttgttttgaaaaaaaaaagagaaccaattgagaatagagaaacgatagagaatagggatgcgacagtcaagctttaaaaaaatgaattattaaggtttagggtagatggttttatatgttggcaatattgtcatttaatttttaataatgaaaaataaaataaatttttaataataaaatcctcattacgcgtaatggcatacctgaacaaaataagaggaaaagtattctcttaatttctcctaaatttatgttaacccataaagcattcctattattaaataaaagtaaacaaaagaaaatgaatcattaccctacatcacattcacaatcctgataagtaaatatgccataaatccataaaggttgttgaggtattggttaacccaaatggcatcactagaaatttataatgcccatcctatattcaaaatgccttctttgctatatcttcctctcgcacattggcggtacccagatctcaagtcaatctttcagaagacgattgccccttataactgatcaaacaagtcatcaatgctagggaagggatatttgttctttatagtcactttgttcaactctcggtagtctatacacatccgcatactaccgtccttcttcttgacgaacaatactggcgcaccccaaggtgagtaacttggtctgatgaaccccttgtctaaaagatcttgtagttgagccttcaattccttcgattcattaggagccatacggtatggagcccttgagattggtgttgtgcctggctccaacttaatcacaaattctatctctctatctaggggtagcccttgtaggtcttccggaaaaacttcttggaattcacatactatgtggacattctctggcttgaggggggtttctcttgacttgtctactatgttggcctagtatgcttgacatcctgcacgtatcatcctttgtgccttcagggttgtaactagcggtaggcttgacttgactttgactccttcaaatatgaatgcctctccaaatttaggggtgaaagtcactgtcttctttcggcagtcaattattgctccatgtcgtgatggccaatccatacccaagataagattgtgatccctcatctccagctctatcagatctccactaagnnnnnnnnttgcaatccttattggcgcttcccacactcctctagaagatatcataacctcgcccgagggcagtgtaagttctcaagctttgctacttttttcatttcaaattctccactactatttctatcactactcaaaaccacattggataagaaagacaagtggttcatagtactaagttgttggggaaactcagcctccctctggttaatgcaaatactcgagctgagacaagtttgtcatccttgagttgatcacccttttgcggacagttcttcttatagtggtctggttgtctgcacttgtaactagtcttgcctttcagttgacattctcctggatgcttacgaccacatgttgggcatagggggtactccacatatggcttcttccctttatagatattggaccctatcttgtttcctgtcggcttcgttgtgttggttacttaacggtttccttttgttatcattacctccattaccggccttttggcctcccatctaactgtattgtctttttgtatacgactttcacacaactcggcttctagggctttttccagtacctcagcatacgtggttgcccttacccctgacatcgctatgtcccgact

SEQ ID NO: 147597 - DNA, 567 bp, Cannabis sativa
  modified_base (510)..(513): a, c, t, g, unknown or other
aaaccaaatttactcaccattattaattattaaaaaaatatacatttcataataaacttttatttttgttttattattggtatatatatttctgtagcaataaaaagttttcatgttgggccagccaataattataataaaaaaaatcaacgttgttgcatgtaacgtaaaaccttgttcaaactcacgttctgtcctatacacaactgttatcacattattatttgtgttatatattgttatgaaatgtcatcaaagataattatatataaaaatattaaataatgctagattacattacacacctaaattgtatgcatttattacacacaatcatgtttataatattattcatttacgtggtattgtattgtattatgtttaatatggtatattatatagtgttgtatattgtattaagagtaaatattattttgaactctgtgttttgcaaaagttattaattagatcctctgttttattaagaccctgagcttaattttcaataannnnattttttaatataaccaacttcaaaataatttctaacacgaatagatacaaaaa

SEQ ID NO: 147598 - DNA, 574 bp, Cannabis sativa
agtggtgaaaaatatagttttgaaaaaatacaaattgttaagaagagatactataagaaaaataaaaccattcaaaatataattcatgaaatcgataagatttctaaattaacataaatcaaaatgagtaaataattaatacaatacttcttatacttttgaaataaaaaaatttaaaaagtagtcataacgaaaatataaatattaatttatttttaaaaaatatttaatttaagaaactttacgaaaataaaaaaaataattgtatagtagaattatataaaataaatttatcaagatattttagtttagtaataataataattataataatgataataataataataataatcaaagcagttactaatttctcgccaagttgccatcacgcatgaaagcggactaccacttcagccactattcatttatgcaactgccgatggcaaccgacgacgaagtcaaaccaccttgaatttgccgaaatcttctcagtgcttgggcttccgtcattcgtcatcggtgatggagcttcgagattcaccgactccattggagtcactcacaacaattc

SEQ ID NO: 147599 - DNA, 1246 bp, Cannabis sativa
  modified_base (640)..(641): a, c, t, g, unknown or other
  modified_base (1117)..(1130): a, c, t, g, unknown or other
aaggtaaaatctagagtgatcgttttttaagaatataatgataactcatatccacccctcaatgtacatccatacatgcgaatatatatgatcttactttcaaatggatataggcatattttcttttttgcaaagaatcatcttgtcaaaaccactatgaacaacatacaaaatccatagatataataaactgtggttgtggtcttttgatgaaaaaggtttagttataacaaagagttcttagaatagtccaagtggatcttggtcacagaatactaaacccatattccttacattaacatacagcttgaatccattgacagaatatggatattaataacttgtgaaagtcatacaagtaggagatttctaagatcaaggatttatatcatttcgggatagaatatcgggaatatagtcatctgtgccattcaatttcataagagaaattagaatgacatcataacaaatgatttataaaccattcatccaatgatatactatcatagaaaattctaaatgaaaaagctaagaggaaactaaagtataatttcaaattaaataagaatccaatgatgtcctgtttaggcgagagtcaaagttattcttattttatgaatctcttcattgtttcatattnnaaacactagtctaagttgtcatatttggatgtacaactaaatgttgcatttacaaatacttatccgtcgagatctaacgctattatgtttgtctaacggatgacaatcttttgggatttgtcccattaaaacaacaaggtaagttagaccaacaatgaagactcgaaatttagaactacaattaataatagaaaaccacatggttcaatataaattcatacacattcagaaattatcaaacttttagcaagtaagaaagacttgtgaaaatacaaaaacaaaaacatctttaatgatttccaaggtttccaacaaactgataggtgtcccatttaagtgagagtcgaagatattattcattgaataaagtagtcaactcatctaaaatggataccattatagcaaccttttaatcgatcaagactagaatctggcgttgtcccgtttaggtgagagtcaaggtcattctatcttannnnnnnnnnnnnntgtttcataccttgtaagtcttacccctagcaaccactttagggtgatgttactaagaataaaatacttacaaataatacttatctttcgagattttacggcgttaaattgctaat

SEQ ID NO: 147600 - DNA, 579 bp, Cannabis sativa
  modified_base (27)..(27): a, c, t, g, unknown or other
agtcaactcccatgggttcgaccttgnacttacatgaacactatattccgaaacaattcgtgcacttgtgagtataaatattaaaacactcacttctgggtacaacagaagccatagaatcaaaaacttctctcttccaacttgaaatgatttgaaaataaaccaattcatattttcatatgatattaagaccttgccaattcgaaaccttccatctaatcagtttaaataatgtcatactgatcagtttaaataaattgaaataaaattataggacgagaaatccacattctgcaacttaaaagaaaaaggattacaaattgtacataataagattattaaacctaaactttattcattttcacagtgaagtttgacagttaaaatttttttctgtatcttatcacttaccaatttttaacattcctaaattaaatccaaacataatcctctagtcaatccaaaaagcatccacaatatatattgtaatatccagtttatatacatatattggtatttggtatattaagtgtgatacaattatattattattattattatattataataataataata

SEQ ID NO: 147601 - DNA, 1109 bp, Cannabis sativa
aggactgttcctctgaagtgcattctatttctttgaacgaatttattaattaataaatcttatgaattttattcaaaaaaaaaaatagttaattagttagataagtagattttttttctttaaaaaaatcgttaaaagtagtttgttttagtaaaaatagtagatttttattttgatttttttaaaaaaatagaaaacgtgatagatagatttggagtaatttctttcttattattaataagtaataataaataaataaataaatatttatcaacctaatagaaaataaaaaaaattaaagagagaacaataataataaatacatatttatagacttaataaaaaattataaaatgagataactaaggatagaatatatagaggtattttgagtaattttaaagcgccacatcaccacctcatatctctcctttatttctattctatataaagtgtgggctatgtaacagaattcttggtttaacgaagttttttagtatctacgttaactttaaaagaatatcactattacttaacagaatattctttattaattttataatattattatatgtatttaaaaattaaaattatttagatattttatataaaaaaatctatatatataaaggagagatatgatgcagtaacgtgacatttattaaaattactcccaataatactacttcttcttctaattattctctccttaattctttattttttaaaaattttattagaataatatcatttaaaatacatctattaattttaactttaattttttatttatctattcactcttaattctctattttttttttttaatttttattaagtttataaatatttttttggttaattaattaagaaaatctatatacctatttattaaactaagctacttatcataataaaaaatagttaatatccaaattcaaatcgcctcacgaagaatgactacattacctagtatatatagatagatagattaatattatttttattttctatacaattcaaataattattattatacccgaaattcgattagaggacacgtgtcaagataaagggaatgtgaattgatgcgataactttttatggaa

SEQ ID NO: 147602 - DNA, 591 bp, Cannabis sativa
tctttgaggtagaatacacatgtactgtattatcttatacatatatatatgtctatatatatgtgtgcgtgcgtgtgtgtgtgtctccagtagttatgttttgagatagcttcattgcttttgtaatgattattccttgtaccagttggtgcgtacacatatttctaagtgtgtgattgtgtaaattgtcgttattttttttattgcttgctttgtaataggccattttaggtatgtataatgcatacatacatatagaacgacatttacattttaagttagtattagcttttgttttttcttttacaagttatgttttactctcactcgtgtagaatgtaaaaagtagagaatgttttatcatttaaataaagctaaattagttaatatgcatatatataaatatatattgtatgacaccaagagtagagaatgcgaagatgcatatatatatatattaagttttatttcttagatctcatgttaataaaataacactaaactagttaatatatattatgtgatacaaagagtagagaatgtgaagatataaatatatgtattaagttttattattattatatatatata

SEQ ID NO: 147603 - DNA, 617 bp, Cannabis sativa
  modified_base (306)..(307): a, c, t, g, unknown or other
attttttttggttatttagaatttgtacccctcgaactttgacatgtgccaaattatgtcccttgaacttttaaggtcgttaaaaatgccccctgaactaatgagaattgttgaattaaaagacttttgtctaattttaataaaaaaaatctaacatggataaaaattcagggggcgtgatttagtatatgtcaaagtttgagaggcatgatttggtagatattaaagtctggagagcataatttagtacataaacaatcactgaaataataaaattgaatgaaattaaacaaaagtccttaaatnnaacaatctcaatagttcaggggaatttttaacggccaaaaaaattcaaagggcaagatttaatacattttaaaatttaaaaggtaaaagtcctaattagccattttttttttattaataactctttttttttttttttttctaataacttactatagtattagtttggatttaatggtaattaaaaaaaataaagatatttttgtaatttattataaaaagggatattggcggctaaaccccccaaacttttgggtttgtgacagttaaccaccaaaactcaaattttggcggctaaactacctgaactc

SEQ ID NO: 147604 - DNA, 628 bp, Cannabis sativa
tatttatatgctcatatatacatagatatatatcacattaaaaagaaaaaaaataatgtgatattgtatgaaaagaaaataatatatatatatatatatgatgaaaataaaatagtgtgtatatataaacaccactatatatttatatatatatttatataaaaggtatatgtatgtatattacgtacttattaattattaaaaaaaaaacaaattttaactaaatggaggaactcatgtaatgcttgactatatgggcatataataatatatatatatatatatgctaagtattttaaaacaaatttaagaaagtactttacagatgaacatatcaagaaaaaaatggtgaatataattttgtacaaaatcatatatattatgtaaaagagaggagatcatatatataggatatgtgtgtgattcataatcatgtgccactaatctatattcaaaaccccctacggctgaattcgtttatatatataaatacatttatttagatgcatataaaaaatatagcattcagaccgaatgactttatgaaattacgtcgatacttccacatattacgggtaacgtaggagacatctctatttttcctcggggaatcctcagaattaccact

SEQ ID NO: 147605 - DNA, 823 bp, Cannabis sativa
tcgatccctttcacagtgaagctagatcactatttatagggccttaatgcatgagggaaggttttcattttgcttacaatgtctataataggaagcaacattcattatataaatagaatacccaaaatcccaaaataggggattgggggattgggggattgggacagcctgacagcctgcagcctgccgtatccctctaattcaatcccatgattgtagggattgtcttcgtgcctggactccatgatatcattctaaagtagtcaagtcctcgtaaatagctcagaaaaacaactttgctctctgctcgagtagtctaccctttaccctgctaaggtaagtagacgttgtgcatgcagatgtgctacttgaactctgttcgggatattcatccccaccaaggtgcaaggaatgttggacatatgtcactcgtatgtgttgccacgtcatagtgcaagaaatgggataacaagtagaaattcaaatttctctttattattcgtcatcagataaaaatttaatgatttaataattttaaattaatatatagttaaatttgtttagtaactatcaataggtaatactcattgttagagagtctcacattgttaatgtgtggaaaagtaaaagaatatataagatgaatgggtttctcctcccattgccaattggttttgagatggaacctcattcatctatcccaaattctaacatgttatccaagagctaaagtcaaaaaagccacttgtgatttgggaatagtaagccaaaaattaaaaagagccaccaaaaatactacttgtttccattttcaatataactt

SEQ ID NO: 147606 - DNA, 648 bp, Cannabis sativa
  modified_base (535)..(545): a, c, t, g, unknown or other
atgaaattaattcaggataaactatatgtatttttctgcatttaattaaataaagaagttatacctaattagattcttctagatacttaattgtttgaatattcatagaaaatatatttaggttgaaaattaatttttaaattgattttggatcaacttaaattagaatattttgaaattaataattaagtagatttttctaggaaattagttattaagatattctttaaaattatttttaagttaaaaatttgttaaatttagatcaacttaaatagggatattttttttcaaattaaggtgattagttcaagatacttaatttgttatttaatgaaattttgaaaaattatttaagttgagaatttagttattttagaacaacttaaattagattttttttttcaggaatttattttattatattttatataatttccaaattatatatattttatgtatgtataaatttttaaaatttatattgaaaattaaattaaagttgaaaactaattttaattaattttagaccaannnnnnnnnnntaattttcattattaaaatatatacactaaaataaatgattacttaaatatacattattttaaataatgagctttaatcaaagagacattcgatctccattgt

SEQ ID NO: 147607 - DNA, 518 bp, Cannabis sativa
  modified_base (237)..(238): a, c, t, g, unknown or other
  modified_base (354)..(359): a, c, t, g, unknown or other
  modified_base (489)..(493): a, c, t, g, unknown or other
attcttagtttctaattcaaaaaaattagatttaaaaaaaaaataaaaaatacacatttatattttcagttaaaaaatactatagtctaaattaattttaaaaactctaatataaaaaaatataattgaataaacatgaaataattgaataaaaaaataaaaaaagtaataatattatatagattcttcaacttcaatatccaaacttcaaatacaaaatagtttgactaataaatnnaatttatgtaatatattatataaactttttttaaaaaaaatatattaattggtttattcgggttaattgagcgattagaataatttgtgtaaagactgcttagtttaatttggaannnnnnagttaattatgtttaattatggagaattatttatagacatttaaataattatttatactgctattattgaattctgaaatgcctttatgtcatttagtgatttttttaatttttgcatttccggtgcccnnnnncatggaactcggtgtttggctcagt

SEQ ID NO: 147608 - DNA, 751 bp, Cannabis sativa
tcaaaattacaaataggactctgatcgaatggattttttgttaaaaaaactttaataataatccgatctggagatgttatgacaaaccttattatatttttttgcatctgttcgtattaaaaattgtcttaaagttggttatatcaaaaagtaatgttgttgaaaattaagtatagggtcctatttttactattttagaaaatataaggtccattatgtcatttaacaaaacagaggatctaattgataatttttgtaaaacacggggtctaaaatagtatttgccttaaattttaaaaaaaaaattataaattttatgagtttttataacatttgtgaaaaaatatgaatctttttcaaaaaattattttataggaaaaattaaaaaatatgaaaaagttaagtaatatttttgttttatatatttgtgaaataatccctaatagaaaatgtcaattggattgggcctacttattaaccaaataaataaataaataattgtccttttttgggagtttttatgtatgagtcaaatttttgggtcttgtgttcattgagccttaggcacgggcttagctggctttagcctagggttaggtttctgtatgtgtgttgccttctacattattcatatgtactttatcaggtttatatgtataagtcttaactatcaagtcttattcctatgataaaattttagaaattaagtaaatgttatattcgatgtgattaaattaatccatcaaattgg

SEQ ID NO: 147609 - DNA, 516 bp, Cannabis sativa
atttgttacttaagagactttataaagtctaattaataaatatattaaatggacatttttatttgataattaattttaataattaaataaataattttgacatttaagtggctgactcggaaaatatagtatttgtgaaagaataggataaataattgagtaaaatagcaaaattgtaattggtgggccaacatcctaatggacggccacttaagctcaatttagccatttatttatcaatttttaatgccaaataatttaaacctaaacctaaaaagattcctataaatagatagtgatggactcaaagctaagagcttagaatcattagtctttcagtcaaatttgagtcttctctttctttctctaatttttgattccttctccctattttcttcttcaaattttgtccctctttatgatttagtacatgcccacacatagcaagtaagtactcaatcatagtgtgtaagacattgaagaatccaacacttgaaggagaattgggctcagatc

SEQ ID NO: 147610 - DNA, 545 bp, Cannabis sativa
gatctagtgtaattgataatgttcaagatattgtctcaagttttctgcaggattaccaggatgctcaaattcattcctctgtttccagcatgactaataatcattcacctgctgttctggatcatattttgcttccatcaaccactgctctttttgttgatgctgccctgagtactaatggtccagccacaggtattgggatggtttttatgcaaggtctgtctcacattcaacagtctgcaaggattttcaaaccaggggcttcctctccaatttttgctgaagcccaagctctttgtgaaggactccaatggtgtttgtcttccaatttgacaccaagatttattttttctgattgtattaaccttgtctctaaggtgaatggtaattggcatgactactccccactatctactcttgttcatcagatcagaaccttcctctccagtttccctgaagctaccttgctgcatgtctcctgccagcacaacggcaaagcacactcccttgcgaagttagccctcaggttgagagatgaagactag

SEQ ID NO: 147611 - DNA, 620 bp, Cannabis sativa
gtctgggtttgggatcgggtcccaggtttaggtcctggtctgggttcgggtccaggtctcggtcccgttctggtacacgaatgtgtttgggcccgacttttggtctcggtttaggtcttgggataggtatgagtttggttctaggtttgggtccgggtcctggtcttgcagttctttttcagtttctagtttcgggtcccgaatatttgtcagggtctgggtttgggtcctgcttcttgtttcggatcctgtttcaagtcacagggtacgagttcgggtcgagtttgggtctgagtctgggttcgagtcttgatttgggttcgaggggaggttcaggtccgtatttcggtctcggttagggtatgaggttgggtacggttttcggttctgatctgggtcgaagccccggtccctttcaaagatcccagtacggttccagttcaagtttaagttttggttcccgaatgtgggtctaggtctgggtatttgtccgggtcttagtttgagttcgagtatgggtgaggattctgttctaattcccagatccaaacactgactacgggtcaggtccaagcatcgagtcccggatcccaagtcccgaggtgggtcctaggtcatga

SEQ ID NO: 147612 - DNA, 523 bp, Cannabis sativa
tcctccatgagatgcactttaaatgccttcaattgagcatcgaagaatcgatcaatacgacgatccaactccatcaacatcttcgcaagctctgttttcttcatggccgagagttcttacaatgaatctttcactgtaattgctctcaatgaaagcaccaattgttagataatagtcctcttcgagacaggacaaatctctgaaatgcactcttcgagacagtgccaatctcccaaatgaactaaagttctatttactcatttcatatcccataatagctacacaataacatatttatagtgattcacactttgtagaaattactactaagcccctacactattttatagtgtaacactttctcacccttcaaaatcaccttgtcctcaaggtggtagaaataaaaaaaatacaactaaaaacaagtacaaatataaaaaactgaaaaactaattgcagcccaatcttttttttttttttttttttaaaaaaaaaagcccaattgtttgttggcccattaagc

SEQ ID NO: 147613 - DNA, 631 bp, Cannabis sativa
  modified_base (253)..(254): a, c, t, g, unknown or other
gagcgttcttttccctggggattctttctactttataatccctgaactcgtggagcagttcccggactatcattacatatgcagccattctttcttcgcgcgtctgatactctcctgatatctggttcacggccagttgggagtcgctgtagacctctactcttttgtcccccacagcctttgctagtctcagccccgctatcaaggcttcatactctgcttcgttgttcgaagctgagaagtcgaaccgtanngctgcctggagtcgaagtccgctcggggatatcattgcaacccctgctccggatccatttttgttaggctctgtccacaaatactttccatgttgggtccgatggtaccggcgcgtttgcggttgcctcagcttcattacattcggtgatgaagtctgccaacgcctgtccctttatggagattcggggtatgtagtgtaagtcgaattgacttaactccatcgcccatttgaggagccttgcggacgcttctggcttttgcaggactttccggagtggtgattggtcaacaccttgattgggtgagcttggaaatagggcctcaactttcttgaggccattaggaggcaaaaaactagtttttcgatgatggggta

SEQ ID NO: 147614 - DNA, 500 bp, Cannabis sativa
taagtttggggtgagtgcggtgagtgtaacttgtggcgagctaattcaagattatacttttagccacattggggacaatgttgggttgtaagtttgggatgggggaatcagctaatacaaggtatattagtaggcatttttaattaactttctcttgctatatataagtataatatagtaataaattcttttctaacatataaaaaaaaatcagcaaagaaaagaaaaacaaaatatatatatatatatacttgcaactaagtttggggtgttccacccattttagtttaaaaaaaaaggagaataaacatagcaagagaagtcaattttaatatcaagtacttgtgagtattgaattagggaagtgggtcaaaagaaaaaaaaaatcatggaagaggctcgattttgggcaagtgaagtggttaggtgttgagctagcttaaatacatcctttaccataccttaacccaagcctaacattacaagcctagtaaagtcct

SEQ ID NO: 147615 - DNA, 1051 bp, Cannabis sativa
  modified_base (985)..(999): a, c, t, g, unknown or other
gataagccttatctcatgaggatgcctctctatgaatggagctgagttaactttgatggcgaactagtgctcatcatatgacttctcgagattaatattactttaattctgataactacattttctggtatcgagatgatctttctcgcatgcataccatcatatagcgagatagacgtctcgctgtctgtcatcttgattcaccaaattgtatatacttagtttgtataccatgtaatatacgctaagtatttttatcgttatcgtttctcttccacgcgacgaggttgaagcctcgtcatgcacacttgcactcacatggtttctcgtcgatacataagttagcagttcgtacgtttctgtctcgcagaagactgttcagccaaccgagttataaacatactctgcaaattgtgtttctaacgagctgttccatgccaagtatacttacgattgcgtgtttgagttcttcgttcttcccagctagacacgtgtcttcctctgatatgctcactgaattttgggtataacaataataatatttattaaagaagattttttttttttttaaaaaaataaaatgatattaataattgaaatttttattttaaattattattatttttttataaagttaattttgaattatttttatattggtatttgttttcaaaaaataattgcttctcttatttttttttaaaaaaaaaaactttttatctaccttaaaagcatatgaaagcaaactatagttgttgtatgcttgagtattaattaattaagtgagttagacattatttttcttgcaaaaaaaaaaaatgagtttagaagaagtaattggtacggtaccaattaaaaagcgtctaaaattatttaagtgatcctacattagaagaacttttgaaaataaatacctatattaaaacaatttaaattaactttcgaaaaaaataataataattaaaaataaaaattaataaaattnnnnnnnnnnnnnnntattttattttttttaaataaatatatcatgaaatattattataatatgtat

SEQ ID NO: 147616 - DNA, 718 bp, Cannabis sativa
  modified_base (680)..(681): a, c, t, g, unknown or other
atttaataaataaaaaaataaaagaaataattatttgaataaaaaattattttttttaaaagagttgactgaattgaccgaatcaacccgccaattcggttaacccgaccaactgaaacctgccaacctgtgacccgccaacccgtgccctatccgagtctgggttcggtttcatttttttgaactcgaaacccgtgaacccaaaacccgcaaactcgaaactcggtaaacccgcccgatgttcagccctaaccgattttaccacggggctaaaggtctcttcatagtcaatgccaggcgtttgtagataaccttttaccactaatttggatttataagtgttcagagaaccatcagcattaagtttaatccgatacacccatttattatcaataacatgcatgtgtggctgatatgggacaagtgtccaagttttttctttaaccaaggcagtattttctttttgcattgactgaaatcactttggatccttgagagcttgctgaacagaccttagttcagtaggaaagagagatttagcaagtggatgtcttgttgatagataggccttaggtttataaatcccactttgagaccttgttttcattttgtgaattctcgaaataatacttgagtcatgtgttgtgggaataggggttggaatatattttaccaggatnnagatttactaataagtatgtttttaacatcctaaaca

SEQ ID NO: 147617 - DNA, 601 bp, Cannabis sativa
gtggagagacaataattgcgacagagtaaaaggacagaagatttaactccgtgtctatgtgcactcgcagagatttaatacattttgtaatccattacattgtattaagtaatagtccaaaaatcattgtaatggtcatcattacaaaatcaatataatattataataaaaatataataaaagaaattaaaaagtctattttaccttttatttaataattttataattataaaaaataaaaataatagaaatatttcagtcaatatatattttattctattacattcacataccaaactaaacagaataattttaattacaatactcattccaacaacaaatcaaacattgtaattaattactattaggattcctattccattatattactattactattaccattacatttctattacaccaaagcaaacatcaccttagagcatctccaattatacatcatctaaaaatataatattttattttatttttcttccatatcatttttgactcacttacttttaaaaatactctaatgtatagcactctttaaaaatactataattatgatctcacaatttttagctacaataatttttta

SEQ ID NO: 147618 - DNA, 527 bp, Cannabis sativa
tagtaacctattagaatcaattgagatatctaattttgttgattttttttttttttttttttttgaaagcactaattttgttgattttaaaatttagttaattaaatgaagaaagaaaaaatactgaaaaagacatttttttttttttattaatcttattagtaatggtgtactgatatggcgaatatatatatattctgaaaatgattactttaaaatatagattaaagtaaatagagactcacaataaaatatgctaaaaaaaagagtcaaatagttaaaaaaaaataaaataaaataaaagaagattaagagagtagagagtctcggtacacgcattctaaaataataaaaacaaatggttatgatatattaaaatattagagcgtattcatgtaaatttatttaaaaatatgtatctacagttaattttttttttagtttattttgcatttatattttaggatttttttcaatttgaaaaatttacaccaaacactaactttttttttttcaaacattatatt

SEQ ID NO: 147619 - DNA, 531 bp, Cannabis sativa
gtggcaagatgccaacaccaagctgatgtgtcaacgcttctaatcatgccccattccatattgtccgaacattctccctcatcgcccaaggacttccctatgttcatggacccatcctcaaggcaccatgcctgcacgcatgctggcaggccctcgagacaagccaccaaactagtagcatacgttagacctctgtctctttccagcatgatgcatccgtcccattcgcgtatgtaaactagcccacgaatgactactcgtgtcatctcgtgttagtactcatgcccaaggcgcaccacaacgtctttttgagatttaggccatgtcctgtgcaagcagcatatcaacaagccaatataaaagtacctgctaacctttggcaacattcttagacgcactactgggtcgcctcgatagtgtccatgagtattcaaactcgtggagacatatgagtcccctcgtggtcctcatatgcctgtcctactagtcctactgaccagtagtagctcacttagtaccaaggtgtcaggg

SEQ ID NO: 147620 - DNA, 508 bp, Cannabis sativa
aaattatttcacaaaaaaattaacttcaggatatttttattttaacaagatttactatttcatagatagttatatcataaaactaaataaagattatttacaacaaaagtacttaaaatattaggtttgtagtacttaagtacatacccaaattattattttaacagtaaaagtatttaaattataatgcttataatatttgtactaattaaattatttgattagcatcatagatattcaaattcatatgtttatagattttaagtaactaaattatttttaaattatttcattaataactataaaaaaattacaaaaatacggatttacagtatttttaatatttttaaggactaatttacttatttttttatataaatatgaacaattattttatggtttttttgtagcagcaattattttgtggttgttctcacgttgttgctacaatatactatgtttctgcaacttgaatataatgttattttttgaaaaaaaaaaagaaaaa

SEQ ID NO: 147621 - DNA, 615 bp, Cannabis sativa
tttttttttactttttcttttaatgacatgagattaacatatctcttttatttcattctagtgtattttttatttttaatgtgtatgttattaatagtttatcatttagtagtatttttggctatagttttggttggtatactaattagtttttgttgtattagttttttattaagtagattttttctaggtttgtgcttgatcaatgtaatactgttgtattacttttgatttttatgttaactattacagaataaagtttacttgttagtttctttttaataatgttctgagtgaatatttgcttggggatatatctatgattaggtgtttttgattcgattaagcacttatatatgctattttctgagttttgtgccttaatgctcattttcttgaccaccataaaaactatgttggatttaatttaataaagaaataaacaaaagagattctattttgatagaatattcatcaacatagaatctctttattggaaataaagaaacattcatcattcttttttatctagctttatattaaaataaagaaactgttttattgtttttaatattatgaaagtaataccgatgcattactttttatttttaagtt

SEQ ID NO: 147622 - DNA, 540 bp, Cannabis sativa
gaaacttttcttattctttttcagtgtatttgcacattcagattgaatatgtccaaaaccttcacattctctacattgaattctgttttgattgttagtcatgaaagattttgaaaaagtattacctttggagaatttcagaaaattctttttgtcacttatctttttcatgtatttctgaaagtttttaggtaaaacatccatctcatcatcttcttcatcatctgaaatttcttttttagcaacattaaaagcaatacctttacctctatcaacaatggacctaggtttgtccttctgcttgatttgttgattcaattcaaaagtacgcaaagaacccattaactcttccaccttcatcttgctaaaatcttttccttcctccatagccaagagtttagtgtcaaacctatttggaagaactctaacaatttttttaacaagaacatattcattaagcttttcaccaagagcaaaatattcattagctatatcaaatagcctttcataaaattcagttagggtttcattttcagacat

SEQ ID NO: 147623 - DNA, 510 bp, Cannabis sativa
ttttattttcattccgtttattacaaaagtttaaattatgcgctattttgattagtaatcccatttaggggattaggatttcgtaagtaacttgggtagcggtcctaattatttagagcgttacacactgtaatttcaagtaggattcaatgcatttatagggtttgcaataaaaaattctagaaataccaaacgtattcattgttcatgtgtagattattgtaatttatcaaaaagaaatattacgatgattaaggattatgcgtatttaagagatttcaatagaagttatactactttgtattagcatggcgaacgttgaactgatgatctatatctattagagaagcggacggtagatgatattgcgggtaataatttcgatgattatccaatggacttgcttgacgaagcagaggaatttcttaatgatcctgaaaaatttgataattttctaagtgatgcagataatgttaggttttgtgtcctaaataaaactcgtttcaatat

SEQ ID NO: 147624 - DNA, 1755 bp, Cannabis sativa
ctctctctctctctctcttgttcgaaccctgaaagaatagcagctgttggggatttttctttgctgcaatgagtgatttaaacaaggttttagtgattcaattcaaggtaaagctcttaggcttctcattttatgttttcttaagctctaagttatggttttatgcatgaatttgagtattagggttctgtgttgtgggttagtgtttgagtttcttttctggagttaaattaaggttatccatgctgttttgaagtggatttaggggttgttgtgatgtttgagcaagtgttgagtttaagaactcaagctttgctctttaatggtagattttaattctgatcttgtttagtttatttgttgcttggaatatgttatttggggtatattaagcaggtctggaaggtttggtatggtttggatacgaattgggcgagatttcaaaattttttgggttacctggtgtaaaccggttaaccggattagaaactggtttcctaaacttttcgtgttgtcgattcgtgttagtttcaaagctttggttggttgattacttgattatttagggtattgcaatgttgtttatcaataggggaaacatttgtttaagtccctgaagagtgatttagcgagtcactcactagtgttacgaataatgtgatttaggggcctataattcgtcgagtagttcttccactcaggttggccggcacacctaaattcagaaatgaggtaagattagtataatggttgcatatgtttacacatgtttagcgtacatgttagttgtcatcaaaataggcaaatttatagccatcagattagtatatcaaggtgtcggtgaggtgtacatagagttgcaccgagatgccaatagatatatgctaggctatcagatagtatgagttatctgctaccacatcagtatgactagagtactgagtatacactacattcgtagttagtcatactttgtcaagaacgttcctaactcagttagggttatgattgggtgtatgggcgcctgattataatccgggtaattgctatgttattatttatatttttcttactgagtttgtcgactcacagatattgttgcatgtgtaggtaagggcaaggctaaggttgagcagttgttagagcgagcagatagagattgtacatgtcggggcggttaggcttggagcgtacggtctttgggacatcagggcttcttttgtatagttgctaggcaataaacttttgtatacgcaaggtgaaacttttgtaaatacttttgtaaacgggatcccagtttaatataagtatattattttagtgtttttaattaattaagtaaaattttaattaatcacgattttcaataaactaattgattagcaacgagctgcacagttagttaaaaatcacgtgaagatgcctaaactagtagggcgttacaattttgtatcagagccgccaggttgtcttctgaagatcttcacgatatgtacaatcatcatcagcgatcagctcctctcacagttcagtaagcatgttagtagcctgatagctgaataaacgcgtgttttttgaatttccaaataagcggtaattagtaagttattcttgatcgcaatcttaccagactagctcttggttacgcgggtggttctagtagtatggacgctaggcgaaacaccaggaatcagggtaacttggtcatatccagtggcggtcaggatgttcatgttggggtttgtgccctaaata

SEQ ID NO: 147625 - DNA, 818 bp, Cannabis sativa
gtaaaatgtgcataactttcacatacaaactccaaatgagttgattcaagatgcgttggaaagaagaaaaagaaatttaaaacttctatgtttagacattttccaaaatctgatcaaaacatagtcaaatttaagcttgaagtttcaactttatttttttgcagaattttctctattctatagattgttgttttccgaaatttgatcaatttatacattccaagtgtgaaacctgaatctaaagaaaacaagcataattctattccaaaaataataacaaagaaggaaaaaaactataaaaagtgacccaaaacgtaggctaaaaatagcctaacaatgatcccttttctgcctctagaatattagtgagcctgaaacatcgtgcattcaaaacttgagccagtattgatgaggggttcattaagatcctccatgcctgttttgccaaaagagcttgattatactgactaaaatgtctaaagcctaaacctccatcactctttggtttacaaatcttatgccaagctctccaatgaattttatgtttgttgtcaactgatccctaccaatatcttgctattagtttttctatctcttcaccgataccctctggaattttaaaacaggacatttggtaggtgggcattgcttgaataacagctttgaccagcacttccttacccctttgtggaaaaagctttgcctgatactcatgaagttttgcccatattttatcctttattggtctgaaaatctcagttttgttctttccacctatcattggtaaacccaattatttttcaatggcctccgttgtc

SEQ ID NO: 147626 - DNA, 558 bp, Cannabis sativa
agcattctatgtaattaagagtgtaattttgaatctataatggagttaggaaaaattaatgagatagagaatttaattggtaaattctagaactatttattaggagcttagttatatacgcttatggtccttacactaactagggtaatattgttttgaagtctcaattaattaatttatttaattaattaggaatttaaattaaggttatgtcttatttgtgaattttactaagaaacgacataattgagaagaaaaaagaatttgaagtttatttattaattaagagattttagaatgtctaactaataaatatatttaaatggtaattttattttataattaattctaattattaaatatatataattaatatttaaataactagagtagaaaaaatagtattactgaagaaagataagtttgtttcattaaggaagtaaaataatggcagaaattttcattaaggaagcaaaataatgacaaaaatctaatttataggccttcataggggttcagattagggttgaacattttgagcgggtttgacccgaaccc

SEQ ID NO: 147627 - DNA, 717 bp, Cannabis sativa
tccaaggatggttccttctcggttaaagtggcctaccaagctatcattagggggagaagtggtttggaggatgagctatggaagcttatttggaggagtaaagtctatgaaagagccaagtgtttcttgtggaaaattgcccgtgacatcctcccttttgggagtagactgcaccagatttttggtaacacctccacttgcatcctttgtcttgcggaggaggactctcccatacatttgttcttcagatgtgatgttgctaagcaaatttggcgttctggcccgtggggaatttgctctgaggccttggtttttcaggataataaggcgatggtgcgctggctcttaactccttcaaatttgcctttggctaatgcaggagagaggtcgaggtttaccctgtatgctataatggtgtgttttcatctttggaagtatagaaatatggttttccatgatggaattaagtggccaatccctaagcttcagcaagccatccttgcggatgctaactcccttgcggagttggaggctgcggaggagttacagccacataccccaagtgtggcggacatggctttgggacttaacactaggcagtatccgtggagcaactttaatatttttgtggatgctgcggttcgaggccgatcggggattgtggccttgattgtgtttaatttgacgggccaggtggtggaggctgcgaccgtgaga

SEQ ID NO: 147628 - DNA, 1092 bp, Cannabis sativa
tgccaggatgtaaggagtatggagtggtatgagcctctataagaatctcgtttctaagtttcatactatttggaacacaaactctggtcttaaacaacagcatcccactatcatacactgtaaaatctctagtttggccagctaaaacctcttccctgatcttcactaattttggatctgttagctgagcagctttaattcgttctaacagattagattgtagcatcaagttatgaagtttgcctacaacaaacttgatgctcgatttgaccatgtcttttgccaactgaggtgaaatctgaatcatcctgtttcctacctggaacccttcctgctcagggcatcagccactacattagccttcccaagatggtagaggatttcacaatcataatccttaaccaactctaaccaatacctctatctcatattcaaatatttctaagtaaagaaatatttgagccttttttggtcagtataaatttcacatttctctccgtagagataatgacgccaaatctttaaagcaaacactaccgtgacaagttttaaatcatgagtcgggtattgctgtgcatattctttcaactaacgagaggcataagcgatgacccgatcagcctgcatcaaaacccacactagaccctgtctggatgcatcacagtaaactacaaacttttctttataagaaggtagggctaacgctggagctgtgattaatctctgtttaagctcctgaaagcttgcttgacacttgtccgtccacacaaaccgctgattctttttagtaagcttggttaaggtgttgaaatcttaggaaatcccactataaaccgacggtaataactagtcagacacaagaaacttctaacctctgtaattgtttttggtatcggccaatccctgacagtgtgtccaagaaaagacacttgcgatagccaaaactcacacttcttgaacttggcatacaacttatgttctcgaagttgctgtaaagccatctgaagatgttgctcatgctcctcttctgactgagattacacaaggatgtcatcgataaatataataacacaaatatcaaggaaatccttg

SEQ ID NO: 147629 - DNA, 730 bp, Cannabis sativa
cgaaaaaaaaaattacatatgttaattaattgctttatgttttaatttatttaagggccctttttttaattatatatttaagatgcaaaaaaaatattaaatgaaaaaaatagtaatgtattttaaaaaaaaaaatatacattttttaaattttgaaatacaataaatttaataagtccttaaagaaaactaaaattgggaagcaattgtcaattggagtaggtaattctataaaataacataaaggttgtttcggttcatcctatttaaaaaaaaaaaaataataaaaaaggtaaattttataatttgtggcttaaatatttaaatttaatttttagttgtacataaatatttaaatttaattttttaaggtaataatatttaaatttaattatatttaaataaattttaaacaaaaaataaaaatttattaacttggatccatcaaaagatcatgtggtcattaaccatcaaatactttctaaaaatgttacttaaatattattactataaaaaattaaaatttaagcattaatttttaacaagaattaaactaaaatatttatgttataaattattctaatttttttttaataatgccataaaaaatgtataattaataaagaggttttttcatttgagatttttataaaaatattgaatttttagtaaaagtttacaattttactgtcacacggaaacttttacaaaaatactgtatttttataaa

SEQ ID NO: 147630 - DNA, 614 bp, Cannabis sativa
aatttaaattaaaaaaaaattatataaaacatctatataatttttattttaaatatatataataatattataaaattaataacgaatattacgttaagtaattctattaaaattaacataggaaatcaaaaataccattaaactaaaaattctgttacatagccacattttatatagaatagatagatatatattttacaaaaaaaacgttatgcatgatattatttttcaaaaatttttttgcatgattatggcagttgaggatgtaaaatcatgattataacggtaggggagaaatgtaatccacaaggtcagtgcaataatgaatgttaaataataaaaattaatattagtaagtcaagcatattgtttgacatattattagtaagtttcactccatttatatatcgatcgaaaaataaaattaaataatataaacacactaattatgatcagattactaatataaaatatttacaatcaaaattttcttatataaaatatttacaatattctaactattttaaatttgaattaaaattttcttatgtaaaatatctatataatttttatttttaaatatatattataatattataaaattaataaatatt

SEQ ID NO: 147631 - DNA, 536 bp, Cannabis sativa
  modified_base (105)..(111): a, c, t, g, unknown or other
aaaaaaaaaaaaaaaaggcaaaagaaggccaatgctacagaagtcgcgactagggaattcccagtcgcgactaagccttcttcagtaaaaaaaaaataaaaaaannnnnnnaaataaaaaaaaaataaataaatctcagaagtcgcgactgggccattgcccgtcgcgacggggaaggctgaacgaaaatttgcaatttttctgtcaactcccgtcgcgacggggcacattgcccgtcgcgacggggaacgatttttcagctttttaaatcccaaatctcacataaccctaaaattcaatcaaacaccaaacccacccgagtttttccccttttctcactctaaaaacctcattccaccattaaacctcaaatttcttctccttctagtcaaatcttccatccaaatcaccaaaaacacaattttatctcatcaatcttctcttttcttcaaaaatcacaccacaaattccactttttcacccaaatccgaatttttcactattcatcatcttcaaccttgagttctccatggatg

SEQ ID NO: 147632 - DNA, 546 bp, Cannabis sativa
tgatgacgtgtcacgtcattatgtgtttgatatatatttaacgttatttttgtaaaaagtttcctaatatagtatattcctaaaaaagtccctttttttttcttacacttttatagtgtacataaaaataacaccaaaataacaaaaaaactacataaaacaataagaaaacatacaaataacaaaaaattaacaactaaataacaaaagtacaacataagaaaaatatcaaaagaagtattttatataaataaaatctttaaaattgtaagaatatttaaaatttcatacaactgtatatttataaatttttttgttgtttttttctatttttttttttataattacataaggcactatttttttaaaaaattacatttttatgtttaaagaattttttttatatttttacgggtttccgtaaaaataataggaaaacaacaagaaaattacaaaaacgtaacatgaaaataacatataaataatatcaaaacaataacaaaaaataacatacaaataacttaaaatcaacaacaaaataataag

SEQ ID NO: 147633 - DNA, 796 bp, Cannabis sativa
aaaaaaaacgaggaaaagagataatgaaactaaccagaagagagggcggcgcctgattttgaattaagatttgggtagaaattgatgaaaagggctcgtcagtcgtcacttctgctggttcgaccttaaaattgctaacttttttttatataaattactgtaaaaatatgttttagattttataccattaaatattttatttttatgtttagaagtaaatatactcaatgttataattctcttatctattactatcacttttatgtacacataaaaggtccagatgctaaatgttacatatttcaagaaaaaaatgagagaaatgctataccaaattactatagctgagtgaaccactgcagtatatgaaatatgattatcgaactaaaatgtcaatactatgtgaaaattgttatgagaactattttttttttgtgtgtgaaaaaagtagtatttagtttctaatattaagaatattaaattttaaaataaaaaaataaatgtaatacatctagaccctccacgtgtctatatttacgagttaacggaagtggtagtgacagatgtaagacaattgtaacattgggtatttttgcatctaaaaataaagataaggtatttaagtatataaaatctaaaacattaagtatttataccgcaatttaccttttttatttatagaattctatttgcacccgtaaaataataagtacattttattattaaaaaaatataaactaaaataattttaaaaaattattcttataatttaaagaaagaaaatagagaagagatg

SEQ ID NO: 147634 - DNA, 960 bp, Cannabis sativa
gatgaagagatggaatctcttaagaaaaataaaacctggattctggtgcctaaacctaaagataaaagtattgttgattgcaaatggctatttaaggaaaaagagggcataactaaggaagaacctataaggtataaggccagattagtggccaaaggctttacacagaaagagggggttgattttaatgaagtatttgcaccagttgcaaaatacaaaacaatcagaattatgctaagtctagctacacaatttaacatggaagtagaccagatggatgttactacagcttttctacatggggaacttgaagaggagatctacatgagacaacgtaaaggatataaaaaaaaaagggggaaagaaaactaaacgtaaagggtatacaaaaaaggggaaagaaaactatgtttgcaagctagtaaagtctctctatggattgaaacagtcacctagacaatggaataaaaggtttgatggttttatgctaaaaccgggttattctaggaactactatgatcactgtttatactatacgggaactgatataaataaactcatatatctacttctatatgtagatgatatgcttataatcagtaaagaaagagcaagagtaaacaccatgaagggtttactcaaaactgagttttaaatgaaggacctaggggaagccactaagatattagggattacaattaagagaaatagagctgagggtactctcagtctaactcaggaagattacatacacaagataattgagaaacaatgaaaggctctaaaattgctagtcaacctatagctactcaatacacattgtcaaagaaacaatgtcaagagagcaaggctgaaaaggaggaaatgagcaagataccctatgctaatgccattggatctgttatgtacgtaatggtaagcacaagacctgaccttgcttatgccattagtgtacttagc

SEQ ID NO: 147635 - DNA, 607 bp, Cannabis sativa
gaagctaagaagatactaggcattgatatacaaagacaaagaccaaatactatcactctatctcagaaagaatacctaaaaaaggtgattgagaagtatggaatgagtgattctaaacgtgtgcagacaccactagccccacatttcaaactgaccaaagaacagtctcccacaactgatgaagaaagagcattcatggacaacattccctatgctaatggggttggtagtctaatgtatcccatggtgtgtactaggcttgacttggcctattctctaagtgtagtcagcagattcattgctgatcctggacaagaacattggtcagctttgaaatggattctaaggtatgtcaagggctcacttgacataggacttacttttggaaataagtctaattcacaagaagaattgactgggttttgtggattcagactatgctagtagcattgacaccagaaagtctctcacaggctatgctttcacagttttaggaggctgtgtaagctgaaaatccaaccttcaaaaggttgtggctctctcatctactgaagctgagtatatggcagcaactgaggctgtcaaagaagccatttggctaaaagga

SEQ ID NO: 147636 - DNA, 651 bp, Cannabis sativa
caagtatttgaaaggcaagctctgcttttgaaaacctgaggcatctagaaccctttgaacttctgcctctgacatgttgctgcagtataccgttgatttagaagggttaggaaccaaacttgaggtattggagaagagctttagtccctgcaacatgtaataaaaactcttgaagtcaccattgcaaaataataagacgtcattggcaaagcttagatggttcagttcaagacctccacatctctcatggaaaataaagtctgacttcttcccaatcttcctcatgattttggaaaggtattccattcccagaacaaataaaagtggtgacattggatctccctgcctcaatcctcgcgtagcttcgaaaaaatcatgtaatgatccatttatcatcaatgagcatcgaggagttctgacacaagtcattaccaggttgatgaatattggtgggaaatagaatccatagagcatctcttctatgaaatcccactaaatggtatcataggctttctgaaggtccaacttaatcatacaattcgctttatttttatgggaataaacttgaatatattttatttttctcaaaaaatgtaggtttgtttaagtaaacatgacattttttttggtttaatttatagtttttttttt

SEQ ID NO: 147637 - DNA, 577 bp, Cannabis sativa
catatcacaccatccattagacccctagctctcaataccaatcatagaaaatgacatctaaaatcgggtagtcgcacctaataaccactgtaataccgaggctccgattcaattcactccctatacagattttcgggtggatgtacaaccaaacccaatttttgggtggtcaggtccagcagatttcgggtcgggtatggtgggtttgctgtggtcgggttcggattaagacccgcattaatatttgaataaaaaatccatacagtgaacagtttaaatgcctcaagcactctaaacgaaaataaaataaaaagtttgactcttatttcactgtggatggaaagtacaaataaaaaaataaaaaataaaacaaacccacaaactcatttctcaagtaaagtgacttgaatagacatattgaataaaatataactatgtggagactatggcctactcttgtaggtgacagaggtatagactctcacactttttaattttataataaatataaaactgtctcttcaacttttgtagtacaaaaatttgtgcctaattttcaggtttcggattaacaccc

SEQ ID NO: 147638 - DNA, 717 bp, Cannabis sativa
aaatcttttatggctgatattagaataccaaaaccaatttacatcatttactaaaattagaaaattgaagaaaacaatcctctctctctttgctttaagtcggccaccaagaacccaagaagaaaaatcagattttctcttctaagtagatcatttcttgaggaactcagcaatcttgactctagtattttgctaaggtaaagtcctttttcttcttccttttggaatttaagtaggaaagtatagtggttttgcatgaatttaggtttttgaactctacagttgctcttgttgtttgatgttgtttctgaagttaaattatggttagaattgatgtttagagcttgtttggtggtggtttatgaggtttgttcaaggtttgagcttatgagctcaaactttgctctcacatggtggattttgattctgtgcatgttgagatgttttattgctttagatatgttctatgtggtctataaagcaggtctggaaggtttcaattgatttggggtcgttttggttgagttatgaaattttgaatctttcctgcactgaaccgaaattccggttcaaagggacctgtaggagctggaattccggttggtccccaggaaaccccgcaaaatcggaattccgattgggaatcggtctaccggttggggcagttttgggaaccctagtttttcccatttttgtgatgtttagggtattgccatg

SEQ ID NO: 147639 - DNA, 520 bp, Cannabis sativa
  modified_base (386)..(390): a, c, t, g, unknown or other
ttattgatttattaaattatgatgaatctctgtgatctgtgcgtttgtgttaaatttagggttgggtttggtcagatatgtgttttgggtagaaaaatgggtttttacgccaagtccgttgtgttgggattttataccataaataaaacccatttcaataaaatcttatttactatcaatagaagattaaaaattatttaggtttacatgtagtttccatgattataattataatatataaattctgttaaatctcgaacatatagttactcacaattacaacgatgtcatcaatgtaaaaagtaattgtgattatatgcttcacactatttagtcttattatttatcagtgcactggatttacactgacgtgataatcaacgatnnnnnttacttacacaatgatatgtgaaatgtcagttccagggtattaccaaagtatactagtatcagatgtattagctatacatcagactggaccgatgttgaaagtagaaaagatatcataaacttaatgtta

SEQ ID NO: 147640 - DNA, 630 bp, Cannabis sativa
agtgccaagttcagaagttgagatagtagaagatgattatgtttggttttaaaattttgttgctagacatagaaaaattaaggataaagaagctcacacttaaatttcgaaatgcattagtcaaatacttgtaagacgaatatgacaactcacaaaattagtatattataattaatcttttcaagtgtattttaggtttagtttgatttaatgtaatttctttcattatgaatgtaatattttttctctagtaatgtaatatttatgttattgtaatatattattttaacttatggagttttaccgattttacagtattattatctttaaattaattaataaatttatttaaattattatttagatataacaattgtggtaattttagtaaattaatataatattatttttataagtatttttttagtgttgtagttggaatagaaataattttggggtatattaaaaaatacctcttttatttatcaattaaccaaatttatttctaatttatatttaattgaaacatacatctttttatatgtactatactcaaaatatattgacataagggactcacatggagggtacattgaagtgacatgagtaaaattggtaaagtatttaaaa

SEQ ID NO: 147641 - DNA, 672 bp, Cannabis sativa
aagttgaatttgctaagtgctggcaatgttgcacgagtttgctcactgcttggctaagaggacttcgtctgagcaaatatatgtggtgtcctgtccggcatatttcttacgagcaggtacatagagttgattccacatgtcaccatcacatgatgccacgtcagagtgcaaaaattgggataacatttacaccacaagtctgtacgggacttctgaagttgcgtgtagacttcatccgagctgtctttctgtttggatgggtgacacgtgtcaggtgcatctgttcgctattcgatgtgaggctgactaggcgtctctttgatttttggctaataaatgctctgacacaattaatgcttcgaaatctgattttctctcaccacgtttgacagttacacttgattatgtttaatttccaatatttgctgcctataaatatgactgagcattgttcacaaactcatttttttcaacttctccattaagcaagttcagaccaaaaagagagatttttcgcttcgagttcaccgtgaatttttcacaagaaccatccgaacaacttcacttagactgaatacaaacgtcgatcagtgagtaagttttcgattccttctccttttattttgaacctttaatttctgaatgcgatcttaaccttgctgtagaagatag

SEQ ID NO: 147642 - DNA, 504 bp, Cannabis sativa
tcagaaacctgaaattgagtcaactaaaattaaaatctttcctattgatgacctttttgatttgatcattcctcctaggtataggagaatgttaattctaacctcttttctctaaaaatacatgggggaatatttttgtatggcggtgtggtgttttttttatagttgttataataatatttatgtgaattttttaaaaatttccaataatttaagaaatttgtgaactagcgtggtacttgtgttcaagaaatttgctgtgaatattatcaagtattcagaattttttaaaaaattataagaataattttataattacaatgaatactattatgaaaaaaaaaaatagaaaaaaataagataaataaatactattttggactctacattttgcaaaacttactaattgaaccatttgttttattaaatgataaaatgaaccttatcttttctaaaataataaaaataagatcctgaactcaatttttaaagatcggaagagcg

SEQ ID NO: 147643 - DNA, 553 bp, Cannabis sativa
aataggatgttgggatttactccaagtcctaatctccgaaatacagtgagattgcttgtgaaggaagagttgcaaaggggatgaagaaaggccctggggattgacccaggacgaattaagaaggttagtaaaggagggatctttgagccagtgattttcaaaatgaaaccgattggagcggagattagtgaaattggggtcctgaaacatgatcttcaaggccctatgatcagaaccataaaacctgaggtggaaaagagtagcatgaggaaacaaagccatccaaagctgattagaggtgcaccaatcaagacgctcaaggatcgaaccatgcctccatgtgaatttaggcccaacgtgaggaagaggaacatgattatatttgtcaagaaaagaaaggaaagaatgcatagcatgagagggaggggtaagagaagagttcctatcattgacggaaagataatcattgaaatcacccataactaaccacgacaaaagaggagcagtatcaaataagcgattaagtaaagtccaagtaacagatttgtgatta

SEQ ID NO: 147644 - DNA, 524 bp, Cannabis sativa
gataaagtatgtggagaatctcctctgcctgaaaattttataagaaaccaggagttgagtagaaaagaaaaggatgaagctttgaagatagcaaaagattttaaatctgaggacccctttttcattgttcccatgcaaccatcatttgttggatccaaatccaagtattctatggtaattaataagcttcttaattacaagtttatcttttcaaatatgtttctcatattgattttactcttgtattcatcttattgaagattataccgtctttctttgcgaaaaaatatctcttaagcatcagtagtggtcctcaagatgtgattcttaaggttcaggatggaaggacttggcctgttaagtacactttctatttcagaccgcataaaaaatcttcgacattcaggatcgagcgtggttggaaggcattcgttcaagacaacgacttgaaagtaggtgatgtttgtgcctttgttttgtcaaagaacattggaataatcttattcgaagtgattatttttcat

SEQ ID NO: 147645 - DNA, 1575 bp, Cannabis sativa
agagagagagagagagagaatttcctttttcttcaaaatttgaaatttttaataaaatggtgaaataaaacatagttttatatattaaaattagtttattaatcagaattaaatctcaattaaagtcgctaaaggacaaaaagttatttaggcaaaatgaccaatttgccctcctccaagccaaaaagtccaaaaatcacttaggattattttagtcaattctaaaatcttgactatttttgacattcccaatgtctatattgccccggtataataaaaatactaagatgtgattctaatggccaaacccaaacaccacgttccgacgttgacgttgctgggcacaaaacatgcaaaaatatgtaattccataaatgacatataaaatgcattttgaattcaaataaatctttgtaaaatgaaaactcataactaacatgcaaatttcataaataaaccctaattatcagctaatttccaaattaaggttaagcggtctttacaattattcccccttaaaatggttttattcccgaaatctaacctgaacaactctggatattcagccctcatgtcggattttaactcccaggtggcttcctccaccttgttgtttctccagagtaccttgaccaaagctatggtgttgttccaaaggaccttatcctttctgtctaggatctgaactggttgttcttcatatgacaagtctggttgcagtccaagattttcataactcagcacatgagtagggactgaaatgtactttcgtaacatggaaacatggaatacgttgtgaattgctgaaagagatggaggtaaagctaaacaatatgccacttgtccaaccttctcaagaatctcgaaaggtcctataaatctagggcataatttgcctcttttcttgaaactcttgatccccttcattggagacacccgtagaaacacatgatctcctacttgaaactccacatttttacatttcggatctacataactctttttcctactttgagaggcaagtattgtggctttaattttctctattgcttcattagtctattgcactgattccagacccagatacttcttctcccctatttcatcccagtgaacaggagatctacactttttgccatataacaattcatagggagccatccccattgtactttgataactgttattgtatgagaactctattagtggtagatacttactccaggagccttcaaaatccatagcacaggcttgtaatatatcttctagtatctgaattatccactcggactgtccatcagtctgaggatggaaagttgtactgaatttcagtttggtacccatatcccgctgtaaacgctgctagaattcaaaattaaacttcggatctctatttgaaactatagactttggcatgtaatcttactatctccttaatgtacaaatctccatactaatccactgtaaaggttgttttaactggtagaaaatttgtagacttcgtgaattgatctgccacaacccaaattgaatcaaataaactcgtggttctaggtaatccaaccacaaagtcca

SEQ ID NO: 147646 - DNA, 1168 bp, Cannabis sativa
tcctaacacttaacttattttctttgttgcagcagccaggcccatggacgatctcttggcaactcttgctgaggcctacagtcctgatgcttctccacctccggctgcctcccaactggttactcccaggaggtcctcctccaatgccccttcaggcacaatcgtcttggtggacgaggaggaggaagttgaagaaggtgaagtggaggatccggccgcccttgagcgtaagcgaaagggcaagatggtggaggtggagccttttaagcggacccgaaagggggacactccggcgccaagcaacgactctgggattccttccgaggcggaggaatacaatgtgcctcacagcatagtgttgaccccagttccagcggatgaggagaggtagaatctccgagtggccaaacacaattacaccctcgacgaatacagccgggggcatgctgaggtggaggccttgaagaagattcttcgggaggagcagcagaatactctcaaggaggaagccttccggaatccgtgggacttgaacatggatccgttgacggactagttcaaccgctttgttgggccctccttggctccttttacctcggagatgaccagccagttcgtctcccacctgacgcaattcccgcctaaaagatatgttgcctgcgcctctctgaactttatctaccaggtccaagacattagctctgccatggccgcggtgagtacttcgtaatttattccatcccttaatattttgtctaaggcatctgatctcacacttgtctcttttttcagattactgttgagaccggccgcctttccaagactttaattgaccatggcttcgtcatgtccgaattcgggggcatagacgaggccatgaggatccttcgggacttgtctgccaaaaggtgggcattccaggaggaggctcaatggagggaggcccttgcggaggcaaagcttcaagaggaggccaagcagagggaggccaaaatggaagcgaggcaccaggaggcgctcaaggcggagggcgaggttgtggctatggccagacacgagctacgggaggccaaggaggccatggacaaaatggctaccaaggtgaagtccctagaggagttgcaccaggaagacttgcagtctaaggccaacttgaccgtggagctga

SEQ ID NO: 147647 - DNA, 634 bp, Cannabis sativa
gatcacaaatctgactaatgctaattaaattagcttttagtccctcaacaagcataatatttttcaaccttggtaacccatcaaaattgagagttctcacaccaatgacatttcctgttaaaccattgccagaagtgacctcaccacattgcattggtctgatattcactaaaaaatccttgtcacctgtcatatgtctagcacaaccactgtcaaaataccacatttgacaagtagcacttttatcagaaaaactagctagacatttttctttttcaaaccatttttgtttcaaagcactatgtttcttttgaaaaattttcaaaataccaaaataatttgttttgtacaaattttgcatggtgaaacatttaggtcgaatatgcccattaataccagaaaaatgacaaattggaacaaaccttcttacctgagatcttatcctttttgaacttactggagactttgcttctacaaaagacatttttgtagcagaagatcttaaatttgcagaagtaggcaagttcgctggaacactagattttacaaattttgtttttccaaaactttcagtatcatttgatccaagaccagcaatgcctctttgacctgcattctgaactttctcaaaaat

SEQ ID NO: 147648 - DNA, 683 bp, Cannabis sativa
  modified_base (67)..(78): a, c, t, g, unknown or other
tcttcagaaagggtatagatgttattgtcctgatctcaacaaatatcttgtttctgttgatgttacnnnnnnnnnnnntacaccttatttttcatcttccacaactcctactagttagggagaggatgatgatttattggtacattttgtcacatcctctgcacttgatacatgttctgatgagtctctagttccttctcctgcctcggtcataaccacctcctctacctccaccactccctcggcctcctattgtttacaccaagcgccccctcctccatctcctatttcatgtcctgcacctgcatctttgtcatcagatccaaaaatcaaggatgatcttcccattgcactacgtaaaggtaaacgccaatgtacttttcctatttcttcttttgtttcttataattatctctcctctacttcttgctcttttattgcttctcttgattctatcactattcctaaaactgtttgtgaagcaatgtctcatcctggttggcttgctacaatgatagaagatatgaatgctttagttgtaaatggtacttgggtcttggttaatctaccttcacgaaaacgggccatagggtgcaaatgggtgtttatggttaaattcaatcaagatggaacaattgctcgcttaaaggctcatcttattaccaagggttatgctcaaacct

SEQ ID NO: 147649 - DNA, 753 bp, Cannabis sativa
aagtcaccgctctaaatcgttttacatcacgatcctctgataaatgcaaagagttttttcagatctcaaaaggcaacaagaagttccaatggaccaagaaatgcgaagacgcttttcaagcattaaagatgcatttggggcagcccccaatcttgtcaaaacccatgtccggagaagttttatccatttacctggcggtgtcagaatgcgattagctcaatactaatccacgaagaccaaggtcgacaacacccggtgtactatgtcagttagcgtttattagatgctgaaactcgctatccacaaatggaaaatctagcattcgccctggtaatatcgtcaagaaaactgcgaccttattttcaggcccatagcattgaggttttaacaaactaccctttgaggcaagtcttagcaaagccagaggcatcaagaaggttgttgaaatggtcagtagagctaagccagttcgacatcaagtacaaaccaagatctgcgatcaaggggcaagccttggcagatttcattctcgagttcccaagcactgaggtagctctcgtagaagaaaaaattgatactaatgtgccaaatggcgaaggatggactttgtacgtcgacggagcttctaataccgaaggctccagtggcagaatcatacttatcagtccgaacaattttaaggtacacgccgctttacgatttgaattttctgcatctaacaatgaagctgagtatgaggctttgatcgcagga

SEQ ID NO: 147650 - DNA, 880 bp, Cannabis sativa
ttgaaaaaatatatttcttgacctccttcatttcacatggctatatgtatgggtagtttttcctaatctctctattctcattttctctcatttaattgatcttttactattgttatagtaataacattaaaaaaatattaactttttttaagcaaaacataatatgtattaataacaatgaaaatatgtacacacttattcgctataatgaataatttttagcagaaatttataaccaaaaaactatttgtattctttgtataactcttacaattattaaccattcaaacttttttattcttccattaaaaaaaactatttgtattctttacataactcttatatatatagtgtgacatacctaagttttgtgtccatttatagttttaaagtttttattatatttctttttcttctaatttttggtgttctatttttatatatttacttggcactaacaattattcatttttgaagatttttgttcattttttctaattttttatgttttaaatttttcagatcgacaatggttattcaatgacatgtgctccaattgttattttatttcaaagttataaggtaactttttccttgcttcgaaaaaatcttactaaaactatctttatattgcatatgtatttagattcaatttgatttcattatgtttcgtctttatattttattttcatcatatatttcattttttgtactaatctttgttttcttctctattccactctctattataagcttgattatcacaagtttatatcatctattttgatcatgacaatgatctcaataattttaacttaatctcttaattaagtatatacatacatacacacacatacacatacagtatatatagcacaca

SEQ ID NO: 147651 - DNA, 662 bp, Cannabis sativa
  modified_base (513)..(524): a, c, t, g, unknown or other
ctatagagcttttatcaccactctggatcaagtttagattccaaatttagttcaggaagctctacaggatcccaattggaatgctgccacaatggaggaaattaaagcacttgaaaaaaaaataaaacatggatcatcacagatctgcgtaatggcaaacgcacagttggttgtaaatggatcttcttggtcaagtataaagctaatgggagcattgaaagattcaaagcctgattagtggctaaaggattcacctaatcatatggcattgattaccaagagatttgctcttgttgctaagttgaacaccatccgagttctcttatctattgcagtcaacaatgaatggcctttattccaacttgacgtatagaatgcttttcttaatggcgaccttgtggaagaagtatacatggacattcctccagaatttgaggaccggttctcaaagggaaaagtgtgcaaactaaaaaatctctctacgaccacaagcaatcccctcaagcctggttnnnnnnnnnnnnaaaagtgttgaaaggagatggttacactcagtgccaatgtaatcatacttttttataaaacactaagttggtagaaaattaacagcattgattatttatgtcgatgatattgtggttacaggtaatttcgtggaagaa

SEQ ID NO: 147652 - DNA, 629 bp, Cannabis sativa
atttgagcccatacaagaaaccacgttagtctaagtaaagtccgacataaatccaagcacaaaatgaatctgagcacaacacgacttaacctgtatttctctatagcttgacacatatttttaaagctaattacgttttttgccccttaaactttgatatgtactaaatcatgtcctttaaatttttttggcagttaaaaatttttcctgaactattaagattgttggattaaggacttttgtctaatttcattcaattttactaattcgatgattgtctatgtactaaattatactcttcagactttgatatttaccaaactatgtctctcaaactttgacatgtactaaattatgtcctttaaactttaattcatggtaaatttttcttactaaatttagataagtctttaaatttaacaattttaataattcaaagaaatttttgaatgaccttaaaagttcaatataatttaatatatatcaaaatttgagtagtgaaaatcttaattaacctatttttaatagttgtataacaatccatagcacatcatgtatttcaagcacaataaaacaccaaaattaccgcacaataattttgaaagttattttattttatttttttgaca

SEQ ID NO: 147653 - DNA, 985 bp, Cannabis sativa
cagagcctcaaaagaactcagcaagaaatcagtaatatcaagatgtttatatttatgataatgatccacaaaccttgatgatttccaagcctttctcaatctggaacaccccagtaaagcatgatgaaccgttttcggactactcttacaaaaagaacaaagtggggaatcaagagtatgcctaacaaaaagattggaagcaacaggaatagtatgagacacaattctccacataaagtgtttaatttttggaggggctagagaatgccaaattttattccaaaacttcctagaaatcacagtagatgatgaggatgggatatcctgagtagagagagccaaatgataagcagactttacagagaaaagaccagaactttctctagaccaaataatatcatctttgccagaaaaaccagtgattgggactgcaaggatatcctgaatatcagactcatagaaatgattcctaagcttactataatcccaatacccagaatctgaaatgaaaaaagaaagcttaggtgatggaagcaaaataccatctttataacaaagatatttattgttggggatccagtgattatcaatggttaagatgttttccccatccccaattttccaaattaaacccgaagccatcaaatctcttccccaaaggatgctcctccaagcaaaacaagggttatgacctgggacagcttccaatatagaagaatttgggaaatatctagcttttagcacatgacacaacaaagagttaggttgttttaaaattttccaagcctgctttgcaagcatagcctgattaaaatgaattaaagaacgaaaacctaaccccctacacatttagactgacaaagctttttccaagatttccaatatatttaattgttattaccagaagatccccaccagaatctagccatcgcagcttcaattcctttacacaatttaacaggaagcctgaaacaagccatagcat

SEQ ID NO: 147654 - DNA, 571 bp, Cannabis sativa
ctctcaaaggaaactcaaacacgcttgctgtagcaattttttcgcaaaaattcagcaaaaatcttcctgactactcatttaacttgtaccacttttgctagattttgctagaaaaatactgcagcaggcgaagttttccaagtcaacgacaaaaactttttttcataccaagtttttgctctagcaaaattgaataaaaattttagcaaaaacttcagacccccaaatcacatcccaaactccaaattgtgctccaaaaatacctgaaacaccaaactaagtctaaaatccacacaaaaataaaaataaaaactagaaattgacaacagacattaaacataattatttttttttcaaaggaaacaactagagttataagattaaaaacaaagttgagaaacttgggttgcctcccaaaaaacgcttgatttaaagtcactagcttgacttttggagaggtgctcatcaaagagcgacttccgcccatagagagtggcatatgccctcacatatgggtctttcttttggacgccctcaagcttggcgagatgtgaaatttgcgagctccaat

SEQ ID NO: 147655 - DNA, 580 bp, Cannabis sativa
gtattccatctgcatcaattgtcagacgataagtaacattcccactcttgtgtccccaacctacagaatgaattgtctttatattgcttgagctagtagtgttgtacatgtataggttgtcgttagcctcaaatttcagagttgtattttgtgatcctttcccattagtttttgaggcccagtaagcatggtagacttctacattgctcattctcaggtactggaccagattaccatcagtctgcatcctaagttgaaatgttccggaggagtgatttgactcggagacagctgagacaaaatcttttcctgtctccaaaatctgccctgacaaaagagtatctgttggattctcaaaactctgccatatgatctcagaatctgagttgtaaaggacaaaattacacgaatcgagcattgaagctgaggcagcaagctgatcaggggaaacaaagttggcgaaatcattcaaaacaagtgttgtgctctgtggaagtggctgctgttgatcccggtttgctgtccacacgactgtcttctcctttatcttgtcaaaccagattccaatggcaaagccatt

SEQ ID NO: 147656 - DNA, 514 bp, Cannabis sativa
ggtaaaatatttccaacagaacattctctgtaataaatactctcataaataacaaagactcgttgactaaggctcgttaatgcctcaaccacataaaatcccatgcattaaactttctacagctttcttatatatatatatatattatttaattggtttccaaaaacttcggtcaatactattaataataaaatttttattaatattattattaatatattattactataatattatttttatttatataagcttatcattagtttattatatatatattatataagatatcaggaaacataaacgaagagtacgaacgaaaccctcttcttcctctttcaacaaatttttttctccttctatccattttcttcgattttcaacccgaaacctagcgatctaagttttagtagtagcaggatagcacatccatgaagagagaaaatttaagatatggtttaattacgttttaagctaaaaacaattggtttcgtataggggttttgtgaattag

SEQ ID NO: 147657 - DNA, 655 bp, Cannabis sativa
  modified_base (618)..(622): a, c, t, g, unknown or other
ccagccagttgctcaatgacctcaggaaccagccggttcatatagtgggccagcatctccttgccctttttcgcctctggcagcacgggcaaaggtggaattcgtgcctgcacccgctcaggaacactcctgaccagttcagacccagtcgttggtggtccagactctttggacttggcatatttgggggtagaagggtttgctgcagtaagctcctcggaaagattaataacctctccagaaggtctcttctccgaggacccttcaccgaccctagactttttggccggaggagaggcgctagagcttccgcccattctcttccttatagcatcaagcatctgccgaaacaaatctgcacagaacaaaaatagtgtggttagaaaacagccatcagaaaacacaaggcatgaaagtcaagaagctcaaaaaagaagtaaaatgcagggtgattgcctacaaagagaatcagaagtccatcattacctgacatcgattttatctcagacatgacagccttcccttttccagcaaagggatgagatggccgaacaggtgaagtgggctcccttaagctaattgcatgttcaacaggcatgggcgtggccgggagtttcnnnnncctcttcaatggggtcacctactcgtcctcggc

SEQ ID NO: 147658 - DNA, 637 bp, Cannabis sativa
  modified_base (590)..(593): a, c, t, g, unknown or other
ctctaagtcctctcttgaacccgtgggaacaagtagagaccccattctcctttgttgagcatttctccattgattaaggactactcttgccaatagaataaccccatagacttattaatgactttattaaaaaaaaaatacacttagactaaaaaaatatacacttagactataataataaattaaattatataattatttattgtatcatttttaattaaattaaaaagtacctaacataaaactaagtatacatgccttgcacgtaattttcttctagtacttaaataagtatgagtgatagttttatatttttcatctttaaaacaaagataagtttaattttttttaatgatatattaatttgatttaattattttatttatcatttatttaaaaatttaattatacttcttatttttaataatctttgaagaatatttcttaatattttctcatatatattttacacttccagtaatatttttttatcgttcatctttgaaaaattaattagtttgattgaattattttatttatgcattttattttatataaaatgtgactatataacagaattcttggtttannnnaaattattgggtgactttttttaaaaaatataaaaaataacaaa

SEQ ID NO: 147659 - DNA, 591 bp, Cannabis sativa
acctttcttcaactcccaaatgaagcggtcgtacccctctccagtgatctgctcagaataatagtgctgttgcactacggggtctggagtagaacaacgttcactactcacctcccaattttcaaacctcgaattggaaaatctgtcactcgaagaagatggactggcacgaagacgagggtgatccttgtacagaagttgaagcaggtcctggttaattcagtgttcgcttccccaaaactcaccaggattcatctacgaaagacaacaatcaagatgagtgtttggccgggatatcgaacaataaacaggcaaatatgccgaccaggagtactcaacagattaaaagaatgaaaatattcaaaaataagtcaaaacccagaagtttgaaatttctgggtttagggataaatttaacgaacctttgaataagcaaggtgaaagacagacaatgtgcgatcaaaggccaacctcatgaactgtgaagttttatagattattacaaagaaaatcgtagagttttaaacctagattttccacctatcttctacaacaaagtcaagaacacatgtatgaaacccagaaattaaa

SEQ ID NO: 147660 - DNA, 1131 bp, Cannabis sativa
tcccttaattgaagattgagatcatgcatatgcatttgagcttccattgttgcttccaagtattgagttttagccgcctggtagcctttccctatgtctcctattgactccttgctgaatttctttagtttgtgctttaatctcattaacttcagaaataaagctttcatcccctcagctctaactgacttcatccagttattaagcattacattcttgaaaatcatgatgatcagcccaacaattataatacctgaatggtttgaacccaatcttcttagtcaccttcatagaaatcacacaagcacaatgatcagaaatactttcccaactataatgagccttagccgacttgaagacatcataccactcttcattcacaaacgagtgatcaatcttgaagtaaattctcttattcccctcttggttattagtccaagtgaacctagaaccaatctttagaagagcttccatatggctttaggccaaccatttggttgaatcttctatatatgtcaaggtaactttctttcccccttctctgtcctccaactcaaacaacgcattaaaatcccctattatgagccatggttgagcaaggggttttaaacccgaaagcccatcccacatctatttcctctcttctcctgtattcagcccatagacaaaagtaatactcaaagcatcaacttgaccagccatctcaacacagcaatgaacaaattgcggagtttccttcactacaatgacccgagtataatgttttctccatatgatcagaatacgattctcaatagcaggactagtaaaataaacccaattagagaattttcttccaaccatatcttttattttatcttccttcaacttcgtctcaagcaaaccacacacacctattttattcaaattacaaaattcaaacacaacatcttgtttctctactttattgatacccctaacattccaacaagcaatattagagctatccatgattataaagaaaattaccatattcattcttctcacaagcctccttctcttctatcagttcagtctcttgttccttgagaacattgaaggtgttgctgattttattaatagcagcctccccttcctcttgttgtctaattg

SEQ ID NO: 147661 - DNA, 777 bp, Cannabis sativa
  modified_base (34)..(36): a, c, t, g, unknown or other
cttgttcttgagtcaatacaaataatgaggattnnnctattaccgaactgcttggggttgaacctctatacaattaatgtgttttatattactttattatatttcaatcgttataaactacttgtcacttacgaaattagacttgctgtcgttggctaaaagtgaggtcaacatttggtgcttttattgagagaagaatcaagaatcgctcttcattctaaatctaaccacaagtacgatggtggtacaaactcgtaggggcctggttgatccagcaaatccacaggcggtggatcctacattgcagaacccaggaaacacaagggtttcgccagctactaatcctgagcaattgtcgaacgcgggtcatggtgtgacgcctcctgtggatgaaattgcacctggtgcgcaagagactgggaatactagttcagcacccagccaggcattcataacacaaccgttccgcctgctaccaacgctcaaacgaacattggagatgatactgatatccaaaacctccacggtgctcttggactcatgcaagatcataccaacaccctacatcatgatcaggaggaactctgcactgcggtaaatcttgcgttcgaggaacaaagatgcatgtttgccgaatggagggacaaagagatgtaaatgttaagggctcatcatacagagattgacaatcgtagtcggcaagctactgtgctgatacgaaaagcctaccaaattgtcgggcagcaacccccaaatgtcctccccttgggtgagaca

SEQ ID NO: 147662 - DNA, 879 bp, Cannabis sativa
gctctatgaagaagatggttgttcttcatctgtgaactatttgtaaagtattttcagtttatgcaaattggggtttcaaattgatcaaactccaactaaatctcttcttcttccaagtgatgtaaatatttgtaaataaatctgttttgtgaactcaactttttatgtaactcttgtgaaagtggttgataatgatgacattcaccatatgagtgcatattaagggtctatcatcttaaatcttttggtgctgttctaaaatattatgaaaaatagatttgaattgatttgttttcttagtaatagttgtattctaatcttatttgttgtacctcaaatttgacatattttttaacaatgataatttggtaaattgaatttatcaaattgtctgttacacaagtcttgttgacatgtaatcctttctcttttaagaaaaattactcacaaatagtaagtacttcaattttaatacatcattattattatttaatataatatttattttaattttatttaaaaatgagtaaagcaattaatatcaaattttggcatcaatattactttttaatttggcaacaaaacatctctaattgttagtttctttcagctatattattaagtactttttctaagcactaccattgaagatgctctaagatacatgaaatcaaacacataaaacttgaacaaatatgaaaatgtccattttttatagatattgtagtaatttttaaatatgatttaaatcactttttcaaaaataaaaatgcaagcataaataatgatattttcatttataaattaccaaccaattaatgctaattatatatctttatatattaaaaatgtctatctaacggcatttcttggtttaac

SEQ ID NO: 147663 - DNA, 650 bp, Cannabis sativa
gtttgtcttttaagtagttgaaccgatctatagttaaaggtttagtgagaatgtccgcagcttgatcgaatgatggaacatagcaaactaggagctgatttgccaagatctgatcacgaacaatgtgaagatcaataatttcaatgtgtttgcaccttgcatgaaacacaggattggcagcaagggcattggcaccttgattgtcaacccatagaacaggtggtttggactgagatatttgcagttcagagagaagagacaatagccattgtacttcggcagcagcatttgcaagagctctaaactcgctttctgtgcttgatcgagcaacaacatgctgcttttttgtagaccaagacaccagattgtcacccaaaaacatgagataaccacccgtggatcttctatcgtctatacagctggcccaatctgcatctgtgtagccttttaagtgaagattgtcagacggtcgaagccatattccttcagtaagagtgccttttagataccaaagtaaccttttacatgcttcccaatgctttacagtgggagcttgaagaaattgacttaacttgttggtgatataggctacatcaggccgagttaaactcaagtattgtaaggctcctatggtgcttctatacaaagtg

SEQ ID NO: 147664 - DNA, 801 bp, Cannabis sativa
tatggggtgcaaataaaactcccaaaagaaaatgttttaggcttccactaagtaaattacttaataaaccacttgaggctagctcaagtggccatagggagtgcgtgtgtgttggagcacctgggttcgagtcccatattatacatgatgtaatatataaacgtttgaataaaaaaaaaagtaaattacttaaataaacctttactaaatattaaactacaaaaaaataataaattgttcttttataactcaaaaaatatctaagtcaaacaaccatagatattgtaatccttttaaaaataataaaaaaaaattgaaatctttttatatctcacatttaattaatgaataataatttatctttctacaaaataacttaaaaaagtatattattttatacagaaaatttaaaaaattatttcaattaaggaaagtaatttacttattattttattaataaaaaatctctctattatttattctgtaataatattttccttacaaacttgaaaaatgatttaagttgaatattccattaatattccaactaactataatttctgatctgagttttgtctataacggtttattagttaaggttattctttattatgatatattatttcatttatacttattaatattatttctgtatacaggtcacgtggcattatgaaaaaagtggagtctacacagtcgagtggatattccctagcaatgaactctatacccaattcaaattcttcttcgttacttcctttagcaaagtggtggcgtgctttgtggcctctaaaaattccc

SEQ ID NO: 147665 - DNA, 666 bp, Cannabis sativa
tagaattgttttgtgatgaacatgattttaaccataatttttcagctccaagaaatctacaacaaaatggagttatcaaaaggaagaatagaacaattcaagaaacagctaggtcgatgctaaatgaaatctcactaccaaaatgtttttgggccgaggccgttaatacttcttgttatattttgaatcctgttttcattaggcacaacatgaataaaacctcttatgagcttaggaaagggagaatacccaactttggctattttagagtttttgaatgcaaattctataatttaaacaccaaggacaaccttggaaaatttgatgcaaaattcgatgttggaatttttatacggaattcaactcatagtaaaacttatataatatataacaaaagaactaatgttgttgaagaatctattcatgttgttttttatgagactaactcgcctacaagcaaaaatttagatgatgatattgtagggttgggagatgaggtttaaaatcttgatattggagagactttcaatccaccttcacaaactcccaaagaggaatcacccgtggaaacagtaaatgaaagtcaaggtatgaattctaaccttccacatgagtggaaattcaaaagtgctcatcctataaaccaaattctaggtgatccttctc

SEQ ID NO: 147666 - DNA, 640 bp, Cannabis sativa
atataattttattttcatggtatacaacatatatattttcattgtggtatttggttattagaatatatattagtaatatatatatatttttattattattagtatatatattttagtaaatggtgtatgtattttttgttatacggtatattattttttaaataatatttaagttctattttttattgtacctttgttgacatgatatataattttattagcatcctatatatttttatttgttgttattatatatatttcgattgtaggtatatattttttgttatatggtatataaattttattgtataatatatcattttattttagatcatgcatatttaatttttattttatgatatataaaggtgatatataattttgtaagcacgatatacttattttatggttgtatataattttgttaatatggtatatacaattttttttaataatattatattatttttttgtaggtatatatattttgttgtacattatatgatttttgttctctatagtatatcatttatttaagatgatatttattttttattttattatatataaattttttagtatgtatacataatttaataatggtatatataatttggttagcatgatatatatattttga

SEQ ID NO: 147667 - DNA, 561 bp, Cannabis sativa
  modified_base (28)..(44): a, c, t, g, unknown or other
tcacggctgctcaaccttagccttgccnnnnnnnnnnnnnnnnnacaatatctgtgagtcgacagacttagtaagaaaagcatgatcaataacatagcaataaccaagataataatcaggtgcccataccgccaactgtaaccctaaccccatgtccaacacggtggtgagtaaagaacattcgtacgacagtactactgaccataatatcagcctatactcggtaagctagtcgtactcttatcataccgatgtgatactgtcaagtagtatagtactatcaactatattatcagcctatactcgatacgctattcgtactctagtcgtactgatgtgatactatcgagtagtacttaagccaacatacatttattgatatccaatataatactaaatatattgataccactattataatgtaatctaacaggcttaactaatatgtacgatgtacatgtaaatacgtatgcatatcattatactaatcttacctcatttcggaattcaagtgtgccggccaacttgagtggaacagctgctcgacaatttataggcccc

SEQ ID NO: 147668 - DNA, 605 bp, Cannabis sativa
agctcacctacaagcatcaaaacccgaataaaactacatattcatgcatataaaaactgcagaaactgaactcaagcacaaccaaactttacagcaactattttcacattttttatttgaaaaccatagcttttgaataacaattccataacaaggttaaatcccattaactaacaacaaaactagcatgaattcactcaattaaacacatagaaacctctgcatacaacaacaattaaccacaaccaccatttcttaaacatgcaactatcaaactttctcaaaacatcataaaactaaaaagaaagctaagggaaacataccaacaacttgagatcagtatctcttgctaaaattaacttaaaatcaaagaaaaatgccaaagatccttgctgcacaaggaggccgaaagagagagagaggctagagagaaaaatggttttgattttcttttctaattaattctaatttgaacataatggataaatgtaaacaataaacctgtatttcagccacaaagaagccacataaaacacatattcaattcacttagtccactaaaggacaaaataacattgggacaaactgaccattttgcccctcca

SEQ ID NO: 147669 - DNA, 1542 bp, Cannabis sativa
aaattattaaaaattaaggagaaatctaactgtagctggttaaatagagaaatggatttgtggcatagatgtaggagattgtatcgaactgaaaaatgtacatgttgttaggttgggacaaattgaaaccctaattgttatttttatttattttttttttatatataaaggaggaagatgggtcaagcgattgttgcaaaataataattagatgtaatttttaaaaattaattaagtattcaaaaatttattttagaaggggtggaagtctaaattttgttaaaaaaaaatagaattttattgtaaatattatagttaaatggtttaaatgttaaaaatattataatagggacttaaatataaaaataaaattatttataaatattaattgctaaaattggtcttactaaatatttaaattaaaattaattactttaggaaaattgttaattatgattaatttaattttaaagaaagaatttttacctttcggtagcctgctattacaagtcaaaagaaaatgtaatcatcatgattacaataaaaatgtaagtagtgaccataactcaatataataaactataataatatactaacctaatacaatatagaaaaggttaataaaatagataatgctatacatcaaattatggaataaggccaattgggaaattttattgggtttgttcaaaactcaaatacacaagaatctatatatatatatatatatatatatatgggtaactacttcatagtaacatttttattgtaatcatcatggttatatttttcttttacctataatagcatattaccaataggtaaaacttccttttatagaatcaattaattataatttattattttcttaaaataattaattgaatatttaacaagacctcttttagtaattaataattataaataattttttatataaatcccaactataattactttaacagttaagtcatataattataatatttacaatgaaactttatttttttttacaaaaattagacttctttttacacaaattagaattatattcttgtataataaatttgtaaacaattaattatttttaaatgatattaaattattttttataactagaagaactaagtatgagtttttttattcgactttgaggttgcttcgttttcttggggagcttgactttgttttttgactatggtttgattttaatgactccttataaaaaaaaaggatagaggagtttacccgttttttttttttttttggaaaatatattcaacctatttcatgttttattttttaaaatatttaaataagaaaactaaattattaagtgtaataatttaaaattaaagttctaagtataataaattttaattataaaattatatgtatataattttaaattataaagaattttactataaaaattttaataatttaagggcgaaaaaaattgctaaaagatccttctttaataataaattatgaaagaataattaataattataattaatttaattttaaaatataattaat

SEQ ID NO: 147670 - DNA, 723 bp, Cannabis sativa
  modified_base (301)..(305): a, c, t, g, unknown or other
attgatttcaaaatccctaattcttttacctctctttctctctatctgtatataaaaatgtaaaatcccttatttttttattcatatttctcaattttcttttcaaatctccaatttctttacctctttttctctctatctgtatataaaaatgtgagatgcctaatttatttctattttttcaattttttttttcataaataaaatttacaaccagttactattttgaagaaatttatcttcctttacacatattttaatttcagctttttatttttgaatttcttggactgatgcatgnnnnntaatttttcccttaaaagaaaaaggtaaaaaaaatatagataatttttggggttttttaataaagaaaaacaaaaaatatacaactatttgttaatttatctatatttagcttactcatcaaatacgtgttacaatgttaaattttttatttttcatattatcgatttttcataatttctgaatatctcttagtagaattttcaaagtatttgaagataaatttttgattttatctcatattttgctacgtattgaactaattgatatattagtgctgagtcattacatatacgtgttatatgatttgtgagattaagagttatcgtctctttaaaggttagtataagtatactattctaacatgatcaaacttatcaaataaacagttttaagaagtggaactttgctgtagaatac

SEQ ID NO: 147671 - DNA, 959 bp, Cannabis sativa
  modified_base (26)..(59): a, c, t, g, unknown or other
ataaaatgatttctgatctttattannnnnnnnnnnnnnnnnnnnnnnnnnnnnnnnnntttagggcagaaaacccaacatcaccatgtagtcattgactatcatagtcggtaagccactgtactgatacaaaaaagcctatcaatttgtcgtgcagcaacccccgaatgtcatccccctgggtgaaatagacgaagattcagcgatgaatctcttagactataaatggccagccgccaaatctcgggtcacaggttccacctgtgggccaagtggtaggtggcagaccttgtctagtaattcatcgggagaagtcatacccattaatttcgaccgggttaatggtgttggttagcacattaaccaaaccaaccaatcactaagacaaccaggcgcttccgtattcgataggttggggatgacacatgatctcagaaacgatctgaataggaggagaggagtagacgatcagcttaacacaccgatcatgtagcccagaacccgcgctcaaattcccgctcagaaagatactgatgtgactcagatcggccaaaatgccgaacaggttagtccagctgtgtaggcagagctggacaaactaaagaatatgttccaaagcatggccgatcagagaaataatgatctcgagttggacagagcacgtggaacccgtttctcccccgagatcaatctcctgacattgccccacaagtttaaaatgccaacctggaagatgtacactggaaaagaagatcctctttcccacctcaattatttcaagacgcaaatggatctgcagggagtatgaggagacatatgttgcagaatttttcctgccaccctatcggaagcctcccagcaaacctggaaaggtaaactcatggaaagctttctccatggaattccatgcacaattttcctcctctcgcaaacttccgttgcacctaggagacctgatc

SEQ ID NO: 147672 - DNA, 540 bp, Cannabis sativa
  modified_base (512)..(513): a, c, t, g, unknown or other
aggaagaatagaacaattcaagaaatggctaggtcaatgctaaatgaaatctcactaccaaaatatttttgggttgaggccattaatatctcttgttatattttgaatcgtcttttcattaggcccaacatgaataaaactccttatgagctttggaaagggagaaaacctaacattggctattttagggtttttggatgcaaatgctatattttaaacaccaaggaaaaccttggaaaatttgatgccaaatccaatgttagaattttcaaggtattcaacacatagtaaaacttgtaagcatatataacaaaagaaccaatgctgttgaagaatctattcatgttgcttttgatgagactaacccgcctacaaggaaaattttagatgatgatgatgttgttggtttgggagatgagtttccaaatcttgatattggtgagacttccaatgctccttcacaaactcccaaagaggaacctgttgagaatattttatcaggatctagattnnctaacaagtatgttaattaacatccta

SEQ ID NO: 147673 - DNA, 1060 bp, Cannabis sativa
ctgggttacccggatttgctgctgggtttcccaaagaattcgtattgtcggttcgtgctagtttcagagctttggttggttaattccctattagtttagggtacttccatgttaagttacagtagataggtttttggtttaacacctaagtcccttgttgtgatttagcgcgtcacttatcctcgttgttatcgatgtgatttacgagtcgtaattcagcgagcagttgttccactcaagttggccggcacacctgaattcgaacttgaggtaagattagtataatgtcatgcatatgttattacatgtttagcatacatgttgtttatgcctcttagattatattgatagcagtatgcttatagttgtactgattactgataaatgtatgttagctgaaatactgatcgatattgtcacatcaatatagttagagtatgactagcatattgagtataggctgacattatggtcgatagtattgccatataaccgttctagactcagtaccgtgtgggacacaaggatagggttatgatcgggtgtatgggtgcctagttataacctgggatatttctatgtttatgttatgcttttcttactgagtctgtcaactcacagtgctatttccatgtgtaggtaagggtaaggctaaagttgagaaaccatgagtgcgagcagatgaatattgtacatgtcagagcgtacgatctttgggacatcagggctttttgctctatagtcgctaggcgacaaaacttttgtatatggatagcaaacttttgtaaatgtattttgtaaacaggatcccaggattttatatatgtattactttatgtttctaattaaataagcaattttttaattaatcacgcttttcattaatctggttgattagcaacgagctgcacagtatgttaaaaatcacgctaacatgcctaagttagttatggtgttatagctcaggagcaaagactgactgctcgttcttaacttccttgacgtatctcttttgggcattgttactttctgtagcgagatgtggccctcctgagataac

SEQ ID NO: 147674 - DNA, 659 bp, Cannabis sativa
aatgctggacactaaggtttgttggccccttttctttatgatacaacacaagcatctatgtatataattttggctaattagtaatttttttccccgaactttgacatgtatcaaatcgtgcatcgaattattcaggccgttaatttttttttccaaattattgagatttttggatttaaggaactctgtctaattcggcaattattgcccacgtaccgatcgtgccccccgaatttctgttcacgttagattcccgttagtaaatttgaatgaaattggatagaaatccttaaatcaaacaatgagggaaatttttaatagtctgaaaagttcggggaaaaaaatcctaactagccagtaatttttgctcagaatacagagcagctgtttcatataaagcatatgatttattgtcttaacaatgatagatgtgataagttgttataattaatttcttttctgcttgctatcatttgttttactcttatcatctgaatcagtttcttgcttcagttgctacaatagagtgcacccttttctgtattcacatagtgtgcagtgtcttaaatgctgaaactatgattggactgacagttcaaaccatagtgccttttatgattaaattctttttaagattagtgtgtcttacaattcaagag

SEQ ID NO: 147675 - DNA, 779 bp, Cannabis sativa
gggcagtcaattgggattcaatgccaagttcgatcaaaagatatttgaattgcataaccgtaaatgccatagataggtttgatcatcattatcgaacttttgctttttgtggtttctaggtttagcaactttaatagtttgttatgtagggcaaatggttcgcctggtcttagaacataaagcccctgttccatggatgcaacacaaatttgaatgtcatttcgagaaatggtaaaaccacaactgaaaaaatctaatttgtactgttgcaattgtaagcatgaaacagaaatcaaatttctactaaaatttggaatgaatcagacattgtctagttccaaaattctgttttgaaacttgactttggcttttcctctagctttaacagataccatttcgccattaccaactttaagtttcaactctccgaatttcaaataattccacttttcaagcaattgcaatgaacaactgacatggtttgtagatccagaatcaagaatccagatggatttatcattctccaaaacacatgattaaaaaactaaagcatcaatgcttaatcattttagaaatgttgttattgctagttaaatctgttgtgaagtataatctgatgaagtggaatcactttctctaatcttctcaactcaacttgaagcagtaggattgttggatttatgaactctttgctcttcagattgaacaattcctagcttagctgctttgttgaattttatgttcatcatgagcaattgtgaagtattactctgacaagg

SEQ ID NO: 147676 - DNA, 510 bp, Cannabis sativa
tggaggttgcccattaaaatagtcaatttttaagacaaatttcatgtaaagtgttagagccatatttcattttttttttcttttttttttcaatttttttattaaataaaagttattttttacttaaaaaattaatttttcatataatgtgagatcatactaagaaaataagagaaataaaaatataatattatagaagtataggtttattttgcaactataaatattaaaaaaaaaaaaaggctaattagtaatttttcttttgaattttgacatgtactaaatcgtgcccgtgaacttttttggccgtttaaaatttttcttgaactgttgagattgttaaatttaagaacttttgtctaattttagtaaaaaaaatttaacatagatgaaagttcaaggattatgatttagtacatatcaaaatttgagggacatgatttgttaaatattaaagtttggagatgattgtttagtacattaacaatcactgaaacagtaaaattgaat

SEQ ID NO: 147677 - DNA, 563 bp, Cannabis sativa
tcaagtcattctcagctagttgttggtgatctcaagccaaggtatagtcttttaacttctactcctattttcttgaattttaagaaagggatttttacatgaaatggtgttttagctactgtagttgctgtagttgttagatgttattttcagaagttaaattgtgttagattatgttagtttaagcttgaattgatggttgttagttggatttaaccaagttttgagttttgaactcaaacttggagctttaatggtggattgtgtttctaagcatgttagttggttttgttgcttgggttatgttcattggggtctaaatagcaggtctggaaggtttcatgaagtttggggttgttttggttgacttgtggaatttttgaaaattcctgctctgaacggaattccggttcagaggggcccgtaggaaccggaattccggttggctcccaggaaaccccatggaaccggaattccggttgggaactgggctaccggttggggcagtttttggaagcctagtttttcccaattttgagatatttagggtattcccatgttat

SEQ ID NO: 147678 - DNA, 1354 bp, Cannabis sativa
gagttttaaaacacagttgaaactacatttactatatatatagtttcataatttatatatatatatatattacaaacgacaagcaactacaaaatacaattcaaaatgttgaaaggcctaaaccctccaagttgcactgccgcgatatgtacaatcctcgtcaagctctaattcactgctcctctaacttagctttacatttacctacacaaggtagcaaactgatgaatcgaaagactcaataagatatgcataatatatataagcaatgatataccgactttatgcttaagccgtcctgagcccaattactgagctcaccaagtggttaagaacgttctaaacggaagtacgaccactgtatcatatgcaataaagtactgaccttgtactcgtgttggtagggccattattgtacttttgggagttattgagtgttgtaccacatgcatgacgtatccctaagtactcgtgttggtaacactgtaactaccataaaaccttacattgtactaacacccttataactatacattcgacagtgctagtagtgtaattggataataacaaacattcattcacatatatatataatttatgctatcttacctcgtttccgtgttcaggtgtgccggtcagcctgactggaactgtagctcaacgctttacagggtcctaaaccacaatatccgaaattctgatgagagacacgctaaaacacttaacggggacttaaactcaaaattaagaataactttgtcgatgaataacatggaaataccccaaaaaatggcccaactggtagaccgattcccaaccgaaagtctggttccctgaggacccaaccggtcaaccagttgctacaggtccccctgaatcgatataccgattcagtgctaggaacctcaaaaatgtcccacacaccacaaaacaaccccgaactcactcaaaagctccatatcacctgtatacactataatagacccaattcaagcaaaagaactcaataattcacacaaaatctcatttcaccattaaagggcaaggcttaagttcgtaaactcaaaccttagccaaacctcaaaataatcaacaaaatccactcaaatccacataaacaacctcaaatatagctcaaaacttaaacccaaacaacaattatcaccttagtaccataaatcaactattcatgcacttacttctaacttaagcttcaaaaatcaaaaagaaagaagctaaaaggtactaccttgaatcaaagctcttcaatactgctggaaatcacagaattaagcaaacaaaatccaaccctaagctgggttcttgatgcttcgaaggagagagagagagagag

SEQ ID NO: 147679 - DNA, 534 bp, Cannabis sativa
  modified_base (488)..(508): a, c, t, g, unknown or other
tgcgtgtggacccgaccaggcacagtatccctcccttagattagttgcccgatgatttgaagaaaggaaaaagcattcgacactgcccaggtatacatccttctctaaactcctcaactgggcctgagttacaatagataggggacacacccaccgagtcctaaaggcaccttgcctcctttgaggaacttcctcggcgtactcctcggtgacgtagtcatcaccttcgaaccgcaaaggctgagcaactccatcctcctcagcctcagaggaactatcaggacggacctctccctgatcctctatttcctagacttcaatgtccccttcgtaatcctcttcctcaacagcacgccgagcttgttcagctctcggcatcgtggcgtgccaggccatgtgagggtcagctgcagcaatcttccacatagtttattttgtgcggaccatcatcctacccctggacggtggttgatgttggaaattatttnnnnnnnnnnnnnnnnnnnnncacaagtatgtttattaacaccataa

SEQ ID NO: 147680 - DNA, 790 bp, Cannabis sativa
tatattttatatttttgctcgcattctcggatcctagactcgaaactatacccgaacctgaatccggatgggttcatgtcatggtatggtgttaagttttaaaaaactagaaaacagaaaacatcaaaatgctgttttcaattttcaaaaataatttttttttgtctaacatattatattttatatttttgctcgcatactcgaatcctagactcgaaaccatacccgaacccggatgggttcatgtcatggtatggtgttaaaatattattttattttagtaagaaaaaatctaaaaattttaaaaaatttgtgccaaataccattatatttttaaaatgacaaaaaactgttttctattctcacttttaaaaacacaattttaaaaaatgaaaacataaaaacacacccaaacaagctcttagctttttgttaagtgttgtcgtttctaaggatgggaggttacggcttctagtaagtttagtctgtaaggctgtttattttatggagtatttgtgtttggattatggggtcgaccggagggagactcttctatccggtgtatggtttttgtttaccgggtttgtagttttgcttcttttgttattgttttcatttattaggattgaccatttacttttttttgcttgtaatttaatttttgaacttatcctctgtttgttgatttttgtagggaattttccagtcatattagcagaagttgttgcattaatggttgcgttggattggtctctcactcttggtcttcctcttcatgtggtggagtcag

SEQ ID NO: 147681 - DNA, 1071 bp, Cannabis sativa
atgctttcaaggagcttggactgtcacttcatggtacgttggctttgttattataattatattattcttttttacacctctttcatatccatatgtttgcgattctctaggcttccttcgcttcttttgcttccaaccgattactctctgagcggcttgaatacttggagggcaaggtcccacaagctactttcacaatttaaggttgtgagtatgcaccgggatgactcccaataggaagatacccgcctcaagaaagaagtcgagaaagtaaaggaggaagcccaaaaggcaatgaaagaagccgagaaggcaaaagaggaagccgagaaggccaaggaggaggccgagaaggcaaaagaagaggctaagaagaccatcaaagcccaagctgatgagtttgaggagaagcttgctgaaaaaattgttgagaaagaagtcgagactgtagaacggtgcaataaggttggtttacgcactgtacatcgggcctggctttggaaccctaatatggataccggcttcttggaggagcaggaagaggaaactttagcactttgcgagaagaccaggatggaggaagaagatgtcgaggtcgaggaagaattagatctatccaagtctcccagcatgtagacttggttattattttatctcccttttctcttttaggaaatggccctttggccgagacaatggtttgcccctagcagcacttttttgtaaagaaagatttgcacggttggatggccaactttgctttttaatgcctcgcacttttaaatttaaactttaatatgcggatgtttgcttgcattttattcacaatataaactatctcatgcataaagtttattaggggtttccattgcttgtcccttcctttgacattaagtagttaatttcctactttacgtgtgagcaacttacctgcccgttcctcaatctgtgagccatcattgattccacctcgcgatcatcggaaatgatcatattttaagcaaattcaaatatatttttaatgaacttgtcatcttgtatatattttcattacttacatgagtagttaaa

SEQ ID NO: 147682 - DNA, 567 bp, Cannabis sativa
atggaacccctgtatgaaagggttcgtaagtaggcacctctagttttcttgggaggttcaatgttatgaaagccgagcaatggctaactatgatcactaggatcttgaattttatgggcgtcactggtaatgatagggtggcctgcgccactttccgatttcaagaagacgctttggtttggtgggacatggtgtccatgatttatgacgttactacaatgacctgggagaattccaggagctgtttaatgtcaagtattttaatgaggcagttagaagtgccaaaagaaaaaaattaacacagctgactcataaagataatatgagtgttactactatacgactcagtttgatcgcttggcaaggttggcttcgggaattgtgccaactgatttcagtaagaaagagaagtatctggatgggttaaatgcgaagatcagacatgacttgatgattactaatgacaacagaaccacctatgctgaaatggtggataaggcactgcgagttgaaggcatagtgggatgcatagttgagtctcgtgagactccggttgttggcggggct

SEQ ID NO: 147683 - DNA, 583 bp, Cannabis sativa
atatatgatttattaattccgcactttatacttaataatatatatttcagtttatacatttaaatgtctaacacctaagtgatgtcttgatactagttagtcagattcaatgttttggtgaagttgttcaccaattttcaaagatatcgctattttgtgaaatcgggaggactcaaaactctccgattcggccaatattctaccttatagaaagggtaaaatatcaaagtgtaaatttgacctgtcacaagttgtagcttttgcttactatgaaaaaatagttgagtgcttgaagcagagacgatgctatagttgtagatgcaaaaagagctttgctttggtttttaagtgacatataaagaattcactttggttggaataattaacgctatagctgtagaggcaaatagtgatattttttgcttaggttagaaccgatgctaattgattttttaattcagttatgaatcgaagcaaaaaaaagtttttgcatcgattcataatcaaagcaaaagactagtgcaatgacactatttattttttgcttcagttgtgagccgaagcaaaaaaaaataaaaaaaaa

SEQ ID NO: 147684 - DNA, 726 bp, Cannabis sativa
ttattattattattattatgtatgagctttataatatttagaataaaaatgacaactttgatcatgagttaaaaatatgacagcatatatctcagtgtggaagtgtttgtctaaatcaacacattattaggaattttctctgtatataaaaaaagataattaaattataaaattacttaacggtgactctatgaatattaatacaactcataagctaactaaatattactaaaataccacttcttttactactttagccatacgaaacgaaataaacaacctcatgcacgcaactttcaatcgaccaacctagcaattcaacacaactgaaacgaaatccaaccaaaaagagaaccaccattaattttggctacttcatctgagaagacgaccaaaatcaatcaaaatagaggatgtttcaaattcaagaaagaaatgcagaaaaattactagctacaagactaaaattaaaccaaaaattcggtttaattcgcataaaactaatattctgacttcaattttcaaattcgtgaaatgcatatctcaaaaaattgaactggagttcccaaacaatccaactcaagtataataataaaaaaaattacattaatactatagttaaatgtttatcttgtatttttgttgttttttagatttttaatggtgaatttgttcatattaaatcacaaatagacatgtagataaagttacgtacgtggaaacact

SEQ ID NO: 147685 - DNA, 665 bp, Cannabis sativa
gccgaccctaattgttatttttttagcttcggttatactctgaagcataaaattacccctgatttttggcctcggtcaaccattttggtgagacgcattgaccaacacaaatagtaccttttgtagaagtgtttggagagattttagaatattttggtaaaaaatagtggaagctagcgagctcagtttacaaggtagaacttaattgcaaatttggacaatcttaaaagtagaactagacttggatctcgacattaaagttttagatctcattcttagtttttcgaaacatcttgaatcgtctaattccaagcaatattaagagagttaaggctaaaatactatcagtcgtcgcaacagaaaatttctaaaacaaaaaaaaaaacaagatagcttttcaagtagagttgcgatttttatttttttttaaatttaaattttaaatctttttagtatattttagggaactttgttagactatataaacaaattattattactgtttttaggaggtttctagagctcaaaaaaactccaaaactcttaattagcagataatcctaaagctaccaaactaagagagaaacttagagagaaaggaaggaagagacagatatcgcgacttcaaggtgttcttcatcctagttcttttcttctccttaaac

SEQ ID NO: 147686 - DNA, 525 bp, Cannabis sativa
aattcaaaacgtaaagcaacgtgtaccttaaaattgctgggactgattaataagatcccgccacctgagccttcgctatttgaggctccgtagacgtacaacgtccacatatctctattggtcatagaaatgtcgattttgtcttctatgagtgccacttcggtgctggggaattcaaggataaaatctgccaaggtttgtcccttgatcgcagttcttggtttatatttgatgtcgaattggcttaactccattgcccatttcaacaaccttcctgaggtttctagttttgctaagacttgcctcaaaggatagtttgtcaagacttcgatactgtgagcttggaaataaggtcgtaattttctcgacgatattaccaaggcgaacgccaatttttccatttggggatagtgggtctcaacatccagtaatcgtttactgacataatacaccgggtattgtcgcccttaatcttcgcgtattagtaccgaactaatcgcgtattctgatactgctaagtagatg

SEQ ID NO: 147687 - DNA, 542 bp, Cannabis sativa
ggacaatggagaaatgagaatcaatctcagcctccgaaggcatatcatgcaacctaatacaatgctcaacaacaagggaactcccttgaaaataccattcatgcattcattgaggagcaaaccaaaataaatcgccaattaaaggaagatgtccaagaaataaaaagtcaattctcaaaattgaactcatccttggctatttctgagaaaggcagacttccttcccaacctcaacttaatgcacaagggcaacatatggctaaaacctctacctctaatgatcccattgtcaaaggggttaacgccatcacaacaagaagtgataaaaatttggaagatccatccatcaaaaccactacttcaaatccaaaagttgcccctgacagtgcaccactcaatgctcaatccaaagtactgtttccctaggctcttagacctgttgggaaacttcctaaaaatcgagctgaactccttgagcacttgacacaagtgaagattaatcttcctttgcttcacatcataaaacaagtgccagcttatgc

SEQ ID NO: 147688 - DNA, 948 bp, Cannabis sativa
ggatcggaattcgagactcagacgtggacctggatctggactcaaacccaggactcgaacacagatcttgaccatgaccggcatcaaaaacccgaacccgaactcggtctaggacttgaaccccgaccaggtcttagacttggaccgggacataggacccagacctggatgggggacctggaccagggacccgagcttcgaaattgacaccgagacctaggacctaacccaagaccaagaccctgaacttcgacacggactacgacctgggacccaaagtggaactagattgggacccgagaccaggatcttgatctagactcggggcttggacctaacccattgtcgatgtttggatctgggacccatacctggactcaaactgagacccaaactcatacccaaacccggacccagacccaaacttgtactccgtgacccgaaacttgaagcggaactggaagcggactaggacccgagaaccagaccaggggactaagacctgatctcggtcctggaactggaatctgacaaggaaccagacccagaccaagaccggtatgcggacccgaatcaaaacttggattgggactcgagacgcgaacccaaacccatacacggacttggacccaggcccgaacgcaggacccgaaccgggattggagactcagacctagacctaggtccctgacctagattggggacccaaacgcgaaattagaaccaaaatcaggacccaagaaagggactgggacctaagaccagaccttggtctcggtcccagacccaaacccagacacaaaccgggaccaaatatcggaatcaaacctgaacccaaacacggacctagacctagaccaggacttagacccacacccacacccaaacctcaaatcgtaccctgtgacccaaaattggaaccggcactggaagcagacccttaaaccc

SEQ ID NO: 147689 - DNA, 612 bp, Cannabis sativa
taaaagtttgtatttttgcctccttagatcgatctttgaattgtacagattattattaatagctactgattattattaagactgttgggatcgaattctggactaactttaagtatgaacatctactcacttttctgttttatttgtagaattatggggcattccgaaagtttttgtccacggcatttcgaggttggagagggtcagataatcaagttgtatggggaatggatgtgagtgagacctatacataataaccacatgatcggagctaaatggcttaagcagtttaatgctgccatggacgatgtttctgcagtaaaaactatgggtcatggtgaggtgtctcggtcgacgatggcaatggttgaggggaatcgtggtgtgttggggtcagggtcgatgatagtggaggaaacttcggctcaacgtgaggcagggataggttcatcaaaggttgttaatgggaatcctatagttgtgaaagatattttatcagctgctcagaataacaaaatatctaatgatatcaatgaggaggcttgtcttttggttcttgatacgaagaggagaagaacgactttggaagatattgatggggcccatgtgagg

SEQ ID NO: 147690 - DNA, 617 bp, Cannabis sativa
gataactaatcagattgtaaagggctttatttagggcacaaaacccaacactgtctccagaaccttttgtactctgaatgctaaatttcaatgaagtctctatttcattttttttttttaaaaatacaacccacaacaactcataaaaaatttaaaaaattggcataactttcaaataaaaagaattaacaaaattaatatacatatactatattttttaagtaatttgcttctaattcttaaaaaaaaatgaaataaattattaatgttctttatgtggtaaaaaataataaatagtctacaagggctatttctctataagttttgaaatacttctgatatggaaacaaagtgtcgaatcattatgctatgttgggcaatacggaaagcacacaacaatcaagtttggaataaaaaaagaatttctcctcaacaagtttcttcatcagcattagttactcttgatcaatggcgcaaagatcaagataaacaaaacttattgtcattggctcttggaaccaatggctctaaagattgagcaatggactaaaccccgatctaatacatcaagattaatgttgacgccgctctcttcgaaggagaaggctcctacgtct

SEQ ID NO: 147691 - DNA, 876 bp, Cannabis sativa
atatatatgtcatttgatatagaaattaagatcgacacaagaatggaacaaatatatggtcgtagagtaccattattatcacaaatgaaaatttatattactaatgtattatgtttatattaattaaaactttaaactttagtatgatcaatattgtatgtacacatgtatgaatgattcaataagtgggataaatattgatgttctaggaattcgtcatccataatttagaactccacgcatattgtagaagagttattgtaaatatgtggtcatagataatatacgtgatgttttaaaagggataacaataaccttatgaggtatattattaccaaaataatatgcatcagggggagacatattcatgctggacttttttttctcttagttaaggttttgtctcactggattttcttgacaagatttttaacgagggaacttacaaataattatgaatatgaaatatatattaattgcactctttttcccttagctcaagttttgtttcactgggatttcctgacaaggtttgtaatgagtcaactttaaatcatgctaacatacttgcactttatgaagcaagtagcaaatgtgagtaagattactgacataacatattccggaaacatatggattacactcaataaatcagtatcatcattgctcaactaaagctataataaaggagatcgaaccaaatacattttcactaagttcttcttacttcatgatcatcttcaagaaaatagttatattagtgttgaacatattcaatcaagttgcaatgatgtatgcttattcacaaagttattactaacatcaagtttttaaaagatgacatataagatcggaattcgttgattagaagatctc

SEQ ID NO: 147692 - DNA, 555 bp, Cannabis sativa
  modified_base (257)..(257): a, c, t, g, unknown or other
tggcctaaggtgaaagtcagcagggcggttaaggcaacattgaaatgtcgaggggggaggagtcagaatgattgagacattagttcagcatcttcatcaaagggacatgtggaatggaggaattgtatgcgagtatgcggttagcttgcgagctatatcttgaggggtattcctctaagagagaagtttttcccaagttgaagtgggggagcccattaattcatatgtttgaagaatcagggtacttgttcagtttnggtttgtgaatccagagggaaacactacaatagatgggttgttcagtgcgaagaattgcatgactgctgcaagctgcagatagacaatatgcaagggcgtaggctgggatcaagactgagcgagtttgcggcatgttatgggcatgttttgtgattatggggacactggtgttatatggaacactgtaagccgatttgttcagagagcatatgccgatgggagatagcggattgggatgacttcaagtcttaagagtaagattgggtgtcatcgagtttatcgaaaattagcgagtca

SEQ ID NO: 147693 - DNA, 513 bp, Cannabis sativa
ctacttaaaattaagcaaccaaacacatttttcactactctcctcacaatattttcagctttaaagcataaaaaataactctataccatggagttatcatattttaaaatactttgttaaaagaaattatttttataaaaataaataagatggtatagaaaaaaattacggtatttttcataatgcattatttttgtatctcgatcattcaaaactattgttattattgtatctcacttatttttatcaccgtatctcacccgttgtcatcattgtattgcatcccttatcattaccgtagttcacttgtcttcgtcactattgtatttcccaaatctatatcttaatctcagatttcatctcgaattttaaatattttataatatttttatgacattagaaacaaattcattagttcttttattattaactaatattttttgaaaaagtgattattattttttaaatatattaattaagaaaagaaaaaaatataaaaaatgtgatatttta

SEQ ID NO: 147694 - DNA, 539 bp, Cannabis sativa
atataacacaaaataaaatgtccaaatataacacaaaataaaatgactcttttagcaaacattaactttccaaatatatacatgtatatttaattttttaattttttttagttgaagggaaacttttttagtagatttataaataatgaaacttacaaaaatactggaatttaggttaacttttacaaaaatattattacatgcacggaaatttttttcaaaaatactgtgtttaaaacaacagtaaaacacaaaacataacaactaaaaacagcaatggaacaactaaaaaataaccgtagaacaacagtaaaaacttaacacagtaatacacagtataaaacttacacagtgtttttgaaaaaaaattcaccgccccacagtaaaaaagtaaaaaaattaaaaatttcagtatgtggtataaataatcttataaatataggggtgttgttgctatatttttaaacactacgcaagtatacgcaatcaagtagtaaatctcacacaggtgaggtcgatcccacagggaattggattaa

SEQ ID NO: 147695 - DNA, 770 bp, Cannabis sativa
taccaacactagtacggtagtggtattgagtgcattggtatagtgtacgatatgtaaagtgtacattacggtgttaccagcactagtacggacagttacggagtgtgtgtggtacaacacttagtggtactaggatacgaaacaaaccctaccaacactcgtacagtatcagtacgtagtgcatgtggtataatggtcgtacttaacattcttacttatctgttaagccttatagataggtgtatgagtgcctacatacaagtcggtattatattatttgttatatgcttttcttactaagtctgttgactcatagttgctacttccatgtgtaggtaaaagaaaggtaaaggctgaacaggagtgaactccaggcttggatggtggttgtacatgttgaggcaacgcgacctggagtgtttggtctcaagacatctgggatagtatttgtagtcactgttcgactagattataaatgtattttgataatatatgtaaaaaagtttaaatacgggatcttggcttatgtaaataaatatatgaaagtttataaagtttagcaattaaatcaaaagttttaatttgacacgattttcaaggaaaatcctttgattagcaaaggtggcacattaattggaaaatcactatagcgcgtctaagcattagggcattacagaatttcagttgagtacccatagctcgatgtaaactctccaagaatcttgatgtaaacttcagatccctatcagaaacaatggactttgggacac

SEQ ID NO: 147696 - DNA, 574 bp, Cannabis sativa
caaagacttgtggactaaggctcactaatgccccaaccacgtaaaaatcacttgcattaaactttcttcagcttttctcattctactatttaattgattgtcgaaaatttcggtcaacaatatgaaaagacaaaagattaaaaacaaagtcttaaccaaatctacatgtgcacgaattattgtattttgtaattttcttttatttaaagataattgtataaatatatattaatattatattaaatattatggttttttttaaaaaaaaaattattaatttgacggtttttttttttttttttttgttaaaattattagttgaaaactgttaaattaaattatttttattattttcttaaaaaaatatttttaaatatttaaattcaatttatttatttaaatataatttaaataattatttaaaaacatcaacaaaattaataatttttttttatataaatctttttttaattttgaattagacgttaattcaattaattaatcatactttatataacaattttatttgttttattgtttaaaatatctaaatttatttatttattttattgtt

SEQ ID NO: 147697 - DNA, 596 bp, Cannabis sativa
acatattaaaccattagcataaaatgatgaacgagaaatccctcaagacaatgaggaggatcttgggactcaattaggagaacagaggtcacctaccggaaatctctagcattcttcccaaacccatagagcaaggactcgtacagaccctaatggggatttatgacaaaccgctctcggggggaaagaacagagcgtgaagaaggaagtgtgacctcgaggcggtcaagtactcatagtcgatcaactcaaagagcagaaagtactcaacgatttaatgatcaagtatgtatgggaacaagtaaatccgtgaggcacttaaagacaatgtctatgagtaggacgcaatctgtgagtaagacaaggtctgccagaaattactcccaaccagatctacgatagcacttgaattggaagaaacctgaccttcgccaacagctttgtctaaagcaagaggatccaatccaattttagataaactagctggagctcaagttcatgagatatcaagtgggggaattagggaaaccatctggatatgactttgacaaggagcttgagctgtatcatctagatataattaataccccttttcc

SEQ ID NO: 147698 - DNA, 541 bp, Cannabis sativa
  modified_base (40)..(40): a, c, t, g, unknown or other
aaagtatattgtttggagcgctctctctctctctctctcnctctctctctctctctctaattcagaggatgtcactcgagaacgggctatggagtgccatgataatatacgttaactggatggactaactgattgtgttgaacaactgtctttgagaacacagtttctcaaaaacgaactactgcaggcgtcaactattatttctagaaaagatgctgagatgaggcgtgtcctcaacgagcatgacagacacgtgcatgtcctttgtgatcaatttaatagggatgtagagatgttaaagactgaaatccaaatatggtttcgtcaatatttagatgctagacattctgtctcgctaacatctcccatccttaataatcggggtactccatttgacaacacgtatgaagttcccatgttctctgaagataatagaatgaattatctatgtactttgttttttttttttgttaaaaaattatacatgcatcatgcatgtttttttttttttaatagttgtacgtagttgttgtactttgta

SEQ ID NO: 147699 - DNA, 1087 bp, Cannabis sativa
tggagaacataatgtctaagatcatgagttcaaatcccataacactcttcttttgataattaatttgtcttgggtccatatattttcagggccaaccttgatgatactcacacataagaaagtgctacgcactactagtatcatttagcatttgtgttgtagtatgagtgattttaatgactagttacaatacctatactttattttgtgacattgccgggaaaaactttataggtaaagaacagctggatttattaattactaagagaaaatatgactagtctccaaccatcttcacaattcctttccttgttgatttttttctttttcataatttattacataatttttaggaatatttacgctaaactgcacatattgtataattttatacattataattaacactagataaattagccggtgcggcgaattaaataaaaaataaaactttaatataataaaaaagaaaagaaagtttcattaatataaattaacttaaaaataataattttaaagtatacaaattttgaaataagatttttttttagtacaaaatcacattatctaattatatattattattgattattgatttagttttttcaataaaataaaataaaattatataccaaagaaatagaaaaactaataaaatcaattagttagtatcatactattctgccaccagactattctaattacataaatatatatattcaataaattaatttattgtatatatgattaaataacatttaacatgtatatttgaattttataatatattaattattaatatatatatacattttagatatttttgtgtaaatttaatttgaaaacctaattataaaaccattattcattgttgctaccacattacattatcatatatacaatgttattatcttttttacacaaaatcacaccaaacataatatttatcatgagtttccgtgagattatcaaaatcctgttataggttaaaaacaataaaaattagataatctcttaaccagggacggacacactaataagattagcccccactaaaaaaaagttagtgtaaaaaaaaattaaatat

SEQ ID NO: 147700 - DNA, 536 bp, Cannabis sativa
taaaacccaacacatacctagtgcagaaagctgtctttgggatatcctcctctcagattctcaattgatgatagcccgatcggagatcaatctttgaaaagaaaatttcccctgaagtttatcaaaaagatcgtcgatcctaggtaaaggatatttattcttgattgttagcttattcaatttttggtagttaatgcacattcgcaaagatccatccttcttcttaagaaacaatagtggagctccgcgaggtgacacactgggtcgggtaaaccctatgtcaagcaacccctagagttgaattttcaattctttaagttcaactggagccattctataggcggccttagaaaccggttctgctccaagtgccaagtcaataatgaaatcaatttctctttgagatggtaaactcggaagctcatcaggaaaaacataaagaaattcccgaaccaccttgatgtcttctggctgaacagagtcaggccgagtggtatccaataccacggccgaaaaccctagacatccctcttgta

SEQ ID NO: 147701 - DNA, 780 bp, Cannabis sativa
  modified_base (323)..(330): a, c, t, g, unknown or other
catacttgtgagtagatttaagttcctggtaaaatatatttccaacaccctagcattaactatgaatccaaaaaactttcccaaggagactccaaaggaacattttttcgagttcagcttcatgttatacttttttaatattttaaagcattccgcgaggtctaaagtatgatccttactctttatcaatttcaccaacatatcgtcgatgtaaacctccatgttttgccctatttgatttgcaaacatttcgtttactagtcgttgatacgttgccccaatgtttttcagtccgaatggcatgactttataacaatagagtnnnnnnnnggttacgaagcttgtatgttcttgttctgggacatacatttttctttggttatatccagaatatgcgtccataaaagacataagctcgtgcccagcagttgcatccactaactggtcaatcctgggaagtggaaaatagtcttttgggcacgcctgatccaaattagagaaatcaatacaagctgtccaagttccgttaggttttcggacaagaacaggattggctatccacgagggataaattatctcgcgtataaaatcgttgactaacagcttgtcaacttcttgttttagtgccccttgcttttcgaaatccaagggcctccttttttctctcatcgccgggtagtttggatcaacaattaagtgatggcagataatcttagggtcgatccctatcatatccccatgactccaggcaaattaatcttggttcgccttcaaaaagct

SEQ ID NO: 147702 - DNA, 551 bp, Cannabis sativa
gaaatgaatggcagcgttcttagaggcaactgactgacacttagttagctcctcaggaataagcataagccatcttcaaaccaatctgcacagagaaacaacattaaaatctgaactaagtgaagaaggagaaaaggaaactgtcaggaaagacttaccctcgtaaactccttcaggacacctcccatcaccagcaacagaaaaaggtcattgtcagctccagctagctgctcattcacctcagggaacgaccgagtcatgtagtgggtgagcatatctttgcctcaattagtctctggatgcagcattggaggtagggtaggggccctaatctgcttagatccgcttctgaccagctgagatctgcccttcgactgctctagtatgtctgagctccctcctcgagagtctttggacttagtcacttttggggcagaaggatctacgactgttggttccttggagagatcaataactgctttggccggtgccttctctctggacggagttgtctcaccgcccctggacctcttggccggaggggataagcc

SEQ ID NO: 147703 - DNA, 518 bp, Cannabis sativa
aggcataagctataactttgtcagcttgcatcagaacacatcccagaccctatctggatgcatcacagtaaacaacaaatttttcttgatctaacagcaaagctaacactggagttgttatcaaacattgcttcaactcttgaaaacttaattcacatttgtctgaccatacaaattgctgatttttcttagttaactcggttagtgccatagagatcttagagaatctcttgacgaaacgtcgataataccctgctaaactaagaaaacttcaaacttctgtcacatattttggcctcggccaattcttcactgatttaatcttactcggatcaaccataattccatcttttccgacaatatgtcccagaaaagatacctctgacaaccaaaattcacactttttaaactttgcatacaagttgtgatccctaagtgactgcaataccattcaaagatgatgctccttttctgattgagagtacacaaggatgtcatcgataaacactatgatgcag

SEQ ID NO: 147704 - DNA, 1317 bp, Cannabis sativa
caacctcggctctaagctcctcctgcttggctttcttctcttcttccaacctgcggaaaagagttcggagaacctccctttcttcttgaaatctggtcacttccttagataagggggcaatgtcagctttgagctgttcggtggatggcatggttgtagatccttggtcagttcggccaccttgttctcagcaacaagaagcttcttattgacttctcccagctctatccggacagccccaagttcaacccgggccttctcgacatcctttctggccaagtccacttccgttcgtattgtgttggaaatggcagcattcttagcagcaactgacttagctcgggaataagcgtaagccatcttcagaccggtttgtacagagaaagaatattaaaatttgaactatttgaagaaggacaaaaagaaactatcacgaagggcttacccttgaaagctccttcaggactcctcccatcaccagctccagagaaaggtcattgtctgccccagccagctgctcgttcacctcacggaccgaccgagtcacatagtgagtgagcatttcttttcatgttttagtctctgagtgtagtactgaaggtgggccaggggccttgatatgcttaaacccgcttctgatctgctcggagctacctgctcgagaatccttggacttagtcatttgtgagacgagagggtccacaatagtttgttactaagagagatcaatgactacttcagcttgcgccttctgccttctcttttctctttggacggacggggttgggggttgtcgttgtctcaccgcccttggacttcttggccagaggagataagcccgagcttcctcccagtctcttctttagggcctcaagcattttctaagacatgtctgtacgaaataaaagtaacatggtcagaaaaaagcataagaaatatgaaggcatgataattaagaaagttaaaaacaagatgaagtaccctacactttggcaggggcattcgcctgaacaagtactaatggggcatcgtcatcctacgagtcttcttgctcctctaggacggctttcccctttccttctatagagttggatggccgaggaggcagaccgggctccctgatctagattgtatgttcgacgggcctttgcccggtcgaaagtttcttcttccttttgagcgacctttcctggtcttcctcaaactcatcctcatgcttatcatagtcttgagcatgctgttcggctctagctcctcccttcaacttagcttcgcgcttaagttcaatgagctccttctcctgctcaaaatactact

SEQ ID NO: 147705 - DNA, 749 bp, Cannabis sativa
  modified_base (522)..(537): a, c, t, g, unknown or other
aatatatataaaccaatcttattaattttagaggtgtgctaccgtcaacctcatattacaatcttttagttaattttcacgttcaaaaatacatgctgaaatattttttttcaatttctttttcacggtggtgttcgttatatttacaacaccatccttgtaaatttttgaaaaatttcaaatagtttacagtgccgaaaatacatttgaagttttttgaacacgcgtggtaaactgaaatatcaggaattctattttcggcactgtaaactattcgaaattttttaaaatttacaggaatgatattgtaactataaagaatatcgctatgaaaaaaaaatttgaaaaaaaatattccggcatgtgatttcgaacgtgaaaattgactaaaaaattgtaataggaggttgtaattagtactcttcttaattttatctatttaaatttttactaacaaagaataaaagagaattgttaaaagccattaacagtgaagcaggctagcttagtggtgagggaggnnnnnnnnnnnnnnnnaggtcatgggttcgaacctaggaccttgaagctattaagctattaaatgattgtaaaaataccattacgctacactaaaaaaaaaaaaaaggccattaacagtgtctagcatttttttttgtgttaatattactattggttaaaataaatattaaatctcatctaatttggttatctgggcaccactgcttaatagctcgtaataaattcat

SEQ ID NO: 147706 - DNA, 767 bp, Cannabis sativa
ttgtggctgatgcactgagtagaaaaggtcccgggtaggttttcaccactgttttgatagctcctgaactagcttatgagatggttagtgcatgaattgagttagtagttggaaagtttcacaacttgacactccagtctgatttgctagaaagaattagaaaggcataattagaaaatctcgagctagtcaagattcgagatgaggtgatggcaggtcgacctaaagacttttcaatctcgaataatggaatattattgtataaagctcaagtttgtgttcctagtattgatgggctgaagaaagaaatccttgatgaagctcacaccacaccatgttcactgcatcaatgaactaccaaaatgtatcaggatttaaaaccctacttctagtggtatgggatgaaaagagatgtggtagattatgcgtctaaatgcttaacctatcagcaaatcaaagctgaacatcaaaggctggtagggttattgcaacctttggcccttcctaagtggaagtgggaggacattgcgatggattttgtaataggtttgcctagagccacatgaatgtatgattcagtatgggtcatagtggacagattcacaaaatcagctcactttctgccagtgaaagttacttacgcggtggatcaatatgctgagctatatgtaaaggagatagttcgtctccatgaagctcctaaatcaattgtttcagacagagattcaaagtttacatcaaagttttgggtgagtctacagaaggct

SEQ ID NO: 147707 - DNA, 709 bp, Cannabis sativa
ttcaagtaaagcatcaagccttttcttcttctcccggaacttagcaagagcctcttcaggcttgggatagaagtcaagtttgatactctggccatttgatttcccggccatatagacgccatcatcgaagcgcttgacgcaatgcttgcagacgacgggggtcaggagctcatctcttttagcctttttcaaggcctggtctctgaaatctcttagctccttcacctccacaatcaggttggctgttgactgcaagtctgcctgatgcaactcctctaaggacttcaccctggcagccatctcatccatagcttccctggcttcccgaagctcgcgttttgccctggctgcggcctcgccctctaccttcagtgcctcctggtgcctcgcctctgcctcagcctccctttgcttggcctcctctcggaactttgcctctgcaagggcctccctttgttgagcctcctcctggaacgcccaccttttggcagacaagtttcgcaggatcctcacggcctcatctatgcccccaaactcggacatgacgaagccatggtcgatcagggtcttggaaaggcggccgatctcggcagtaatctgaaaaaagaaacaagattgagatcagatgccttagacaaaacatcaaagtagggaataaattacaagtactcaccgcagccatggtagagctgatgtcttggacctggta

SEQ ID NO: 147708 - DNA, 622 bp, Cannabis sativa
ctcaaagcttgctcaacaatggcactttttgattcttggtgcaattattgtgtttgagctgtttaatatgttatatgttgatgctctggaatgttttgtggtgattgggacagatttgagtttgttatggaggcttaaaagttgagatttttcatgtttttctgcccagaaaaatggaattccagttgtttcagggctgttccaaccaaaattccaattggactgtatcggggaaggctgaattttgtttcggccataacttttgactcagaaatctgtttttgacgttatttatatcgctagaaagctcatttcgagctctatatgtttatctatattttgaatgccaattttatattatgtgaaagtggatttagggattaaccctatatttgtgaatcccggaaattgtgactaggattatcgacacttggccaggagcactcgggggtttggaatctccacgtttgcgggacatcaggagagacactagttgcacgtagagatatgcgcggtgaaacttatattgaatattatatttatgataaattataaaaccgagattagggttattaccctaaagtgagggatttaatgccatagggttattaccctagtaatt

SEQ ID NO: 147709 - DNA, 549 bp, Cannabis sativa
ggtttgataatgtggttgttgtatgaaattgagttgtgttacatgttgtataagattggattggacatgattgttgtatgatattaggttgctaacatggttgatgtataaaactagattacgaacttagctattgtaagagttgctaatatggttgttgtatgagattgggtagctgtaagaattgctaacaatatagcttatgagattgtgttgctataaggattgctaatatagttgttatatgatattcatgagttgctataagggctgctaacatagttgttatgagattgagttgttgtaagtgttgctaacgtagttgttgtattcgattgaaatgttgtaattattgttataacatagttgttatatgagattaggttgctaacaaagtttctatatgagagggttactaacatggttgctatatgagatttgctaatatcattggtgtatgagattgagttgttgtaattagtattgctaacattgttgatgtatgagattgagttgttataactgttgctaacatggttgttatatgag

SEQ ID NO: 147710 - DNA, 785 bp, Cannabis sativa
tatttatatttatatttttattgtttacaaaaaaatatcaacatataagtttcttaaaaactacaattttttcttttataagtgataaaaatataatttaaaaatattaaaaattatttttatcaaatgtatataaatttataatatagaaaaaaatttaaaaatatgtagaaaataaaatttttatataacatatgtttatatataaatttgtggttacctatggtgactgaatttgaaggttaataaagtttgattttcctttcaaaatatatatatgtggttataatgaattagattaaaatattattattattataatcgaatcttaacaactcgcagcacttaaaatttattttaatattaatatctaagtgtgtaattggatatccaattacaaaactgattcaatccaattagtaattaaattggaatgaattttaaggtctaataattggattagattgtatgatgatttttcgaatccaattactaattagattggatcagatggagagaaaaatattggattggatcggatgcccacccctaacctaatattgaattgaatttttctcttaaatgtaatatatgtgaacacttggagagatagaattgaaggcgaagataacaattttatctacatcttgtaacatatatgacacttagagtttgtttggcacaccgtattacaccttattgtattgtataatattatattaaattgtatttcatgcatatttttatgtaaaactataagtggtattaacttttatgggcaccta

SEQ ID NO: 147711 - DNA, 537 bp, Cannabis sativa
atcgagaagttagattcatactcagttcccaacctccaaggatgtagagaacgagatcatcatgtcacagtggttgcccagttgctgtaagagtgtcaacatactatttcatatttaaaagggaaatttgaaattgtatacttaataaataataaaattggactcctaatacaatagtagacataatttgtaaagtgggatacattttattaaaacccaattttacccccctcatttgaaaaatcactctctctctctctctcttcgtcccctattctctcaaaccgaacccattttttcgcccaaacgcacggaggagcagacccgagcaaagccctctccacctcgtacgaccgaagccccagccccctctccaccgcgcacgaccaaagctccagcccccctccaccgcgtacgagcgtccaaccatcctccaccgcgtacgaccaaaaccgaaatggccaaggtaagttcgaccgaccccttttttatttttgttattgttttgagtgattatgacttagagtattgatttta

SEQ ID NO: 147712 - DNA, 955 bp, Cannabis sativa
gcattctgttacttcacacaaagtaaaaaaaaaaaaaattatactaatggttacctcttttacatttcacaggtgcaaacatccaatcttgtcatatacacagtaaaagaatcgcaagactcctatattgtggatatccaaaaaagaacatgcacgtgtcaacgatttcagtatgatgaaatgccatgctctcatgcaatggatgtaatatcaaaaagacacatgaaatgctatggatattgctcatactactacacaaaagaagcatttcttgcaacatatgaaggttctgtgttaccaatagatgatccaaagacatgggacttgcctgataacatcaaacaactacaagtattaccaccaatatacaagagaccagcaggtaggccaaggaaacaaagatataagactgcactagataaagcaacacaaaataaatgtgcaagatgcttacaaaaaggacacaaccgaaggacttacaaaaatgatgtgatcgagccaaagagaaagagaaaaagagatattgaatagcccatccattattcttccatttatccaaatactataaaaataaaaataatactttcaaattgagaaactactaagtagttttactttccaatgttttcctacattttcaaatactatagaataaaaaacatgtcttctgtgaacactgcttttatgaatagttaaattcatttttgaagtctaaatttagtttttaatattttatatgattgatcactaatagaaaaactaacacgttccttaaattatatattcatacatttttatcatttaagcaaaaaaatgttagttttcaataattattctgctggtgtattttatttttaaatcatcatacacataaaaaacatatcaaaatatacattatccattattaaaaaatgattaaagtgtacctctaattcaaatatgttgcaagcgacta

SEQ ID NO: 147713 - DNA, 777 bp, Cannabis sativa
ttataatactacatattcataaattaataataaaatatattataaattctaaaatataaaaatgtgagggggctaaaatttcttttaggcattatatgggttggccaatgtttatgtcttttttcttattaataatatatatgaataaagcatattttaaatattttagttaaaaaaattaaatattagatgaatatttaaaaaataaaaatagataaataaatatattaatataattaaattatcaaagtattaaaattaaaaataaaataaaattagttgaatttaacacaaaaaaaaaaataaactaagtaaaataaataataaataataaaaatattaatatctaagagtggggacgttgctaatatataaaataaaatttgtggaccaatttactaaaaataaaatttgaggataaacttgccaaaacgtatatagtttgagatctaatttgtcaaaaaataaaattttaggactaacttgtcaaaatttatatagtttaagaactcacggtgcaaatataatagatcagtctcacattattacatttaataactataattaaatatcacttaaaaaagataagtatttatgaagatcactagtgcttaatagcaatagcaatgctttaaatatatgatgcataatttattcatttacactaatagttttaaaatgtcttggaccccctaaggtgcttttatatcgatttttataaatatatatttatatattttttttttttttgaagacaggttaaatttacacaataat

SEQ ID NO: 147714 - DNA, 975 bp, Cannabis sativa
  modified_base (947)..(949): a, c, t, g, unknown or other
tctaaatgctatgtttttgtcacagataagtttttgttgtgactaaaagtcatatttagtcacaacaaattgtaattgtcactaaaaagttgtcactaaaagtaacagtttttttgtagtgatatatagttactctattaattgttcaagataaacaaaaaaaaaaatgtgttttgatgatttttggaatcgaatatattctgaagctgtccttgttagcttgtgatggatatgatatttagtatttattatcatatacatttatttataccacatataatgtacaagagataatgtatgtatattgttagaatttgggatggatgagattataatgaatgagattctattttaaaactagttgacaatgggaggagtagtccattcatcttatatatgataattttttttacatattagcaatgtgagactaactctaatatactctcctcacgtttgggcctggaaagtgtgggtatatataacgaacgacctttaagagaccacaaggtcaaacgtaacatttgaaagaatcccaaaaggtcaaatattgggaaatttgtgggtgtacatgtcaggaaatttatagattttgaaacaggtcaaagaccctaacactgaaaattggcacacaatggaggttaaaggagagacagttgaagtatctttttggaccggcatggctcacaacggatcacaaacggctttttgaaccggtggcatttgggctcccaatggatcacaagtggctctaatactatgttagaatgcggaagtgtatgattaaggtagtagaataggtgagtgtatagtaaagtgcatgaggttctatctcaaaactaattgaccatggaaggagtagcccattcatgttatatatgacaatttttttttttaacattactaatgtaaaactaactctaatatctatatatatatatatggannnggtttcaatggttacatttttattgt

SEQ ID NO: 147715 - DNA, 639 bp, Cannabis sativa
  modified_base (595)..(599): a, c, t, g, unknown or other
taaatgcattgacggagaggaatgggactatatactctgcgaggtacatggggttatctgcgggaatcatactggtggtaattcccttgccttaaaaatcatgcggcaagggtattacttgcctacactgcggcaagacgcttttaaattcgcaaagaaatgcgacaagtgtcagcgaatagccacgtatgtcaaccaacctccgagtcacttgcattctatcaccagcccttggccctttgcgatctggagcatcgacctgataggagaattactgaaaggaaaaggcggagtcaaatatgttgtagtcgcggtcgaatactttacaaagtgggctgaagtaaaggcactagcaaccatcacagcagctaaactgcacgagtttgtctataactccataatctgtcatttggcatcccttacaagctcatttcagacaacggaaagcaattttattgtaaggaaatgcgacagttgtgcgacgagttagggattaaaaaagcgttctctgtagtcgcctacccgcagagcaacgggcagacagaagcagtcaacaagataatcaaacataccatcaaaggaaaactcaaagaannnnngggggtatggccagaagagctttcacaagttttatggtca

SEQ ID NO: 147716 - DNA, 597 bp, Cannabis sativa
tatggggtgaatttaagaagcgggtatgggggtgggggagcgatccccgcacccgccccatcccgtttacatccctaaaatacataagtgtttttaacatctctcatactctcattttcttttattaattctcaacttgacacaatgaatgtgatcacttatttatagtgttataagggacaaatttaaaaagattggatacagctaccttaactgtaaaaacagtttggttggttggagctaaaaaatgttttaactgacagtttaatggcaccgtttggcttagcttttatattttttttttttaatttttagaattaaaaaagtccttctaaatgtagttagaaaaaaaatgaaaagttgttttcaaaaagttaagatttgtaatttctaataacaggacttttgaaaagctatttttaaaattaaaataatttacaaaatctcttacttataagaatttttttaatgatatacaaatacttgctaggtaaaaacttaaccaaataaaatctagttcaagacgtcaaacctaaaaaaataagggttgagatgcaaaatgactttaaatttggtaactaagttagtaaatgtcca

SEQ ID NO: 147717 - DNA, 1210 bp, Cannabis sativa
  modified_base (91)..(104): a, c, t, g, unknown or other
ggtcagtactaccaacggttgacttcccctcagtagaagcctagccggactgggttcagtgatttcgttaggaggatagtgactccggtannnnnnnnnnnnnntgagtacgtactatgtgtcacgggacccataaacaccgccaatgacagtgtgagcactaccaacggttgagtgccgctcactgaacactagcccgactaggttcagtgagttcgttaggaggatagtgactccggtacaccaaagggaacctgggtacttactatgtgtcacgggacccataaacaccgccagtgacagtgtgattactaccaacggctgactgccactcagtagaaccgtagctggactgggtttagtgagttcgttaggaggatagttactctggtacaccataggtaagatttctacatactatgtgtcacgggacccataaacactgccagtgacagtgtgagtactaccaacggttgagtgctgttcactgaaccctagcccgactaggtttagtgagttcgttaggaggataatgactccggtacaccaatggtaacctgagtacttactatgtgtcacgagacccataaacactgccagtgagagggtcagtactaccaacggttgagtgccgctcagtagaaccctagcttgacggggttcagtgagttcgttacgaggatagtgacttcggcacaccaaaggtaacatgagtacttactatgtgtcacaggacccataaacaccgccagtgacagtgtgagtactaccaacggttgagtgccactcactgaacactagcctgacagggttcagtgagttttttaggaggagagtgactccggtacaccaaaggtaacctgagtatttactatgtgtcacgggacacataaacactgcaaatgagagtgtgcatactaccaacggttgactgccactgagtagaaacctagctggactgggttcagtgagttcgttaggaggatagtgactccagtacaccaaacgtaagctgagtacatactatgtgtcacaggacccataaacaccgccagcgacagtgtgagtactaccaacggttgagtgctgcttagtagaaccctagcccaacagggttcagtgagttcgtttggaggatagtgactccggtacaccaaaggtaacttgagtacgtactatgtgtcacgggacccataaacaccgccagtga

SEQ ID NO: 147718 - DNA, 655 bp, Cannabis sativa
  modified_base (36)..(44): a, c, t, g, unknown or other
taggatgttactgaaacatacttggtagtaaatctnnnnnnnnntaaaatatttccaacagatataagcttaatataaccttcacctactccattaaatatagtatgtaagactttgttattataagcaaacaatttagcatctttagtagaccatttaagttcagattttaatttagaattaccttcagaatctaccacaacaagaggagaccatcctgaaagaaccatcctccatgctttctcatcttgagacttgataaaagccctcattctaacattccaataaggatagttagaatcgttgacaagtggtgggcgaataatggaacttccttctacaaagggaactatattacaaaaacacaagaaaacgataaaaggattacactaagagtttagtgtcgcgctctgataccaaatgaaaaaccgagtttttgtgaataaatactaaattttagtaaaaacactgctgtaacagtctgcagcaacataatgttattatgtcattgcagaacacaattttacagaaacaaaccagaaataaatatcgtagaatttaaaaatttgacacaagaaaattatacgtggtatcagtgttcttttaaacactactagtccacgaggccacgcccagataataaaatcaattagta

SEQ ID NO: 147719 - DNA, 664 bp, Cannabis sativa
atctaacacttgtctatctttcaatcttagctgattggtaactttgaaatcttcaaacaacacaaccttacgagctaatgtggatgatgaaattttacaatttaatgatggatttgttgttttacattttttttatgatcatagggtgaagttcattctctaacataagtgctttcaatgcttaaacttcttctttgagataactcaaagatgccaattcatattttagatcatttatctcattctccatttattttttgttttcatctacaaaagtaagataaaaaaattaagataataaaaaaaataaagaataaactttcaacaaatgtgaataataatttacatagaatacttgtataatactttggttgagtcttcaaacttggatacaaaatgttaagaagttttttgagaatacataagtgagtcacaaccaagtgttataatataaaaagaagtatgatgtaaagggaatgaaaaagaatctaggaatgcatctttattagtctaatttttaatttattaaataaattttaaatataggtccatgttagcaggtcactctattacaaatatatatcatccttaaccaaaaatcatccctatttcacataaattacaaatatatcaaacccttaagcttttgttttcttctctcagc

SEQ ID NO: 147720 - DNA, 960 bp, Cannabis sativa
tcctggtaaaataaattccaaaaatttctgagggcaaacatcattttttgcgagacgcagcctggcctgaacccacaatatattagcttctattccactggtgagaccactatttttacccgaagtcactgttgcttttgagctaggtaaccttgagtttgacattatgtctcctaagcctcgcaaattaaagaccccacaggatcccagtgtcactttcgaggctgagctcatcgaatccaaggttaggtcgatcggggcctacgttggtggcatcttgaagtcatgtggcatcaagcagaggaaaggttgtgtcataaggtccgtggcccatagggaatttagctgttttccttcagaaagggtaatacgcgaggatcgtagtgggcctagcacgagtaattcctcgggcattggagcttggagcctcgagcacatcaaggctggggcggtcattccccttagggattactttaaggagtactgtaattaccttagggttgtcccatttcagctgaaccccatcttgtataggatccttgcaagcttgaaagtcctataccatattttaggatgggagtgccccactccttttgagatagcctgcttttactcaatcaaagcagtccctgcgaggaagaatgttgcatgaggcttctactaccttgggacttatattggtgatcgcaagatcatagttaggttgctaaacaagaaagagcttaaagatgacttcttctggacgacgggcctctctcccataaatacaaccgcctttcacattatatgtaagttcttttccttagaaacttaactttaaaatgtattaatttgtatctttaaagtcgcttactaaactttcacatgcttgcactggttcttcgtgttgggttttgtgccctaaataaaaccctttacaatctaattagttatcaatataagaaatttgaagtgatttat

SEQ ID NO: 147721 - DNA, 518 bp, Cannabis sativa
  modified_base (477)..(488): a, c, t, g, unknown or other
aaattatattaatttattaatacatgatattttattagaataataagactctttaaatatatattttatatgtgcttttagtgagatgagactattgtgaatattaaatttttaaatatatattttatttgtaccaaagttaatattatttatttttatatattttggtactatttaatatttttcaaatatttaaatctaaaaaaattcttaagtttttaacaaataaaaataatatatatttttagaatttttattttacattattaattttgttgaatctatctttattttcttatttttttacatttttgtatgcttttggtaatatgagactagagagtcatttcacaaaaagttttacatggtttagaaactattgtgggtaatataatttaacattaaatagatcaatattcttttatttatatttgtcacaaagttaggataatttattttcgggtaaataccattttnnnnnnnnnnnnttgcaaaagttacagattggaccctgtgtt

SEQ ID NO: 147722 - DNA, 505 bp, Cannabis sativa
  modified_base (416)..(417): a, c, t, g, unknown or other
cacacttgacctttcccaggcgatatgagattgcacagcttactcggtatttctccttacagatcatgggactactgtctgtcacatatttgattgatacagtaaataatctataagaggtattcaattttctttttcttcttttgttaaatcaataatgatataaattataaaaagtaaatgaactaaaatatattcaattaaataacaaactctataaatttttgataaaaagtatgttatattaatataaatataattagtaatgttttattttttaaataaataataataaatgaagagtgtaaaaaataatatatatatatacatatatataacagtgtttgtataaaaaatgaatgaattatgtgtaattataaagtaagaataaaactgttgtcgagcaaaattcgcannaccaaatgtatgtaatattattaatgacaagaagaaaattgcttgaagaacaattgcaagtattcaacctagaacggcgagtactcga

SEQ ID NO: 147723 - DNA, 729 bp, Cannabis sativa
  modified_base (530)..(542): a, c, t, g, unknown or other
aaccgctcttccgatcttcccatatagtttaatataatagcttttagggagtatcgctagccaattacaacaaaacatgtcgagaaggtgctaggcaccactggtgcctaataacaatactcaaaaacaaataataattaatcctaactaactcaacaaaatataattgattaacaataaaatagttaatttgtttctattaaaatctataatttactgggtaacttttctccaaagcaattatctcaaccttcattttcctattcataatcatccctgtaaattctctattggggcggagcaaggcattcctgagcaattaattatcatgagaggactcatttatctaaaaataaataaaaaaacaaattacataaaaaaaatataaaaattacttaatatattattttttttaatttttttttaaaaaaatgacaatttgggttgctcttgtggtttctccagtaatttttatgtaaattttagttgcgatttaagttgttgtgggatttctatgtaaaattccgtannnnnnnnnnnnnaaaaaaaaaaactattttgaagtgaaaataaaaatataggacttttttatttttacactttaatttttttttttttttttatattcttatggaattccacatagaaaccaccatagcaactaacggagcaacataaatcgtaactaaaatctatatagattttaattgcgatttaaattgctccgtt

SEQ ID NO: 147724 - DNA, 550 bp, Cannabis sativa
aattaatatttaagttgattttgttcaagacatttaaatatttgatatggagattatttcaagagtggttcggttcggctcaacgacgtcctccatttcaaatttttgttttcatttattaatttaattccaattaatgtttttatgctgtgatcgtgtttatgtgttgaaactaatttagtttttccattagtcttgtcttttgacatggttcttgagtctcgtcttttgacatggttttttaagtcttttccttttaatttttttggttcgagtcttgtcttttggcaggttgtgtagctcagaatcatcatagtgctatggtagaagcattcaagaagggaaagattggatgtattcaactcaaaattgctgatataataggcattaaagaagtattgagttggattgcaactcattcgtgggatagagtaaggttggaaagagatagcttggtgtgtgtccaagcgattcagagcgatattttatgccttcacaatttgtgttttgtcaaacgatctacaagtaagttggctcattgcttggcaag

SEQ ID NO: 147725 - DNA, 732 bp, Cannabis sativa
taatataatttgagttttatggagatatttttgtattttttatagaattaaaaattaaaaaaataagagaattaaggagagaagagaaaaatagctttaaagtaaatttagggtgccacatcaccgcctaatacttctcctttatatatatactaggaaacaaaccgcgcttcgcgtgcggttgtattttatttagtgataattaaatcatcaaactatattatatttttaattttaatatttttgatatattttttaaaaaataatatgagaactattttactaaacttttaattttttttacttagaaaaatattttttttacacaacttagaaaaataaattaatattatagaaacttcatcatacaatatattatttaaaaaatgaaaaaaaaaaaaaaaacagttatcttcaaatattgtagtaaacatatattagaagttgaagaatcctaacataaataaaacataaaaaaaataatatatttaaaaattttcctttattcaattaatgatgatgtacatagattctaaaagaaaattatataccactaaaataaattgagccaaagagagaaacatgtcagtaaatgactaaaaatataatagagtaataattagggttaactaattagtttagggaaattctataatgcaccctcttaaaagggatacatcgatacatctctatctatttttgtatccgaaagaattttttagttaaattttt

SEQ ID NO: 147726 - DNA, 522 bp, Cannabis sativa
tttttgttccaattaatattttactgttgtaatagaaattgataccaatagaagttcttggacatagtatcatagtacgttatttgagtgggagaattttaattctagtcccatcttcatttggatgacacttgtgataggaactatagaattcaactgagaaagtaaatctaaccatttatatggatagaaataacttatcagaattttgagaataagatagttgaattttgcatagtctattcgaatgacttaggcaaaaattcctaatcctcatgaatttttttttttggtatctctaatgattacttaatctttaagcaagtattttacattaaagtaaatactagattgctatgttgatagcttagtctagaaggatcttacagtttcagattaaggtaatatgtcacaacaagatatccctaaagaacaatacttgcttaagattaagtaatcattagagattacttaacctcttacattatatcaagacaatagattgattgaaatgcactactt

SEQ ID NO: 147727 - DNA, 536 bp, Cannabis sativa
  modified_base (40)..(56): a, c, t, g, unknown or other
taagtcttattaataaataaattaaatagaaattttattnnnnnnnnnnnnnnnnntattaaataaatagttttgaaatttaaaggattgaaattggaaaatataatatttgtgaaggaaaatgataaatagttgtataaaatggcaaaattgtaattagtgagatacatatcctatggctggccgcttaaggtgtttttagccatatatttatctattttttaattctatataatttaaacctaaacctaaaaggattcctataaatagatagtgatatactcaaaactgacaactgataacataagcctttcagttaaatttgagccttctctctctttctctctctctctctctatatatatattttgaatccttctctctatctttctctttaattttcgagtctcatagtgatagagtacatgttcacacataacaagtcaagcactcaatcatagtgtgtaagactgtgaaacttgaaggagaatcaggctcatatcttgataatactttgcgatagaaaggaacaaagg

SEQ ID NO: 147728 - DNA, 623 bp, Cannabis sativa
aactaagcggtctttacaactagaccaaacacctgctgtttagtgggagttatgagtaggtataagtttaatctaagaaagaaacattgaaagataatcaagtaaaatttaagatcaaaagatgaactatatgttagtcgataagggttgtattttaatactcttagactacaccaaatcaagtttctagacttgcggtaatgctagaaagtctactaatgagatggtgattactttaggggtggagtagtgatttttagagaagtgtaaaaactaatttgaagtctctaactccacaagtgagattgaatgttaaagtggccaagaaggctatttattcagcctatagaaagttttatatagtttttggcattattccagtaacgaattaactactattgttacttcatgactaacacatatatagttgctgaatagtaaagaattccacaatatcaaggattttgtgactaaagggatgtaatggtggggaaagtttgcattgaatacaacccatcaaatcccatcacagagataatactacgtactacacttgatctgaatatcaaggtgttgagattaattgaaatgcacttttagttttatattagtgcaaatgggag

SEQ ID NO: 147729 - DNA, 527 bp, Cannabis sativa
  modified_base (327)..(327): a, c, t, g, unknown or other
tggaggagtttagcaagacttcaggtttgtccattaattttgggaaatctcaaatcttttttggtagagtttctgatcagaatacaatagctcaaaagatcaatttgtctgtaggcgagtttcctctcaaatatttagggatcccgcttaggccaactaaatggaggcttaaagattgtggctctatcttgaagaaaatgaagagtaggcttcattcttgggccaataagcacctttcttatgttggctgtatccaattgattcaatctaccttgattggtttaagtaattattggatgagaattttccttttaccccaaagtgtgntaaaagagattgagaagttatgtaggggttttctttggggactgaaagaaaatcgcactagaatccatttgacgagttgggagagggtttgtcttcctaaatcttgggggtcttgggtttaaagatggttctaaatggaataaagcttctcttgctagattcatttgggacttaatgtgtaatgaccgctctattaattt

SEQ ID NO: 147730 - DNA, 542 bp, Cannabis sativa
ggcccctggactaggtgggccctaggcacaggcctagcccgcctatgcccagggccggccctggctatagtttggaatcataattttttatttttctcttgatgtattatacatattgattttttttactaaaatgatccttgttaaataaaaatgtacctcacactaaaataatgataggaatatttttttttattattatatatttggagtgggcgattcgagcttagtactttcattttatgaaaaaaaataaaaaaactattaaattatatttatgaccacaataaaaataacgcttgattaataagactatctccaatgaaagatgtaaaagttgagccatattttgtaaaaaaaaagaaagaaaaatagttttgtgatatttttacatcaatattattttttacaattgtgctctaatacataatagtaaatcttgatgtaaaatttaatatgctatttaatcacttaataatttattaaaaaatataaaataataataatacaaaattaattgtaaaatttaataaaataataat

SEQ ID NO: 147731 - DNA, 616 bp, Cannabis sativa
acatgctctaaaccttaagccgcatgaaacgaacgatgaagatgaacatacctccatcgttcaaatcagcaacacaaccagaataaaaccaaaacgagggtaatgcaactattaattccggcgaaagtcaacttgaaaagaagacttgcaatgatctaaatagaaaattacgaagaaaaaaaactagaaaaactgagagaaaactgaaattacacatttgttttcagttttagtcgttcaaaacaactccctctaatatcgaaatctagattcatgcaatgtagatctgtaacaaaaaagatatggagctcccctcaaattcaaaacaaggtatgatgtgaaattttttaaaaaaacctcatgaataatacatctacgttatatacagttgcattttggttgattgctggtttagaatgtggaattcatttttttaaaagcacaataagaagagcaaattcgaattaaaggacaacatgttacgtataagttcgtttattatttgttgtggttgccttatagttgcattatcgttttataataatttatatattatgcaggaatttcagttgacgagtaccaacaaataactgttatacatggtaagttttatgca

SEQ ID NO: 147732 - DNA, 1272 bp, Cannabis sativa
  modified_base (936)..(939): a, c, t, g, unknown or other
aaatctaaaatgtttgagaagttttagaaatttcatgctttggttcaaaaccaatcaagtaaaacattaaagatcttgcaaactgataggggtggagagtatatggataggaagttgaaagatcatttgaacttggaattgaatcgtaatatactgcccctgatactccacaacaaatggagttgtagagagaagaaatcacaaacttttagaaatggttaggtctatgctaagctatttaactctttcaacgtccttctaaggatatgctattcagatggccaatgatattttaaatgttgttccatctaaatcagtccccaagacacttgtagaactatggaatggccgtatatctagtttatgatttatgctattatagaatatgggagtgccctgttcatgtcttaagaaagaaagaaggcaaactagaagtgcaatttgagttttgcatgtttgttaaaaattctaaagatactaggggtggactattttattgtcacaaggataataaaatgtttctttctacaaagtaaagtaaagtagtattgaaggaaattctttcaaatataactccagctattgttccatcttcttctactcaagtagaggatgatcccactccctcggttgaaccaatgcaagttgatacaaccgagaaatctaccactgatgttccagttcagaaggccatgacttctcgtcatagtgggagggtttccacaaaactagctcgttatgccttggatggtgaaataaatatggtcattgttgatggtattgatgatgatccattaacctataaacatgcaatggcaagtcgagaaaggaaacaattgtcaactaccattgattcagagatggattccatgaaaagaaataaagtctggaaatatgtagatgcacatgaggattatcatccaattggatgtaaannnntctacaagaagaaaagaggtgctggtggagaagtcaatacttttaaagctagatttattgtaaagagttatactaaaagagaaggtgtggactatgaggatacttttagtttgttcgccattctcaaatccatcagaatacttctctccatagatgttgctttcgattatgaaatttggaaaatggatgtcaagacaacatttcttaacggaattcttgacgagacaatctatatggagcaaccagaaatttataagcttcctcgacaagaagagaaagtttgcaagctaaatagcgttgggttttatgcaataaataaaactcatttcaata

SEQ ID NO: 147733 - DNA, 1173 bp, Cannabis sativa
ttcaatctcttccgtgccaatgatactaggttcttcaagaaactgaataggaatcagatttgctctatcatttacattgctgctcgcaagtggagctaatgcatcatcagtcgtgttttcttcccttggaatttgcctgagagcatagcttttaaactgtgcgagcaaatcgtgtattttactcaaatacgctatcatcttttcccctcgagcctcatattctccggatacattatttaccaccagatgtgaatcactgcagatctcaatgtgctcgaccttcatttcccaggctagttttagaccggtgatcagggcttcatattcgacctcattattggatgccttaaatccaaatttgactgcagcgtgcaggtgttgcccccaggtgtgacaagggcgatccctgctccggatagttgatctatagccgacacgtccacgtgtagcttccaagtcggcttgtcttcacttttactaggttgaggtatttatactggctcggggttgttttctgataaactctcttctttacctatgcattcaaatacaaaatccgctaaggcttgacctttaatcgctgttcggggtcgaaaaataatctcatactgacccaactccaccgcccacttgagcaaccatccataggcatctggtttttgcagtatttggcataacatttggttagtgtatacccgaataggatgagcttgaaagtagggccttaactttcttgttgctaggatcaagcagtaagtgagcttttctatcaatggatatcggctttcagcctcaatgagtcttctactgatgtaatagaccgggtgttggatattattttcctctctgatcagtacgacacttacaacatgttccgtgacagccaggtatatcccaatgtcttctccgtccagaggttttgagagcataggaggttttgcgagttgcaattttagctcctgaaaagctttttcacattcctttgtccactcaaattgcttatttcctcgcagaatgttgaagaacggaacacacttgtctgttgattttgaaacaaatctgttgagtgcggaaattcgtccagtcaaactttgaacttccttggttcttgttggcgatttcatatccaggagggcttgaatcttctccaaattggcttcaattcctcgggca

SEQ ID NO: 147734 - DNA, 836 bp, Cannabis sativa
tccatgagaagctgagaagcttccatcctattcttggctacttcaaaaatttctcgaatgccatagagataagaagccaaatattgtagttgctgaccaagatgtggccatgaaaaaggccattatggaacacatgccaaatgttacacgtcgtctatgctcttggcatctcaatacaaatgcttccaaaaaggttaaagatccgatcttcttaaaaacatttaaagatctgatgtacaacttttacgccgaggaagaatttaaagcaaaatggttagatgtcatcgaaaggctacaactaacagataatgaatggtgccaaacaacatttgatacaagaaaacagtgggcacaaacttatttaaggggttcattcgttacaggaatgagaaccacacaacgttgcgaatcgatcaactccgctctaaacaaaattttagagaagaattattgcttgcgtgaatttgtaacaaccatagatatgatagtctcaaagcttagacacaatgagactgcaaatgacttcaaaagcaaatgcacttgacctcacccacctaatcctacatgcttgaccacgtactataactaatgtgttgaattctacacaagaaatatgtaccataaggttgctgagcagcttgatttagagaataattattttgtcctaggtcaggaggaggaatgagagtggcatatattcaccattggaaagtttcaacatcccgaagtccattacaaagttcattactgtgaaggccaacgagcactacactgtagctgcatgctatatgaaagtcaagggtacccttgtagacatttatgggctacaatgaaaa

SEQ ID NO: 147735 - DNA, 1020 bp, Cannabis sativa
tcctgtggtcggagaagaaggtctcgcatgacgatgatggctcgtggttggagaagaacgttcagccgccacctttttctctctccctgactctacttccataattttagggttttttatttttattttgtacataatttatttttttctctaaaattacttagaacttagttaatgtttcagattaattattttttattttgtattaattgttttatttcagatttaattataagtttattaaattaatttttatgtaaataattttttttaaagaaaacttaatttttactttaatgattaatattatgtggcgatttagtaagatgacttgacattattttaaatgatgtgtcatgtcatctggtgtccagtgtgcaagataacagcaaggtacctacagaatgtctgaaagtgtaacgggtggtatttatgctaccaaaatattaacttaggtattaaattgtaattggaagataaacttaggtatttatgctgtaaattattcttttcagaaataatgaagaaagaagagaaaagagttatctaacattgaaaacttaggttaattctctcttctcatcactttctttatataggcttcacttagggctaggttagatgagattgagcttaaaattgagacttggattgaagtataactctagggctgaattgcttattgggctttggaattagatttttgccactttatttcatttaaatgaaacaatgtgtttttttctattttaccacttatctcttctaattatttaagtacaaattttattttaataattatcaaataaaatacaatttaaatatatttattaattagacccacaaagtgtactaattaaaaaataaatctctaattctcttttcttctcaaaatcgcccaaacttgtgaaaattctcaaataagatatagtctatttttgaattctaattgacttattaaattaattagttgagtctacaagatgatattatcatagacaatatggggaccatgggcct

SEQ ID NO: 147736 - DNA, 908 bp, Cannabis sativa
tcgaatctcgatggttcctggttccgcgagctcctgcaccatcctctcgatgtctgcagaggacatcggacccaattctgtgtctccggcagttgcgacctcttcttctgagatcgaggtcagaatgaagttgtcttcctagtcgccttcaaacacattgcctcctgagccaagcatttggctatccgatagatcgtgcatctgaaagatagaagatcttttcagcatggtgaacgtgcaaaaacaaaataagtgacctcacccgcatataaaatataaaatcttcttgagaggatgatctgaattcttgcaaaaaccaatcgtcccaccaagatgcgaaaagctaggtgtgcgagtagaaagatatttcaaaaaacggctggatacacccaccgttttcgaggaacctagctaatcacaacctgcaaatatgtcacgcgtccccagctggcgatgtacctcaaaaaatggctgggagaaactcagtgactcaaggggcatgtgtttccgagcatgaccctgaagttactgagatactcccaccgtttcgagcaaatatgccagccaaagaatacgcttatgccggaacactagcgtatgctgcaaatggctgggcgtatcatagtacttcaaggaacatacgatcgcacgtatgagcattggaatactgtgacacgcccaccatttgaaaggtttaaccagtgttctcgcaacgaaaacatacagagtgcaaaaatcctaaggctttaaacaacgactagaagtgataaagtctctgtgaaacctaggacgagcagacatgcgagtattctaggtgttcatccaaatacccgcgtgtattcaaaatataaagatgcgattattcaaacattcttaattatctgattttttattttgatattcttttt

SEQ ID NO: 147737 - DNA, 559 bp, Cannabis sativa
gtttagttgaattattaagtaaaaaaaaaagaaaaagactattcttttatggtaaatttgtaaaaagagaaaaaaaaatgtgctattttcatgttgtttgtaactattgttatctgtttttcccttttgacttttgactcttgagcatgtgaaattgattctatatgggaaagtgatttttcactttttggttttgttaagagaaatttactgtataaatacttaagtttaattttcggttataaataaatacttaagtttaattttggcggtaataatactatttctattaaaatgattgttagtgcttgaaaactactttatctctcaacgtgtccaatagaaaagtgatgtacaactgtcttggcttcgtccttgtgaaatttcacgatttttcaagatgtatagggtgagattttaacagatcagtaacgactgtaagagtatgaaaaaaacttgttaaaatttttcctaaaaagaagaatatttttaatttttgaattaggtggccattttaaccaaattaaatgcgaattcaatcttcatattcacatcttag

SEQ ID NO: 147738 - DNA, 709 bp, Cannabis sativa
taattagaaaatttgaaatgagtttaaatgagttttatttagggaacaaaacccaacactctacgtctgtgcttttacaaatttattaataactaatctattagttcagggaaagtgtggtttaattaaaacgtttcattaaaatttaacataaaactttcatacaaaatactgtcataatacaatgatcccctgtttataaaattattttacaactagttataaaaccgctattacattattacgaaagtaggttacattttcaatcatagaaaaagattgatcctacttctcagaagcaaagacaccatggcagatatgtacactgctgcagagacctcaaactcatggctgcccaatttttcctttccctttacctgcaccattcagcacttgtgagtcacagagactcagcaagaaaaattattaaatccataaacattattaaattcaattaatcttattataatagaataatcgtaaatataacacatcacatactaatatacttatacaatttcatacttgtaatcacaccatctcggtaattcattaagcacctttaccactcgttaaccacgagctgcgtatgtcactatcgttgcccaaaaaagaaaacgataagtaagaaacctatccgtggtttcaagagtaattactcataacggtaataaccgtttcttttactcgatcataatcgagccacaac

SEQ ID NO: 147739 - DNA, 1092 bp, Cannabis sativa
ccagactcggacacagacttggacacagacccacactcggattttgtgtttgggttcaagtttgggtcggggtctgggtcgcgaactgagtccttatctgagtctgtgtccgggtttgggtcaaggtctggatcccagtcttagtctgggttcgggtctgagttcgagttagggtcccaggtgcctgtccaagtttgggtttgggtcaagatgttcgtccagatctaggtcttgagttttgatcccggtcttggtctaggtcatatcttgatccatttctaagtgtgagtttatgtcgtcgatcgggttccaaatttaggtctaggtccgagttgggtgttaagtttgcgtttgggtcctggtccggcagttcttattcatgttccagtatcgtgtctaggtctgggtccgggttcgggacctgtccaggttcgggtcctagtccgggttcgggtcctagtctaagtcttagatctaaaaaatgactacgggtttgttccaagcccctttcctggatcccaattcaagatctggatccctatcaggggtctcggttccatgtttgggtaaggaactgggtctatggcccagttcgggtctaggtctgagttggactccaagttctggtcgagttacggtttcgggtctatgtcctggtccagttacagttccaggactaagtcctggtagtggtcctgttgccgggtcccggtctactcccaatttttgttccaatttcaggtcaaaaggtacgggttcgggtctaggtttgggtctgggactaggttcaggtctgggtctgggttcgggtccttgtttgagttcaggtccgaggctgggtccctgatctagacaccgactacgagtttggtccaaacccttggtccagatctggatccttatctcgagtcctggtctatttccatttcaggtgctggttcatgagctgggtcctcggttcatgtttttgtttaggatcgggtactaggtcccggtccaagtttcgttgccaaggtatttatctcgattctcggtccaagtcccgatgctggtctgggtttgggtcccagtctaggtttgggttcgagtcct

SEQ ID NO: 147740 - DNA, 565 bp, Cannabis sativa
cataaattacagtgctggtggaaacttggcccaaacttttgttcatggaaaaaaatctccctcaattataagaaacattgaatatgtcctttttctattgcgtttctttctttttaaaagggcccaccgtaaattaagatttttctactcgaattttgacatgtactagatcgtgttttatgaattttttatgtcgttaaaaattattcttgaattagtgagattgttaaattcaaagacttttatccaactttgttcaactttactaacgagtgtatgatgtggatggaagtttgggagcaaagttggtacatgtataatcctaggggtgttcatccgatccaatccgtatttttttggtcaaacaacatccaatccccactaagtgcggattttatattttggatccaatgcgatctgcataacagtttaaatccaatccaatccgcaatagtgcagattggatcttgattgttttttttaatgataaattatttaatatttcatagaaaaaaaattaaaaaaagactattgttttttaatctccaataataatctatttcca

SEQ ID NO: 147741 - DNA, 518 bp, Cannabis sativa
gacattttgtgatgaaattatatgattttaaatgatatgtgttggctgaataaaggagttaaatatttcatttatcttttattttcaaagttagaaaaaagtcaagaaaatcaaaccatttcctatctagtctctctctctctctctttcggcctcattgtgtagcaagggttcttggatttttccttgtgatttcaactctttttggtgctctaatcaagctaggttagcttctaatcatttcttcttttagtttgttgaaaattatgaatagataagtattgcatgtatggtttttgatgttgttgctgctgttagttgttgttgttgtttctatgattaaaatgcttgaattggttggattagataggttgaaatgcatgctagttacccttgttttagtttgagaatgtttggttcaaaagcttttctttttcaaagagaaaaggtgaaaatagttgctgtaaagttttgttgtgtttgagaattgtttttgcagcttttttatgcatgaatat

SEQ ID NO: 147742 - DNA, 788 bp, Cannabis sativa
gagccactacctcccctactaaaacctgatgtaggaggagtaggagccccaccaacaacaggagtccctcgagactctatgctgcactccactgcgccctcagctcgcagtgccatacccaccatatcagcataggtggtgttgtgatcagtagtaatcattaagtcgtgtcttatctttgcattcaacccgtccatgtatttctctttcttgctaatattagttggcacaattcttgaggccaatcttgccaaacggtcaaattgagtcgtgtattcagtaacactcatgttttccttctaagtcagctgagtgaattcttttctttttgcgcttttgactgcctctttataatacttttcattgaacagttcctggaacttttcccaggtcattgtaggaacataattagttagggacaccatgtcccaccataccagagcgtcttcttggaattggaatgtagcacaggccactctatcatttgtcggtgacggcccaaaattcaaaattctagtaatcacagttagccattgcttgactttcatgacattgggacctcccaagaaaactggaggtgccatgcttacagaacctttcatacaggggttccattcggttcactacaactacaggtcctgccttcatagcaggggtaggagctattggtatttctagaacagggattgtaggaacaccctgatgtctcaaacgccggatctcttcatcttgttcattaatcttggcttgcatttctacaaacctgtttttccaatcttgggcagctt

SEQ ID NO: 147743 - DNA, 917 bp, Cannabis sativa
aaataattttcataattaaatcttaattaactgctaatttccaaattaaacgaagcggtctttacataagaagtctaaaggcggtgaggattcctcttctaaggaaaagaggcatgctagggagatcattgatctttccgaggagctaacggctacatacccctctatcccaaaagctgctaagtccaaggagtctcggggaggaagctcggataggtctgaaccaccgaagggtgggtctgagctggtcagaagtgaacccgaacaggtgcgggcccctactccacctttgccggtgcttccagaggccaagaagggcaaatagatgcttgcccactacatgaaccggctggttcctgaggttagtgagcaactggctagtgctgacaatgactcttcaccagggtaagtctttcttgacactttcctttaattttctttacttagctctaatgctaaagttttttctttgtgcaggccagtctgaagttggcctacacttactcccgggctaagtctgctacttccaggaacacgactttgtccaacaccttgagggcggaggtgaacttggccaagaaggatgctaacgacgccagggcagaacttggagctgttcggatggagctgggtgaagccaacaagaagctctttaccgctcagaagaagatagctgagctgactaaggatctcgaggtttctgaccgtcttgaagagaccatcgggactttatctactgaagtgaacagacttcaggatgagaggacttctcttcgagcagttcttcgtcgagtggaggaggagaagaagtctacggaggaggagctttcaaccgaggtgacgaagcggaaagagaaggttaatgctcttgagacagccagtcttgagctcttctttgacttttggaaggctaatcc

SEQ ID NO: 147744 - DNA, 739 bp, Cannabis sativa
  modified_base (243)..(256): a, c, t, g, unknown or other
tttatgttatttttaaaagaaaataaaattaaatgtctaataaaataaaatgataaataaatataatctatttaattttataattcaatttaaacaaaatatcaaaaattttaaagttgacaaaatatctggttagatttttaaaattttctagattaaaataatcttattttaaatttcaaataaggtcatttacaaaattaattaaataatataaaatataaatatctgaccttaaatttnnnnnnnnnnnnnnaataattaaattttaaaaaataaggtaaccaattaagccaaatattaaaatttatccattttcaggttcaaaaaactactaatatataaaattaattaatttaattctgataattagatttgagatttggtaaaataaaaatctagatacaaaattacacaaaaaattaaaaattaattccatgaaaaagcatgaaaaaaatgaaaaaatcgagaaaaaaaatgcatttggtgcggatggtatgcagtgcataccatttgcgcgcgcgtgatggggaggctggccaagaaacctcgaccaaagagggtgcttgcaacatgttccgctcgcaggtatgagcttcagacacgctcgtgtgcgtgttccttcggacaagggtgtccgaacacgcgcgacacccatgtgtctatttttcaaaaaatcataactaattcaaataaaatcgaaatcaagttctgtagaaaaatgaattgcttaattttt

SEQ ID NO: 147745 - DNA, 501 bp, Cannabis sativa
tgaaaagcacacgacaaacctcctccctaaattcaaagatttggggttaagtttcccaagttcaagtggatttggggttaacataacagaataattcataccttgtcttccattgaaagtgcttgtaaaatttatcagcaaaatcttgactatcaaatctaataaaaaatgctataacgatcctccataccatcatttctataaaccacaaactaagtaaagttaaaaataagaaaatttttaagaatgcaatctgaaaaaggaaagtacaaacacaaaccttacaatccgcataagaaccgcagaactggcaaaaatctgcatatgtcaattttagggtaaacaatgaaaagcaaaagcttacaggaagggcaatatcgttccgatagagaagcatgactcccctgtctttttgaagtctctatggaggctgccaatcgtagttaattatagctgtatacgattgcaattgcgatgtatagggttttagatttggaaaaa

SEQ ID NO: 147746 - DNA, 677 bp, Cannabis sativa
ttgtgaaattctagtaacaacacttatcgaagtggatggtttgttaataccttgatggggtgagcctgaaagtagggtctcagctttcttgatgccattaagagagaaaactaactttgcaatcaatgggtaccgtatttcagcccctatcatacgcttgctgacatagtacacaggacgttggactttttcttcttcgcggactagggctgcgctgacagtgttctcggagaaggccaagtacagtaacaagtcctctccgtgaactggctttgatagaatttgaggtttgaccatatgttcttttagttttttgaatgcctcctttcattcttctgtccactcaaatttctgacactttctttaaaatgttgaagaagggaatgcacttgtctgttgatcgggaaatgaatcggcttagggaggcaacttttccggtcatgttcagtaaagcttgatttttttcatgattcgcctcaattcccctttggctgacgatgaatcctaaaaattttcctgatttgaccctgaaagtgcatttcttcgggttaagtttcattccgtaccttcagaccacttcaaagcattctgtgagatcgtctgcatggcttacgcacactttagacttgactagcatgtcgtccacgtaaacttccatatttcgtcccaaaaggcct

SEQ ID NO: 147747 - DNA, 951 bp, Cannabis sativa
  modified_base (353)..(353): a, c, t, g, unknown or other
catcttgacaccaagcacccttagattcttgcaagaatttatatgcacttctaaccgaataattcccacaagtctcaagtcgccaactccaaccatcagtaccggccaaatcactaagctgaatagataaaataaggtcctgatcacaggcaacaaacaggtccctcacaacatcctcatcccacgcgcgagtaccaacattgaagaggcagttaaccgacttattcacaagagcagggtgctatgagacaacataattgttcaaattatgtggaagccaatgatcattaagaatggatacattttccctagtagcaattgttctttgagcacaggcgtggataagatctttngcttcaagaatactacgccaaatgaaactaggattgtctcccaatacagcagaatacaggttgccagtagcataatatttagccttataaagcctactaaccaaagaatcagcattaaccaacaaatgccaatactgcttccccaaaagcgccaaattaaaatctctcaaacttcaaaatcccaatccccctgcatgtttatggcgacacaaccgctcccagctcatccaattaatgcccttatcgctacttgaatctgagcgccaccagaacttggccataagccgctcaagctccttacaagtgtctgacggcaaaaggaaaacattcatagcataacttggcaaaacttgagcaatagactttaacaatacctcctttccggcacgagataagatacgccattcccacccttgaattctcttctaaagcttatccttaagaaaaccaaggatagcattcttatttctcccaatcgaacacggtacacccaggtaatagccattctcatcttcctcataaatttccaacatagcacaaatggaatcccacacgtcaattcccgtattattgataaaaaacacagaagacttagaga

SEQ ID NO: 147748 - DNA, 737 bp, Cannabis sativa
  modified_base (157)..(161): a, c, t, g, unknown or other
taacttaattaaaattgaattagcaacataattagttttaaaatatataaaatttatttttcattagattattttaaaattaattttaaaaaaacactgaatttagtgagatagattctagatagtaatttatagtaactaattatattttctaatnnnnnattaattagaaaaatatatttaatatgaaaattaattattttaatttagatcaacttaaattagaattttttaaaagtattaaattaaaattaataattaagttgattttattcaagatacttaattttttgattcttttatttaatacatttaattaaatagaaaattaaatatttaagttgatttaattctagacacttacatattagttattttcaaagacatttaattagatagaaaattatatttaagttggaagttttaatttcagaacaacttaagttagaataatttttcgaaatatattttattttattttgttaatcatttttccatcaattttgaaattgcattttatttaatgcagataattttgaatttttcttaaaaaatagattaaagttgaaaattaattattttaattaattttagatcaacttaactcaagtatattttacaataatgatttattaaaataaataaactaaaatatattatattttaattagaaaataagtaataagttagtgaaatatctacatagttattttctgtttacttgaagtatttttcta

SEQ ID NO: 147749 - DNA, 927 bp, Cannabis sativa
aataggcattggatcaaagtttttaggtataagaactttgtttcatgatatactaataataaattaataataataattcaagttaaagtttttcttttgttgtagttttgttttgtagaaataaatgcataacataattgtatatagttttgcaaaaacaagtttttatattatgataataatgagatttttgaatacttaggaaagtatgattttgtaagaattattattctcttactattttttccaattttataatttcaaacttataaggcttctataattaacacgtgatttttgaaattatcaaaatgatcgaaagggtaaagaagggaattacaccacctaatctcctaatagttataaaaaaaaatgaaaaccaaactttttcattttgaaaaataatttaagaagaacaaaatatttttgtaaaacctatttatttattcatgactcttgatatggtgatattacatcaatttgctattaaccacataagatgcaaaataacataagagtcacaattcagtaacagaaatagttttaaagtatttaacattagtaatagttttagaaagtacattttttagataatagtttcgaaaaaaatacttatttatatttattattaataatttacataaattctttaatttgcataagtacttaaagttttgaatttgtaagcgatataaattttatgtttatttttaaccgcataagtatctaatatttataaaactgtaattttcctccagttttatcaatacaaactatattttgaatttattaaaagaatttttataagtaacggtaactatatatgtgtcctagttaagacaataacacaagggaaatttgaattattatgaatgttttaatacaaaattagtttggtgaacacttagtgtaggtaatttttaaaat

SEQ ID NO: 147750 - DNA, 1018 bp, Cannabis sativa
  modified_base (868)..(868): a, c, t, g, unknown or other
gctctcacatcctgtgactttagtgtcaaaagctggccctctaagatatatcctagccaagcccgtgttgtgtggacgacttgccaaatggtccatgatgttatcagaatttgaaattaactttgtcccacaaaaaagcaataaaaggacaagctttgcctgattttctggcagcacacccaattccagatgatatggagttgcgagaagatcttcccgacgaagaagtcttcacatttgatacttcatcatgtcaattatattttgatggggtagcaagaagtagtggggtaggtgttggaattatcttggtgacatcgtcgggaggcctgataccttactctttccatattctagctatatgcaccaataatgtagcagaatacgaagcgttagttattggccttaaagttgcacttgaaatgaaaatacagttattggaggtatttggtgattctcctttgtatattaaacaaatgagcggtgaatttgaagtcaagcatgagaatttagtcccttatcatgaaaaggctaaatacttgcttggccaattccgagatataaccctaaatcacatctctagatcaaaaaatggtaaagctaatgcattagccaatttagtggcatcactaacacttcctgaagaaagagttatccaaattaccataggagaacgccatgtattatcccaatccatagaaagagttgaaaaaaatacagtcaacttgataactttcctagatagtgcaaatgaaaattacaggcgtcagccaatcaaagactacatccaaaaaggagtcttggcagaagacttgaagaaaagagtggatgtaagaagaagagcgcctcgatttgcggtctttaatgncacattgtacaagcattcattcgacgggatattattgagatgtctctcaatagtagaggcagcacatgcactttaagagactcatgccggtacatgtggcgcccatcaagctggcccaaaattgtcggctcaattaaagcggttgggtta

SEQ ID NO: 147751 - DNA, 756 bp, Cannabis sativa
  modified_base (695)..(702): a, c, t, g, unknown or other
ggaggaagatgctaagctggtacgtttcctgcatcatgaccccttagtcattgaaaccctaattgcgaacaaaattgtggccaaaatattggtggacaacgagagtttggtgaacttgttgtttaaggaggctttcgcggccatcgggttcactgatcgagacctctccccaagcggttcaaaactcacaggatttaacaggactacactcgttcctatgggaaaggttagactccccgttactatatgtctggacactccacaaagtacgttcaagtattgtacctttgtggtagtagattgccccactgcttacaacacccttctgcgccgaccagccttagttgactttggagcggtcacttccatcaagcacttgtgcctcaagtttcccactcacaaggctgggataggaacggtctggggtaaccaaggagaggcaagactgtgctataatgttgcagtacccctgtccgtttttacaatccaagggattatggcggtgtaacgcccgtatttaaatatttttaaatccaaaagataactttatacttatatgggtcgggatcccgagtatcaaaatacaattacaaagtattttactaatatgtacatataatatttttttttaaacttgcgaacatggaacttcaaaatagagactcaaaataataaaagaccgaaaccctccaggnnnnnnnnccgcgatatgtacaatcactgtcgagctccatctcaatgttcctccagctttgc

SEQ ID NO: 147752 - DNA, 657 bp, Cannabis sativa
ttgtgaagaacataatctgctggttcggattgcaggacaaaatagtttcggataatggcaagcagttcgacagccaatctttcactaacttttgtacgaaccatggtatcatcctcaagcgaatggtaaagttgaagcaatcaacaagaccttgaaggacacgctaaagaaaagactagaagatgccaaaggaaattggccggaagaacttcctgaagttctatggtcatatcgaacaactgagaaaacggtaaccggacagactccgttttctatggcatatggatacgaagctatactgcctgtagaaatcgagccaccatcccataggagattgacgtacaaccaagataccaatcacgtactcctgggcgaatcactcgctgaaatcgaagagaagcgaaccacagcaaacttaaagttgatagcccatcaacaaaaagtagctcagtatttcaataaacaagtgaaggctcagaaattcttcgtgggagatatggtcctaagaagggtatttctaaacaccaaagactgtacggcgtgtgtactcggagctaactggtaaggaccatatcaggtggtcaaagttctcgaatccggagcatacaaattgggtaagtatgatgaaaaaatgcaacttgttctagtaccacggta

SEQ ID NO: 147753 - DNA, 619 bp, Cannabis sativa
agcccattgcaaactctgccagaatttagaggtaaactttggatctctatctgaaactatggacattggtacaccatgtaatcttactatttctttaacgtacaagtccgcatattgatccattgaacaagttgtcttaactggtagaaaatgtacagactttgtgaatcgatctaccacaacccaaattgaatcaaacaaaatcgtggttctaggtaatccaaccacaaagtccatcgtgatatcttcccacttccactcaggtagtgttaaaggctgcaacaatcttacggtctctgatgttcagccttgatttgctgacaggtaaagtatcgcggtacgaattctaccaccttcttcttcattccgctccaccagaattagggtttaagatcttgatacatcttggtggtgctgggatgcaaggaatatggagtggtatgagcctcttcaagaatttcatttctaagttccacactatttggaacacaaaccctggccttgaacaacaacatcccactatctgacactgtaaagtctctgacttgacaagctaaaacctcttccctgattttcactaactctggatcagctaactgagcagctttaattcgttcta

SEQ ID NO: 147754 - DNA, 838 bp, Cannabis sativa
actaagcgggctttacagttagagtcccatcttttcataagtagttttgaagaagatattggaagaggctccattatcaatcatggttctggccaccattttattggctatcttcacttacatgaccagtgggtcattgtgcgaaaatctttgacagcgtcttcatcattgaaagttatggtaggccctcctgctcgtggaactttgggcttccattcttccacagccaggataacttcctcttattcgtgttgtgctgttcgggcatagctatcccgagcttttcccaaatctctagcaatatgcgggcctccaatgatgacttgcagatgtccatctaccggtggaggtaggaaatcatggttattgtcattcctctgaccctgatcggtcttcacatacttctgcaagtgtgggttgtttttacttatcaagaattcaatttcctacttcaggtttttgtattcattagtctcatggccatagtctccgtgaaattgacaaaactttgtcatgtccctcttgctaacatctttcttcatgggcctgagcttcttatatggggccagtgactgagttgccatgtaaacactttctacgtcttcagtaaagatagtgaatgcggtgtactttgcttgactctcacggagagtttgtttggatttgccagtgaactttcccttcttcccattcccttgcctgtggctattgttggaacgtttaccacttgagtttgaattatttgggttctgggggagttgggcagacgttccagttgaaggggcttttgacttgctaggcttttgctcaccttctgctcgttgaatggcttcttcga

SEQ ID NO: 147755 - DNA, 500 bp, Cannabis sativa
cgagtaggaatcaactcattgttctcattagccaccaccgtgactcctcctttcttgggcacacattgaacatgactagcacatgagctatccgaaatcgggtacacaataccataatccagccacttgatcactttttttcgtaccacttctttcatgacgggattcaatctttgcttatgctcaacagaattactacaaccagcttctaagagtatcttgtgcgtgcaaatcgttggactaatacccagtatgtcagccatagtccacccaattgcttttttatacttttttaacacctctagcaaggcaccttcatcttcaactaccaagtttgttgctataataactagcagcgtgtcattctcccccacataggcatacttcagatggctttgcaaaggtttcaactccaacttcggtggttcttggatggagggttttggaggcttaaaattactttccttcaactccaaagattcaaagggcttcttgaattt

SEQ ID NO: 147756 - DNA, 963 bp, Cannabis sativa
tatatcctggggtagcgaaaaattgtatgccgctcatcggtggagtagctgctggtaaagttcccgagagctgagctccgggtacataccatggtatcccggtagggtagtatcccccataggccactatttgggcctcttctaggttgatgtatttttggactcttctctggaagtcctgaaggttagaggctccttcttgctgtaactcattccaaaacagagtcccagtatggatccctgcttgaagaagagaaagctgctatccgtcatcaactttctaggtctttgaggattcttccttaaacctctttatgaaattcttcaatgttttcgtaggtagctgcttgatgttagtcaaggcgctaacctccagattaaccttccttgcggcgacaaactgtctccgaaagctggttccagcttattccagcaatccacggatcctggttctagtttcttgaaccattcttccgcagattcgcttaatgttagcggaaagcataaacacttggcgtcattgctaactctcatgactgtcattacccggttgaaccgtgataggtgatcgctagggtccgagttcccggtataagctgccatttcgggcatcttaaaatttttggggagctccgcctctaggatgtgcctggcacatggctcccggtcttcacagtcagagtcggagtcatcacctttttgtctccaggagacccgagcaatatcttttcggagtatggcaagctcagccatgtttccttcatttagcgttctcgtggaaactgcgggcacgtgtttcttttggtctaggtgatccgggaggtcactggttttctattaatctaatgtcttagattgacgagagggtatttttggcccctccttcctctccctccaggttcctggtgcacggaaacgctctttcggtcctctcgatcgtgagggtcaagactccctctttgg

SEQ ID NO: 147757 - DNA, 915 bp, Cannabis sativa
catctttgattcaaagatctcatgtacaatatcaccctttttcccctatttttttttttttacaaagaatgaaaccaatctctatcttgttgaccaatctattgtggccaaaaaaattttattctatgttttacactatttttgactctttgtacaattgcctctttactttctagatgagtattccaaatttggtcatttctagcatgccaaatggagtaaaccaagcttgctacagcagctgccacagttttcttcctaaacttgctgatttttgccttatgaatccacttgagtagttgggagaggctgttggtttgtgctccccatgaaaaccatcttttcacatgctgaagacaatattcagtaaaagaacagctgaagaaaaggtgctcaagtgtctcgggttgtaacttgcaaaggttgcacatcgggtcaacaatgatactgaaccgctgcaacctatccttggctttgagacaatttcgaacagccaaccaaagaataaaactatgctttggtgtgttaaatctcccccaaacctcattactccatgcaactcggttctgtgtaggacaaatcaagttgtagccatttgaaactttgtattcctcacgagcaaattgttgtacatctacaaggcctttgatttggttcttggctacaactatttgctaccaataccaacttccttggcttggtgcttgatactcccaccaattctcttctttaatgtacactgcatacacccatttgacccaaaggttatcctccttatttgccaaagctcaaacatacttgaagagcgttgctgaattccattcagcagttctcttaatacccgagccccctacaatcttggcttggcaaacattctcccatgccactagtcctgctccctgcatcatatattgg

SEQ ID NO: 147758 - DNA, 511 bp, Cannabis sativa
  modified_base (301)..(317): a, c, t, g, unknown or other
ggggcgaaaacccgattagatatccgattgtaccggggcggggctgccccatcggatcggggccccgactcgaaccgcgaaaaatccccaatttgccattcctatctctaatggcccacatagctttccaccgttatcgaacacaagcacagaaaacgtgaaattcatatatatagcataattaatacattttgaatttaaataaatctccataaacatgtaaatcataattaataactcaatattacaattaaacctaatcatttaataatccaaaatattgatcttaagtggtcattannnnnnnnnnnnnnnnnctaatttgaatgagatcaacggtaatggagttcattttaaaaaaaattagtgcaaaactttttatctatttattatgcataattttcttggacaaagaaccataactcttcatttgaatattatttattaatgcatgtattattttattgttcactattataattacaatcttaaattttttatagtgtattcc

SEQ ID NO: 147759 - DNA, 994 bp, Cannabis sativa
tgaactggtcaggagtgatcctgagcgggtgcaggcaccaactccacctttgccagtgcttctagaggctaaaaagggcaaggagatgctggcccactgtatgaaccggctagttcctatggtcagtgagcaactggctggtgctgacaaagactcgtctttggatgtgttggtgggcgaaatctttaaggagttcaccacggtaagtcttttttgatacttccctttaactttccacacttaactccatatgctaagtttttcctctgtgcaagaccgctgtctgaagttggcatacacttactcccgggctaagtctgttgcttccaagagcgcggctctgtctgacaccttgaaggcggaggcagacttggacaagaaggaagctgaagaagccagggcggaagccagagctgttcggttggagttgggcgaggccaacaagaagctgttagctgctgagaagaagatctccgtgctaacaaaggatctcgaggctgctgaccattttgaggagaccatcgagatctaatctactgaggtaaacagtcttcaggatgaaaggacttctctgcaagcagttcttcttcggatgaaggaggagaaggatgccaaggagggggagctttcgaccgaggtggataggttgaaggagaaggtcaatgccttggagacagccgatctctagctcttctttgatttctggaaggctaatccccgggcaaactttgactacttgggcgacgcaaaggacatgtatcttgagtactgcgcggcccaagtggcttatggtgggaacaaggcggctgcttcaacctccggccaagctacttcaaccttcgttcaggctgctgatgcttctcctattcaaataacagatcctcctgctccagttggcttagaataatcgaaccaagagcctggtactccagctgtttaaacacttctttttatctctttttttgatatatcttattcggccttagggcctttt

SEQ ID NO: 147760 - DNA, 1007 bp, Cannabis sativa
  modified_base (436)..(454): a, c, t, g, unknown or other
  modified_base (519)..(529): a, c, t, g, unknown or other
  modified_base (556)..(557): a, c, t, g, unknown or other
  modified_base (957)..(957): a, c, t, g, unknown or other
tcagggggcatttttaacgaccttaaaagttcaagggcatgatttggtacatgtcaaagttcaggggacaaaaatcctaattgacatttattaagatatatccaccatcatccttcacttaagtctagcactaatttacattaacttaaggggtttaataaagacatcacctataaaagtggatatatcttaaataatataaaaataaagatacaaattaaaacaaataaagtaaaatggatatataatgtaatttttttcatcttttttccaacccatatatacaatacgaattttggggttcactacaaaaaaatttacttttagtcacaacaaaaatttgtgactaaaaataaaaaagttgtgactaattataaattatcattattgtgttatgactaaaagatccgcggctaaaagtattagtcacaaaaannnnnnnnnnnnnnnnnnnaatgtgtttttagtcacaatatttgtgtgactaaaactatatagtgacaacttgtaactaaatannnnnnnnnnntcacaagtaactttttgttgtgactannagtcatatttagtcacaaaaaatatatattgtgaataaaaagttgtcactaaaagtagtaattttttttgtagtgattgatcggcctcttctattttttctgaaatgttttaaaataacaaaaaatttacgtttttttaggaataatttttttgttttgttttgttttgttttattttatttatttattttttcactttttacggatatttgtttaacacagtcattttaatgttgtcccaaaaaaattattgttttcacaatgtaaaaatataatataatattatagcaatatgaaaataatattctttttcttctatgaacatatataaaaaaaaaaatcgtaaaacataccaaaaaaaaaaaagttaattttaaataagggaaatttacatggtatnctaacttttgttattttttttacaaaaatactgtcagacggtatttttta

SEQ ID NO: 147761 - DNA, 655 bp, Cannabis sativa
attgcagaaagtgacattcaaagttctgcccacgtccaccatagttctatgccagcatgcacgagcaaaatcataccccaccaaagcatggtagatcgtttcatctgaagcgttacagaaaggacatatagaattgttcttcaactaaaaacaagtaggaagcgaacccgaagctgccctctgcagaaaattgctgacttttggtggaacccttcagatgccacatctccctccgaaaattcgaaccaccatcattaggctagcccccttttcatttcttgtaaatatttatcgaggctttcatatttccaactccatcagtcatttgtagcaattgcacttagttgaatagatagaatcagctcctgatctcgaacgttaaagagatctctaataatctcctcgtcccaagcacggttgtccgtcttaaaaagactgctaacatactggttttgatgagcatgatgagttgaagagacaaaactattggtgcggtgaggaagccaagggtcccttaatactgagatttgatcactcgtaccaatggtttgactgacacctgcttgtaacagtcccttagcctcaaaaatactcctccatatgaagcttgggttatctcccaactcaaccgaaaaaaagaaccatgagcataata

SEQ ID NO: 147762 - DNA, 968 bp, Cannabis sativa
  modified_base (46)..(75): a, c, t, g, unknown or other
tcaggatcaggcaattccttgtcatcatcctcagcatcatcatcannnnnnnnnnnnnnnnnnnnnnnnnnnnnntcatcatcatcatcagaatcttgtgtcactaactcatcagatgatttatcctgaatcaaacaacagtaatgcaactaaaataaaataggaaaaaaactaaaaacaaagcatgtaaaaacataaacaataaagtctaattatatacctcatcagaaggtcgacgatgaatgacattaactttttcttgaatatccttaattacagtcattacagacttgaaattaaggtcaacaaaacaccttaaggaaatgaagtctacggccaaggattcttgattcgaaatgaccagctacaatttagatttcaacaaattaatgtcctctgaatcaaattttttagaagatgaacaactctcaaatgtttgcttagatataccgggtcatcaatagattcatctagaaataaaccttccaattgtagcttctgcctttcctcatcagtaggacaaatatttttaatctttaactgaaaatcataatcaaaacaacaaaatatgaagcaaaaacaattaaataacaaaatattaataaaacaaaacaaaacaaaataaaaacagtaaagaaactgaaaaatcaccttgttcaacggcaaatcaaaaatcttactcttcaagtctctaagagttggatttttggtcacaatggtattgctctaatttagaattcttggaatcctggatgaaactattttgtagaaagtgtttaccatggcagtacaacattcgtaaaaccaaataataaacacccacggacagcccaaagctctataccaaccatcatactgacccccttttcttctttcttatttttcattttaatcccatgatgtattctacctttgaatgaatcaatagtcaattcaaaggactccctaccccaacaatactcatccca

SEQ ID NO: 147763 - DNA, 524 bp, Cannabis sativa
gaggaagtagtaaaaaattgtctcctatagcatttaagaggatcattggttacttttcaaaagaagaaaagatagaacagtggtaaagaggacctttgcttctagcaactattattgtttttttttttttttttttttggttaattatgatttttactattaaattttgacatatattaaattatattccttaagcttttttagttattaaaaaattttcttaaactattgagattgttgcatttaagaacatttgtttagtttcattaaatttaactaattctgtgattgattatgtactaaatcatgctttctagactttgagatgtaccaaatcatatccttcaaactttgagatgtaccaaatcaaattattaaaactttaatccatgttagacttttcttactaaaatataaaaaaaaaaattaaaaaatcagttcttaaatccaacaattctaataatttagagaaatttttaatagtcttaaaaatttaagagatataatttaatatatgttaaaat

SEQ ID NO: 147764 - DNA, 960 bp, Cannabis sativa
  modified_base (698)..(700): a, c, t, g, unknown or other
tatattatattctttaggaaatgtgattagtgcatattttttcttttattataaaagtataatttttatgatgctataaaagtcccacatagtttagaaatgtgattagtgatagacttgtaacctataaatatatcacccattcttttttttactatattggtgattgatcaattcattgttaccccattaagtatacatttttatgatgataacatctttaatatttggttaaataaataaaaaaaacaactaaatttttttctaatattttagtcacctttagttatttgtatttttgatatttacatataatatggatatttattatagagtttttatttatttatttttttaaaaaaagtcccacatagcttaaaaatgtgattagtgttaaacttgtaacttataaatatatcactcatccttctttccattgaatcagtgagtgattaatttaatcttaccctattaaatatttgataagaacaattaaaaaaataaccaaaatttaaatttaaaatatcattataatttagtcattctttggactccttttaaaaaaaataaaattcatgtaggaaaaagagtaagagaatggtcacaacttagtagcctggataattttggaaaatatttagtatcgataatagttcaaagacataattttttcagtaataatttaggaaaaataaacnnntttattgttataataatttaatttttacaaccatgaatttaaacataatattattaaaatcattttaaatatattgatattgattgatttattttattaattaacaatgagaaaatgaataaaagaatatgaattaaaattaacataggatgccacaaaaatccttttaaagttcatatttttgtttttaatttataatgtaaactacaaaaagtattttttaagtaaaaaatgtcaatttttatttctaataattttaa

SEQ ID NO: 147765 - DNA, 504 bp, Cannabis sativa
ataaatagtgatgcatgttcactgtgcaaaaggtcgcaaacagtttagtcgagactttaacctagagatattgtctaagaatttatatttaaagatactattgtgagagatataagaaaaggaacttttctccttgttcttaagtcaacacaaataacgaggactaggctattaccgaactgctcggggcttaacctctataaaattcttgtgtctttatattactttactatatatcgattgctataaatcacttatcgcttactaaataagactcgctgtcattggctaaaagcgaggtcaacaggttttatgcaagtttgagctttgagttcaaagctttgatctctaatggcataatttgattcattgattttttctgtgaaatactggttggaaaatactttcgatgcattttttaggtactctggaaggtttggtggcatttggtggaaaattgagcaagaagtgaaaagtttggggtgaactggtgcaaaccggcta

SEQ ID NO: 147766 - DNA, 505 bp, Cannabis sativa
ttttgtcctctcagaaaaatgtgggccaatctcatgaaactcttgagccttcattgactggaacaacattccaaccctcagagtattttgatggagtttttcaaatgaggccaaaagctggtgctactgctgcatgctcgagttctgatgctgcagaaatccaggaggttaagaatgaggttcagctggtgaacaatcgtcttgctgccatggaggaagtccagcaagagatgtcaaagcagctgtccaccttggtcaagctttacagagactaagttttttctttctttgcttttgttggacatattactatattttttgtttctttgttatctttggcccttagataaacaaaaagggggagtaatattttaatttttaactgtttgtttggaccaagtctggatcctttttctagggggagttgtgtttagtacttgtgaactattttggtttaaaagttagcatgtttatttagttatttttggttttcgattgtgttact

SEQ ID NO: 147767 - DNA, 613 bp, Cannabis sativa
  modified_base (152)..(153): a, c, t, g, unknown or other
tctagattaactaacatgtatgttgattataatctataatctaacaccctgaatatgaatatcctaatacgataaaataaacacataagaaattaagaaatccatacattgatggcaacgaaacaatatgattccttccattcaaatctctnncccttgattcctttctatcgcaaagcattatcaagatctgaacctggatcttttctctttcgatttggttaaccacagtcttccgcactatgattgagtacttgacttgctatgagtgagcatggtactctatcattaaaggcttgaatttgatgaagaacaatagaagggtcgaaatcactatgaaaggagtctctcatttaccagttgtctgacaaataatgaaaactaagtttagataggttggatgagaatgagagcatcatgttccttttatagtatttcaaataggttttaagatttaattatatggattaaaaaaaagataaaacaataggaaaaattcaacctagtggccggccatacatagtgggcctcttaattaacaaataaaccccaaaatctattttcttcacaattaagcccttgcttagtggaaatttataaataagacatagtt

SEQ ID NO: 147768 - DNA, 588 bp, Cannabis sativa
ttattgatgtggttattgttacaatattatatatacggtaataaattaatgatttaatttataaaatataattaactagtaaacaatccgcgttttgcggcgaatgtttaagaaattttagatcaatataaatatataaaggaatgttttagagaggtgatgtggcatcttatgtgagttttctttgcttttctttttttttttttctcattttttcactttttttcacatttgttatgcttttggcaatatgataagagtcatgttaaaaaagtcccacatgatttaaaaatcattgtgggtgctacacttttacattatatagatcattattcttttgatttgaattgtcccaaagttagtattatttattttttatgtgagtgattaataaacttaatcatgcacaattagttgtaatttttttaaaagtaaatacaaaatatatttttgtattttcaatatttatcaagtttaaaatattaatattaattaatattaatataaatacactactacaaaaacacctttaagaggcggtttttaagccctttcagcgtcggtttttgcgaaattcgctaccgacgc

SEQ ID NO: 147769 - DNA, 697 bp, Cannabis sativa
agggacttgggcagcgaaactaggaccgggacccaatacccgaccctagaccttgacttgaacctaggacccagctcgtgacccggcacccaaaatggaatcaggtccggacccgagatcgggatatggatctggatctggaaccggggcttggaccgaacccgtagttggtgtctagatctgggaccagcctcagacccgaacccagacgcggactgaaacatagcaccataccaaaccctggacccaaacccgtaccctgtgacctaaaattggaaccgaaactggaagtagacagggacctgggaatgggactagaaccaggacttggatctggacttggaaccgtaaccagacctagaccatgagaccgggaactgtagtcggaccattaccaagactccaacccagacctagactcgaactgggaaccagccccggctccccacccagacctggactcaggaccaaaacctggacccaaactctgagccaaacattgaaccaaactcgtgacacaaaacttgggtcgggacctagaactgcaccccaatctcgttcccgaaaccaaacttggacttgggagccaagacctgaaccagaacaagatcgggacacgtgacagggatctagatcagggactcagaccaggactcgaacccaggccaggacccaaacctggaccctgacctagacc

SEQ ID NO: 147770 - DNA, 738 bp, Cannabis sativa
tacaaaagcaaaagttgactgtaattgtaatcgtaatcgttaccgttacagcaattattccctcaaatcacgagattcgattacaaatcaagctgagtaaatgaggttttatttataattcacacagttgtaagtatcccgcttttattgggcagagatgaacgcatatttattgatttgtggtaaacctcaactcataggaatgcctcgctaggaatggtgtcgagttaactttgatggcgagctgtggctcgtcatatgacttcccaaaattactttaattctgataactatattttctggtgtcgagatgatctttctcgcatgcgtgccatcttccagcgagatagatggctcgctgtctgccatcttgattcaccaaactgtttacacttagtttgtacatcatggaatatacgctaagtgtttttatcgttatcatttctctttcacgcagcgaggttgaggcctcatcatgcacacttgcaatcgcatggtttctcgtcgatacacgagttagcagttcgtacgtttctgtctcgcagaagactattcagccagccgagttataaacatactctgggaattgtgtttctaacaagttgttccatgccaagtgtacttataattgtgtgtttgagttcttcgttcttcccagctcgacgcatgtcttcctctaatgtgctcaccgaattttgggtatagcaattgcccattaaaaagttttttttttttttt

SEQ ID NO: 147771 - DNA, 596 bp, Cannabis sativa
cggccggccggccctggtggatttcggtgcagtcacatcgattaggcacttgtgtctgaaattccctactcaggaggctgggataggaaccgtaagaggaaacaagggagaggctaggcagtgctacaacgttgctgcccacctacccgttctaatggtccgtgaagttattgagccagaaatggcagaagaagatgagttggatccgcgtgtgggatccgaaaagattgtagaacccatggaggatgtcgaggaagtatcgatgtgcgacctcgaccccaccaaggttctccagctaggaaaaagcctagagccggaggaaaaagaaaaaataataaagacgctaaaggtcgccacagatgttttcgcgtggtgtcaagaggatatgaccggcataagcccccacgtcataacccacgtctttaacgtcaacccggacatgctaccggttcagcagaaaagacgccccctcgactcggtgaagccaaaagccttagagaaagaggtagacaaattactaaccagtggcatgatccgggacgtatattaccaagagtggctggctaatccgatgttggtaccaaaaccaaatggga

SEQ ID NO: 147772 - DNA, 726 bp, Cannabis sativa
  modified_base (337)..(339): a, c, t, g, unknown or other
tcaattattttcagtgtatatcatttttattttattttcataatctttattattgttgtgtaacaaaattagttccttgatgaagaaactatttttttggtgaaaaaaccggttctttgatgaaaaaactaatttcttggtgatttttctaatgattttgctggcaacaataccaattcagatgactttttcgacgctagcaataactccggtaattttttcgacaccgacaactacttcgacaccgacatcaaactccagaatagtcgtcggacttggcattgtcaccggtaaaattaccggaacaatcacaaagaaaccggtttcttcatcaagnnnccagtttcttggtgatttttccaaggacaatgctagttctgacgacttttcggcggcgacagaaactccgacgacttttccggcaccggcgactactccgacgactttttcggtgccgacagtaaagttcagtgacttttccggcacgagtgacaacttcggcgatcactatagttttatttgttttattttaaaaaaaaaataaataggaagggaattttaatattttttatggtaatttaattaagtttttattttttatgaattttaaatttagatttagttttaatgttttatatgattttttttagaaaaaaaaaccatgtttttagtttgattagttagataatgccatatttagtggcatttactttttatgccatattt

SEQ ID NO: 147773 - DNA, 653 bp, Cannabis sativa
aatcatacgtagataaaagtggatacaagttacttctgaaagtagagtcttgactaaaatgaatacacaattgtctcatccaattaaaacttttgaattaaaaataaaagattatgagactgatttttgcattaaaaatgaaaaaattactcttttaaataaggaacttgaaagtctcaagaaaaatatccaaatacttaaccgtggatcttctatttttgacgaagttcagaatgtaggtcaaagatgctttgttggtattagatcagatgaacctggaagttctggaatcataaaatttgtaaaatctagtgttccaatgaactttcctgatgctgcaaatttgaagtttgctgcaacagattcaaagtctatcactgcaaaagtaaagtcttgaggaattacaaaaatagtaagatctcaggtaaggagatttatgcctatttgtcatttctgtggtaggaagagacatattagacctaaatgtttcaccatgcagaacatgtacaaaacaaattattttggtaatttaggaaaatctcaaaagaaacacagtggtatgaaacaaaaataaattgaaaaaaaaaatgtctagctggtttttctaataaaagtcttgctttgtggtactttgacagtggttgctctagaca

SEQ ID NO: 147774 - DNA, 577 bp, Cannabis sativa
aatttaaataataataataaaaattaaatttaatattatttcattatattatttaaatatataaattttaatttaatttattaaaaaacatatttaactaattttattaaataataaaataagtaaataaatttaaatattttaaagaatatgcctaataaatttgttataaagtatcactacgaaaactataattcccgtcgactcataaattgttttttaggaccatcgctaatgaaaattgagtgtttaaaagtgtcgactatagtagactatttacgatgtttttaaacactcgtgtacttttctcgatggtttaaaagagttacaagctaagaaaggaaatggggttttaaagggcatcccgatggtttgaaatcgtaggcgaggcgatagtgttatagccgacgattttaaaccgtcgaccatagtatctcctacagttttaaaccgtcaggtaatgtggtttccaaatcccgtcaatttttcaagttaaactcccatttcagccttcatttgattcattcgctcaatttttcaatttaaaccaatttgtttgctctctctctctctctct

SEQ ID NO: 147775 - DNA, 502 bp, Cannabis sativa
tctaaaacacatgagtttatagcatagaaagaaataccttgtttctttgctagaaacttagggcattggggtttccagtggcccttttcattgtaatagcagtattttccttttcgcttatcaccaggagtagcagcctttttcttttttaacttttttcaatgcttcaacaagcttcttgctattcttccacttcttctttttcttgggtttggaagtagaggcaaagtctgcctcagccttagccgccctattagcattctcagaatttagagctttagatcctcctttctgtggtcctccaatcaaattttgaaatgtctgagggttgtttactaactcgtgaaagtcaagttccaacttgttcatgacataatttgaagtataaggtagaaaagatggagtcaaactgttcaagatcagactcacttgagtggtctgatccatttcagctccatgattctgagcttcttggaagtaactagccatttggagaaggtga

SEQ ID NO: 147776 - DNA, 922 bp, Cannabis sativa
tgaaatcgttgttaggtttcttcctatcggcgatgcctgattaggcacgggcggcaatgacatgtgagtgaaagattttggcacaggctcacctaattaggtgatgtgaaatgttggtgccaggataaggtacaggctcatctgattaggagatgcaatacatgggtgtcaggttttggcacgggcttacttgattagctgatgcagttatgcaatatatggttgccatgctatggcacgagctttcttgattaggcaatgcaatataggattaccagattaaagaatgacttgtttgattaggcaatgtgatgtaataaagatggttactttatgaggtaatatataatttgtattattaaatgaatgtgatttctattattggtacaatgattttatattaccgaatatctatactgacgtttaattgtgatagatgtcagtagtgatttagatttcatcttatgagcaatgtgtgatcattttattttaattatttgagtataaatgataatatttgagtaatatattatatgattgttgttattacttttcttgttgagtcctagtgactcatgggtgctatgtggtacatgtaaaggcaaagcaaagctagcgcagccatgaggtgacaatcttctccagcaatgtacatattaatcctactggcatgtatgctgagtttcaaggagttgtttttgggctatatctaccatgtatttttatttagtattttgtcttgttgtcgtatttagcctttttgtaaaacttttacaacagggatccctggaacacatttttagtttcattatgatgtcaatttttggtgttttatttaagtgaagtttttaatattatcacaaattttaataattaattatttattagtactaaactagtttataaaatcacacacgtggcg

SEQ ID NO: 147777 - DNA, 799 bp, Cannabis sativa
tagatgagtaagaacgttctaactcagatacgaccatgtaccactataccacatgcacttagtaccaccattgtactagtgtaggtagggtatgaaccgtaccatatacaccctgcaccatccgtactagtgtaggtaacaccgttatgtactcttcagacatcatgcactttaccactgcactctgtacccctactgtacaagtgttggtagtgtatgaatcacaacaagcatgcatatacattaacacatacatacattttcatattcatatcacatattatacacagttcttacctcctttccagattcaagtgagttagctgacctgaacggaaagtctcttgctggatggatgccctaatcacatattaaaactggacaaatcacatgtccaaaaccctaatccgggaaacctgaacctacaactcatggttctgttataatcactagggactacactatcctaggaaacagggaaacacccaactaaggtactgaaatgggttattcggggaacctgccaaaaccggttaaccattttacagatcctggcaaaccggttaaccagtttgtaccagtttcccacaaaaaacctaaagcttgttcaaaactctaccatttgtcaccaaacttttcaaagtacctacacagggtataaaaaatattccaaccaataaaactcagaaaaactcactgaatcaaaacatgccattaaagacctaaacttgagtttcaaagctcaaaattgtgaaatttcaacacaatacattaaaaccagctaccagaacttagattt

SEQ ID NO: 147778 - DNA, 860 bp, Cannabis sativa
cactctaccagttggacctcccatcgctagagctagtgttgttcaaccgccttacattacggaaacttgaaaccaaagcttttagaaagaaattccttcaaaaaataatgggtatttctttagtaattattgtttgatttagttgtatttatgttaatatgaatatatctacatatatccttgtttttatgtaccatttttgtcaaggaaacacgaaatgcagtgattctgcgtttttctggttttttttttgcgagtttagcgatattttacgatgttgttagcgacatttagggataaaatagtggatgtgaggttagggataaagtttagcgatttgtagcgatgtgtcgcgatgtatgttgcgacatactgcagttttatgccatgttgacgattttttcaattttgtcgatattgtttgcgatgtttgtcgatatatttagacgtattgtctgggccagtcccaaatgacatttattgacaagaagcgatgtgtcgcgatatagttgttgataatttccacaataaatgacgatgctcttcatgatatttcgcgacatataacttatctgaattaatttttttgtcatttttgtttgcagattcaactgtgtttgtggttgtactatatgatggggcttgggcagttgaaggtttcaactggatattcaataacccaaaaattaagatgttaatatttgaggttgacactactttacaaaagatgcatggaattttgtatgaacagttggatatataaaccctcttgtgtatgaattgaaaatagaggtgtgttacatgtacatgaaaggcaatatgataccgccagaagttttagtgaaagatagtcaagtaag

SEQ ID NO: 147779 - DNA, 767 bp, Cannabis sativa
agccatgacggcctttccttttcccagtacgggagagggtgatcgagccggtaaactgggctccctaatgcgaattggatgttaaatgggcttgggctgggccggaagtttcttcctccttttgagcagagtcacttgctcttcctcagcctcatcttcaggattcaaaggctcctaagcatactgtttggcccttgcacctcctttcaacttagcttcactcttaagttgaatgagttcactctcttgatgagctcccttagcccggcaagcaccagatttgctcttcttctccttcacaggcttaggagtaaaatcctttgggaaaagcccgtacttcacaaagttgtccttggaggtcaacgaaatgagattttggtcatcccccgacaactgagcaagtctttgagctctatccctaagagcaagcgtgaaaggagggcggtgaatgtggggatctgttagaactgagtatgggtggtgcccatgccttccaccatgaagtactcgtcaataaaatgcccaattttgttaacggccttgtccccggtgcccgtccacaacttgaagactggttgagagaagtagaagtaccctgacctgccttacttaggggtgaaattcaaattaaaaaactagcttacctcatggggagagggcatatcccacctctgggaggcatagagaacaaagagggcggacacaaagtaccttgccttctatgaggaactgcagcagtaagttcctcctcttcctccgccttagag

SEQ ID NO: 147780 - DNA, 580 bp, Cannabis sativa
tttcttgccttctttttaggttggtttttttgtctttttttttatgaaatgaaacattaaatgaaataaaaatgaaaaaaaataaaaataaaattattactttctattttttaagtaaaaaagttgttctcaatcccatatttaatggtaataactattttatcaaattttttttattctattcatttattttttaaatacatattctattcattccaatgatattgtttttttatcttatattataatcctttgcaattagctttcaacattccatcaaaagctaaaaattaagagaaaaaaattataaattttaaatagaaggttgatgttagcttaaagttgtaatgggataaataataattttaataaaattgtttaaattttttggtgtttaattttgtaaattttatcgtaatataataatatttgaaaatattattattttttattgcatttttttaagggcccaaattttaagattagaacagggcctcaaaaatgcttaagacggccctgtgtatggtatatgatttttgttgtctataatatatcatttatttaatatgatatttagttt

SEQ ID NO: 147781 - DNA, 542 bp, Cannabis sativa
tcttgatattgatccgtttttagagatttttctatcgttggaaatcttattcgatgctctaaaatttttatcaagaaactattgaccagttcggtgttctactatgtcgaaaattatcatctttctactattgttgtaattcgttttctttatatttccagaaaaagtactttcacttaaaatagaatacctctctcgattctcatccattaatgatctatatgtggtttcaaagcttattctatttcccataagttttatgaagaaactttttgttaattcgaagtcatactatgttaaaaaagttagttttcttcaatatcatgtgattcgtttcttgaatcttgttcctgcaaaactgttttggtaaaattctaatatctctttgaatataattccaatttcaaatattttggtatcattggaaagggaatttaatttcctcaaactttgatgataatggtatcttctagttttcaaccattcaatgtcaaaagtttgtatttttgctaagtcgtgtaattcgttactccatattcctt

SEQ ID NO: 147782 - DNA, 899 bp, Cannabis sativa
  modified_base (335)..(341): a, c, t, g, unknown or other
gtaggttctgcgaatacatgtactacggtcggatgggtggataaattttgtattgttgatgttattttgtttgttctgtattgttttatttattttgtttgttattttagacatttttaaaatttctgggaacgtccaattacagtcgttatgctgccaaaatttcggtagaattagaataaattttactaaaaaagcatcaatattgaaggaaaagtacataacacaaataactagttaattactagctagttgtaagaaattaggtgataaaacacaaataattatatatatttatataaactttgcaattataaatgacaaaccaaacaaannnnnnnattcactttaggaaaagtcattccattcccagatccattccaatcaactaaacactacctaattataaaaattaaatgagtacaattacattttgaagtacattgttagaaattattgattacttaccagatcttctcttacgttcaccattccattccgaccttttcgatgtctggattggatttttgctgaacgttcccattgcaccttactcaattcctacaattccaaaaaaatacattagctaccagtacttgtatttaaaagtttatcttagtacaaatataattagtacctaaaattcaagagttagttgactttgaacaaatttcaaccaatccataaggtcaatttcaggatgcttttcagggacatatgccaaatgttccaaatcattttcttttaatgcaggcatgatgatatcttttgtcattccattcttgaagtctttcattaacttcccttcaaggatcaggcaatcatgtttgaaatcatcttgcactataaaacccgtctagttttaaggaaaacaaacatgattagagttaacatctgaa

SEQ ID NO: 147783 - DNA, 614 bp, Cannabis sativa
agacttgtgtttttgaagcttttactttggttgagtttgtgattttgagttataggggctgttaggattttaattgtgtatggttagaattctaagcttattttaagttaattttaagttcttgttgctggttttgttgtttgtggtggtggatgattaagtttgagtttgaaaacttaaattgtcatcaatggcatattttgattcagtgtgtttttctggtttctattggttagattatattgtgtatggttgttttagatactttagaaggtttggtggcatttggataagttttgagaaggttatggattatttggggaaaactggtgcaaaccggttaaccggtttgccagtatctgtaaaaccaattaacccgttttggcagattccccaaacaacccattttctcaattcttgcccatttcagtgccttatttgggtgtttctctatttcctaggatattgtagtccctattagtaatagcagaaccttaagttataggttcgggtttcccgaattagggttttaacatgttatttaccctgttatgttatgtgattagggcatccatccagcacgtgactttccgttcaggtcggccaactcactt

SEQ ID NO: 147784 - DNA, 547 bp, Cannabis sativa
tataaaataatataaaataatatgcgacccgaagcgacctcgctaaccaatataaagcagcagcctgacgaaacactaaggcatacttaagtcattttagcgcggatgccgctagggttaaaagcttggacgacaacacgcaacttacaacccttcaggcaaggatctccacggatccattaatcgccgggtgcgagtttgggatgacctgcaaggacatccggtaagaaacatcactgagttcaatgagagagctcaggtgtttgtccggaaagaagaagcccaaaaggaaagaacttgttgaaaataagcttgggaggtaaacccagcaatgtttcaacaaggactgtttctacgagaattgataactcggaggtttctggtctaaaaagaaaggacggagttagggaaccgtcgaaggatagaaagaaacaaaagaagcattacaaatatgtaccagtgtatactatttataccgagcttaataaaactcaagaaaatatttaccttgcacatgagcagaaggtagcctttggtaaacccgagc

SEQ ID NO: 147785 - DNA, 1331 bp, Cannabis sativa
atttagttgtttgtttgttattatttagttgtttaaaaaaaataactttctatttattttttatggatacatatatttttgagttggtgtacaagcattttgtagttccttttaatgttttttttttttaagactattgatatttttttttttttgagttaatgcaacgtgtcatcctatttaaagtgtgtattaaagtgaggttattttttagttgtttttttactgttattaagttgtttaactaagttaaaaatgattatgtatttagtactttatggacgtgtatatttatcagttggtgttgaagtgttttgtaatgagtaaatgcttttaaatttagtttataaattacaagtgttttttttttcttggagttgattatgcaatctctgaaattatttcatgatgcctatttattttgcatattacagtataattgttatataatttttttttttttgttatctagtcgtgttcaaaaaaaaaaatgaatgtctaaacatatttaatttatcatggacacatattaaaaatgttgttttattattttttttaagattatttgtttttttttttaatttaacacagtgtgttggtgcccaataactttttattaagaatgttgttttattattttttttaagattatttgtgtttttttttttcaatttaacacattgtgttggtgcctaataactttttattaaaatagagttgttatctaattgtttgtgcgttgttatttaattgttcaaccaagtaaaaactaactgagtatatgttttatttttgatagatgcatatttttttgagttaatgtactagtattttgtagttttttttttcgagatgatttatgtgttgtttttgagtttcttttgagttgatgaaatttgttgttgcctaattaatttacatcttaatatgaaattgttatttatttatattaaagtgaggttgttatcaaattatttattttacatatttttttgttatatagtctatgttttagtttttatgttacatattttttgagtttatatacaagtattttgtagttactttttttttcaagttaattttgggtttttgtgtctttatttttatgtattattatttttaattttaagtttatgtgtcgttatttttatgtataattatttttaaattgatttgggtttaagtacatttatttttatatgtaattatttttaaaaaaaaattcaaaaaattttaaagttagttttggttgttttcaagttgttattttgttgctaattagttgttgtattgagaaaagaagtccaacacgctcaagtgcactttgt

SEQ ID NO: 147786 - DNA, 1214 bp, Cannabis sativa
aaaataaaatttaaaaaatttattactaaaattaatcacacgtacaataaaatatttaaactttattttgtatcttaaattattcaatttttttttaaaagaatttacaaaagattctaaataattaacttacacaacaaaaaaaaaagaaaaatatatgtttaaaggtgaaacaataattaattaaaaagcttttctctctctggagtcttctaggaggtatgcgaaaccgtttccttgctgctagtttggtcccaagcatggtgtttctcgtccaccctactcagttaagtggtggttttctttcatcttccctctctttttgtcgtttttgttccttttgtttcatgattaagggcattaattgctctgtgtgttatcccctgttcacacaatcccatcgtattaattgtaaacccactttttctctttattctctttctctttcttcgttttacttctctcctgggggtttatgttgggatctttggcatttaataccacctgagcatatctctagccatcttttctctcttgaagattggaaaatgggggcggaggtctgaaattatgaagattttaatatcttcaccatcattgcgcctcttcaggtggaggctagggatgtgactaggggcgattcgagaaggcatctacggggtttctggttttatctatatatagtaagactaaggtatggtttctggcactttcccttcatcttcttagtttcttggtctgtttgtttgtattctgtgtatttttgcttttgctttcttttaaccatggatgaatttcttaatactgtttccaatactttagtctttccatctgatgaaaacactatcttcacgtatgatgctagttcttcctcttccactcctgcaaccattagccttcttcttaagctccataccattagaccatataataggccctctttgatgaaaaccctctctggtatttggtcatcacagtgtagattcctgtctctgtcactgagcatgctgatggtctgtttcttgtgacttttggttgtgagggggataagggtcgaattttagaaggacagtcgtggcactttgctcaaagtatcaccatctttgctgctcctgaaagttctttccctatcacccctgacactcttcattatgttccattctggattcaagtcgatggtataccttttatgtgtaagtcctttgatttagccc

SEQ ID NO: 147787 - DNA, 1335 bp, Cannabis sativa
tcataatcatctaattagggttttgctaattcatttcttaatttcagggtattacacacctattgcctaatcctagcaacaagaaagctaaggtcgtactttcaggctcatcctgtgtgggtatacactgaccaaccattacgtcaagtattacaaaaaccggacgcctctggatggttgctcaaatgggcggtggagttgggccagtatggaatcatcttttagccctgaacagcgattaagggtcgggccttagcagattttgtggttgaatgtacgggtaaagatgaaagcacttcagaaagtaacctagagccagtacaagtacctcaggcgagcattagtaaagacaagccaacctggaagttacatgtagagaggtcggctatggatcagctgtctggcacaagaatcgctcttgtcacacatggggggcagcacctacacggtgcactcaaatttagatttaaggcatccaacaatgaagctgaatatgaagcccttatcgtcggcctaagacttgctcgagaattttaagccaaacacattaagatctgtagtgactcgcaattagtggtaaagctatgctctcaagcaaattctaagacaagaaaacacaactgttgatgaactagcctgacttgtgagcagcaacataaatgataaagcgaatctcatccccatccaatttcttaaaaaacccagtatcactgcatggaggagattgaaatgattgatacattctaaaactagatgacgccaatagcagcctatctcaatactggggaactcccaaataacaggaatgaagctcggaaaatgaggagaaaggctgcacagtacatcattgtagagggagttatgtgtagaagaggattctccatgccactactcaggtgtgttacacaagaagaagctgcacgaattttgtcggtagtacatgatggattttgcagcaaccacgcagctgggcagagtttatccaagaaaattataaggcaggggtatttctgcccgaccatgattgaagattcgaaggcctacgttaagaaatgtgataagtgccaaagattctcaaagatatcccgcgcaccgccctacgaactaacttagatgcaaattccttggccttttgccatttggggaattgacctgatcggacagttacccaagggaaaaggcagagtacagtatgcagtggttttaattgattattttacctaatggacggaggctgaaccactggccaccattacgtccaaaaaagtctaagacttcattgtgaagaacataatttgttggttcagattaccgtacaagatagtctcagacaat

SEQ ID NO: 147788 - DNA, 698 bp, Cannabis sativa
tagttagacttagtgagccaattctttatttggcctattacacttagcggggatttgatggtaactttagatgttatagctgtattagtagtaatgacacgaggtatacatggaagctctgttgttaatatagttttgggcatctacaataataatgtgtgaaatgaaaaaaaatatataaaagataagaacataaatataaaaagtattaaaaagaattacaaatttaactaaatgaacagggtcgcacgtggtatgaaaatatatagtgtaaccaggtgcgaccctatgcgacctttatggtcgtcgcacataatttaaaaaagatttgacaataaattgtgcgactgtgtgcgaccttagtggtcgtttattgttgttcagagcaaattcaagttacatagtataaattcaaggtcgttcatagtcgttcagagtaaattaaagttccttaaaattggttgaagagcataaaagaccattatggtcgcatagtgtaaattcaagatcgtttatggtcattcagatcaaattcaagttctttaaaattggttgaagaccataaaagactatgatggtcacataatgtaaatgcaaggtcgtttatggtcgttcagagcaaattcaagttctttaaaattggttgaaggacataaaagactattatggtcgcatagtgtaaattcaaggtcgtttat

SEQ ID NO: 147789 - DNA, 547 bp, Cannabis sativa
acatgcaaacaatatatgtgagtcaacagacttagtaagaaacgcatataacaaatagcataatatcaacttgtatttaggtgcctaaacacctatctacaaggcttaatagatgataaaaaatgctcttaacatttggtactatcgaccatgatatcagccattaccagttctatgatcacgctgcgggcccggtactatgttcgtaccgctatgataacatcaataatacctaagagtataattaaccatgatatcacttttaaccagtactatactcgtactgccaacctggtactatgcttgtatcgctatgatagcatcaattaatactaactggaattagatatcagtcaaacccaatactatgcttgtactactaacctgacactacgattgcgccactgtgatatcaattaatattataattccaagatttttaactaaataatataagtgtcccgtttaggtgagagtcaaatgtatcatcagttaaataaagttgtcagctcatccaaaatgaacactattttagtaaccttttatt

SEQ ID NO: 147790 - DNA, 568 bp, Cannabis sativa
  modified_base (139)..(144): a, c, t, g, unknown or other
attacactaatatcttaaattaattttaaaaaatccaattaatttaattttgataattagatttgaaatttgaaaaggaaaaatcaaaacacacaactacacaaaaaattagaaattaattccatgaaatagcatgaannnnnnaagaaaacgaaaaaaattgtaagtggtacggacaatatgcattgatagtatccaatgcatactgtccacacgcacaagagggttgggtctcaccgagaggacatggggcaggaggctacatgcagcgtctcggcgcgcgcccagggtggtcatcaaacaatgtcaccctatcctgagtgagagaactcggacacaaggttgtccgaagtcgcacacgtccgaggaaccaggggatccgcgcgcgtagggtgagtgatgtcaccctgattttttttgattttcaaaaaatcataactaattcaaataaaatcagatttaagttctgtgagaaaatgaattgcttaatttttttccaaactatccaacaaaaataatcccagaaacgaaaattcaattattattcataaaatttcacaagcatcaa

SEQ ID NO: 147791 - DNA, 600 bp, Cannabis sativa
tacaataagcaaaacaatgtttgagaggcaaaagtagattgtcataacacagcttcagcaatccaattccaacattatcaacaagagaaggttggcttggccaaccttgtattgcagcaataaaagttttaaattctgagtttaatccatgaataattattcttctaattctagcatcaaatatactaggagaagaatctaatgtagaaatttcacgacaaagggattttaccttggtgaagtattgcctgattgagagaagctcgttctccaaaagttgcaatcttatatcattcttcttgttaaacaatgatgtaaaagtatcccatgcttccttcggtgtcttcgccagcctgatgtgctccaacatctcatctttgactacggtttgaatagcaaacatgactttgccgctttaatcttccatttcttcaaagcagttgtgttctccgattgtgtgacttcattgccaccaacgatcttccgtaagtcttggccttggagatatgcctccatgtgcatcaatcacgtgttgtaatattagttgttaagtttcttaatttcgctaaccacttgaaggtcacccatcgtgcaagctct

SEQ ID NO: 147792 - DNA, 911 bp, Cannabis sativa
ttatattttacactttattaatattaatgtaattataaatttttgtgagggcgtaaaaatagtatggtaatatcacactaatgtaattataaattaatgtgaggggcaaaaaacaaaaacccatttcataagaaatatacaatcatgtaaagatatatatttgtctatattttacattattttatactttacactttattaatattaatgtgattataaattgttgtgaaaggtaaaaatggtatggtaatatcacactaatataattataaattaatgtgagcagcaaaagtggtatggtaatatcacaccattacctttataatagtaagaaatatgatataatttagtttcaatgttttatgataaatatgatataatttagtttggacattttttatgaatttttaaagcctataatgtatgtttaaaaatgcttatattgtatttttttttttgagatgaaaagcccatatattgttgtttgtagtttctggaagttattttcgtaattttatatttttaaatttttgtatcttacagtgtttttttttcttgtaatgatgacgatttgattgttgcttctccctccactcttcctttttcacttttcattttctaatcaactgcctatatacttctctctctccctctctatttcacttcattttttttctttttttcccctttcttcctccattcttcgttttatcctctatttttttttctgctctcagtttttggtcaataatggtggcaatgtgctttgagtaagagtggcatttctcgtgtattgttcaatgtatttattctttttttctctttttctattgactgattttagagtttcttttttcatctccattttttagtttttggaagttatcattgttgttatacaatttttccaa

SEQ ID NO: 147793 - DNA, 561 bp, Cannabis sativa
tggataaccttaaagtttatttttgaaattaatgagttgtcacacaatactatatttttaaaacatttcgcactaacaattaactatatagtttcctattataaacaacacaataaatacctcattaactttacagtgtaagttgagacaaaaaaaatcttatttttaaaattatcttgctataactacttctcgtaatattgtataaagaagaagtttttatgtcaacatacaaagacaacatactaccattaaatgatataacattatgaatatatttgatatgagataaaaaatatcattgtactcctaccaaaattcaaaatactagtatgccgaccaaagaaaaagagatacaaaaagcactagattcaatatcaaaaacacattcgaacaaacatcaataaaatattaaaaaaataaagacaaaaaaaaaaaaaaatcattaaacatacacaatcaaaatcacattaaaattctaaaacaaatacatatacaaaaatataatttaacaatttttttttgaaaaaatacactaaaaaataaaaatatatcctaatc

SEQ ID NO: 147794 - DNA, 833 bp, Cannabis sativa
  modified_base (760)..(779): a, c, t, g, unknown or other
aaaaaaaaaaaaaaactaagcatcccagagacaataaggaaagttgtctaaccacacaagttgtttatccatctaaaaggcatgcaccgctaatccatgtgcagcgcattggccgtccgatgaacatgaattagggatacccttagaaatctggataacaaacttgccaaatcatctagtaaagatcataatattgccttttactaaaagcagacacaactataaggaaatcagtttcaactatatgaacagtatagcctagagaaaaaatccaatccagagccatcacaatcgcaatacactcagcttgaaccactaaaaagtaacctaatattagttttgaaagacatgctattatatttccatctgaattttgaagtatagctttaatatcaatagttgttgagtttttatcaatggatgcatcaacattcaatttaaatttttcttttgaaggaggaacccaactactagcataattacatctgacattattataaacggaatttttatgccatccttgaatgtgttccttaaatattcctttattcgaactacaataatattcaacgatttagactctgaatgtttatggtttaattctacagataaagtatggactttgagtactctgaatgttttctttctattgaggttaagtataagtttagaaagaattaattaatgattgatctcaattaagaaggaccaattgaaaataggcatgcttaggtcatatttgttggatatattttaccannnnnnnnnnnnnnnnnnnngtatgtttcattaacatcctaaagatcggaagagcgtcgtgtagggaaagagtg

SEQ ID NO: 147795 - DNA, 863 bp, Cannabis sativa
aaatacaaaatttttctctgttcattaaaaaaaaataatttaaaaaattataatattctatgaattctaaaaaaaattaataaaaattattaaaaaaacagttaaaaatattaaattaattaaataatattaagtttatttaagaaaacctaaattattcctaaaaaaatattttcaaaaatattttattataaacacttatcttaaaaaatgaaactaaaactattgaaaatccaataaataatttaaataaattaatatttttttaagaaaaaattaaacttatttatatttataaactcatatatcttaaaaaataaagaaaagtaattaaaaatcaaataaaaatataaaattattttgaaaaaaattataaattaaactagaaaaatattatgttaacttaagaaaatttaaatttttggacaaaaaaaaatagactcaagcttgttcccgtaaatttttttacgaaaattaaaattttaatatatatatttttatatctaaatgaattttttcataaaaataaataatttctaaatcatttaattagttttaatattttaattttgtatttagttttcttaatcatttaaaataatttttttaggagctaagttaattttttaagaaatactataaaacatattgaatctttcttatttttatttttaaggaaaatgtttgatagttgtcaaaatttagggagcaaagttactaattagcaaaaatacattagcatttaaacagaataatgaaatgaaacctaacagaaagactaaatttctgtaaaagtaaaaatataaagaaaattcttaacaagccgtatattttagggaacaaaattaatattgtcgaaaatt

SEQ ID NO: 147796 - DNA, 654 bp, Cannabis sativa
atcttccctgctgatttcttaatacttgacatggaggaagatgagaatattcctatcattttggggagaccattcctagcaacggggagagcattaatagatgtgcagaagagggagttaaagttgcgtgttcaaaaagaagaagaaactttcaaggtatttgtcgcaactgaaattcctacttgttatcgaatggaagttgtaaaggatggtcgagaaatcactactaacaagaagaaagggaagtctaaagaacactttcgaactttttgacgacgtatgaaaagaaagttgtgtgggaattgtgaaggtaactcacaatccaaggataattttaaaaattgtaatgttggaggacagttttcttcgtttggtacgagagccctcatggatgcaagaggtggattctacccaccgccactaccactgctaccatactgacgtggcgctcaggtaagttccctttcctttagttttaaatgttacattgaggacaatgtgttattttagtttgggggtgtgaacttaaatttttaatttttaatttaaattttagttctaaaattaatattttttttagtgtgagttaatttgtttaatgtgagttaatttaaaagtaggtagacagcatgatttaaaaaatttatttatttt

SEQ ID NO: 147797 - DNA, 640 bp, Cannabis sativa
tgattaaacacatttaaatcataacattttggaatgtctcgataggaactcggtactagtgaccttgatagcgagctggagctttttcgaggttgatgatgtacgcctcgttgcttctttgcttgaaggcataacgcttcattttgacaatcgtagttcttaataacaaagactacttcagcagtcatcattcgaatgttagcttctactcgagagaaccgattcgccaagactaataacctcactaaaagatgtctgaagctaattggtgaagtactaggatcatgtcttcttatagcagataagcgccttgctattagttgtttgggttcgcctgactgttatacttagtttgtatattatatgctatgtgttttcatagtcattatgcatcgcttatgtcttcccaagcgtaacgaagttgatgtctcgccttgtgcatccaatgtcatatggtttctcgttaatacatgaggcaacagtttatatatctttatctcgcataggaccttatagtcaggaagtaacaaatatactctctcacttccacatttaatgagttattccattaaatgtaattagcgttacacgcatcgatccatattctccttaacttcacgtgtcctccattgaaatggta

SEQ ID NO: 147798 - DNA, 710 bp, Cannabis sativa
  modified_base (514)..(515): a, c, t, g, unknown or other
tagggcataaaacccagcacctacgtgttgctctcacacgtctaaatacagtaaggccttagaatggttcatctcggttatggttacagagtccaacccgattatgacttaaacgcataactcttaaatctcaatataatcatattagcatggcatagcatttactcaacttatatcactagggtactaaccctaggctattaaccgctcatattagggtaataaccctaattccggttacaattactcacatatatcatattcaacataagtgccagcgcgcatactctacgtgcaaactactaccttacttgttgacccgcaataacagagattccaaaccccttggtgctcctgatcaagtgccggtaatcctagtcacataactcgggatttcaaaaatagggttaatccctaatttcactttcacataatataaacatggcattcaaaacatagataatcaaataaagctcggaacgagctttccaatgatataaagaacgtcccaaanngagtcccgagtcaaaagttattgccaaaacaaaattgggaaaaacatactttctcactgccaaacctagtcgcgacggtcaaaaatactgggtttagaacaccaaaaaactccatttttaaggccttaaaatgccaacctttcctagatttcgaaccccaaccaaacataaggtaaaaacacaaaattcatgcat

SEQ ID NO: 147799 - DNA, 609 bp, Cannabis sativa
ttatgaattgattaatattgagaaatagttaatattgttatataatgaaaatactaatttgttgaatattgataatgtgatgttattatgcatgtgatatatgggctgacctgattaagtgatgcagttttcctggcaacgtactcggcataagtacgggcgttagtgatatatgatgagtaccgagtgtaggtacgagcttacctgattaggtgatgaaattttcctagcgacgtactgggcgtaagtaccgacgtcactgatatatgatgaataccgagtgtaggtacgggctcacctgattaggtgatgcaattttcttggcgacgtactaggcgtaagtatgggcgtcaatgacatatgataagtaccggacgtaggtacgagctcgtctaattagatgatgcgatatattggtgctagattgtggcacaggctcacctgattaggtgatgcaattatatgatttatgagtgcaggtttttggcaccggttcacctgattaggaattgcaattatatgatatatgggtgcaggtttttggcacaggctcacctgattaggtgatgcagttatgtgacatatggtgccatgctatggcacgggctt

SEQ ID NO: 147800 - DNA, 877 bp, Cannabis sativa
ctttctgccatataagaattcatagggagccatccctatggtactctgatcactgttgttatatgagaactctatcagtggcagatacttactcccggagctctcgaaatccataacataggctcgtaacatatcttttagtatccgaattgtcctttcggattgtccatcagtctgaggatggaaagctgtactgaatttcagtttggtacccatagtccgttgaagactctatcagaatttagaggtaaacttcggatccctatccgaaattataggctttggaacaccatgtaacctcactatttctttaacatacaaatctgcatactaatccactgtaaaggttattttcactggtagaaaatatgcagacttcgtgaatcgatctaccacaccctaaattgaatcatataaacctgttgttcaaggtaatccaaccacaaagtccatggtgatatcctcccacttccactcaggaagtgtcaaagactgtaacaaacctacctgtctctgatgttcagtcttgatctgttgaaatgttaagcatcaagatacaaattctgccacattcttcttcatctcgctccacgagaagtagggtttaagatcttggaacattttggtggtgccaggatgcaaggattatggagtggtaggagactattcaagaattttgtttctaagttccgcactacttggaacacacaccctggtcttgaacaacaacatcccatgatctgacactataaaatctctggcttgactagctgacacctcctcccttatcttcactaattctggatcagttaactgagcaacttaattcgttctaacaaattagattgcagcgtcaagttatgaagttttcctacaa

SEQ ID NO: 147801 - DNA, 650 bp, Cannabis sativa
aagacataagtcacataactttagaaataaaagggaaccactaaaaatgagttttttttttcttttgcaaataaaataaaatatgtatatcaatatatgaacaatgcaatgaaaatcaaatgatgattatttttttatgtgaattggtttgtgactatgagtgaatcaatagtgaaaaaacaattatgttatgtatgaatgaatatgaacatacaacaaacaaaaaatacattattattatatataatccatacactatatcaattaataagtaaataacaacaagtaaataatttttaatttaaataatatgtcaataatttttaatttaaattaatatagcaattgatcataaaaattaataaaatattaactttgaaaaattaaaagcttacaattacaatacaaggagatagaaattgaaaagattgcttttctcgtataatattgtatattgatggttgataagtgatgaggattgaggatgaggagcatagttggtaaattgtaaattgtacaggtaattttttttttttttgagagagagattacatatttagagtcttgagaagagaaataattttagaaaaagagggaaggttggtggagcttggtgggaatggatggaatattgagagagagagagagag

SEQ ID NO: 147802 - DNA, 751 bp, Cannabis sativa
ccactggtttcacccagtctcttttagaccacacactgttcatcaaaaatgataaaggcatttttcttgccctattaatatatgttgatgacattgtgattacctctaataatgatgatgttgttacagattttaaacagcaacttaactctgtgtttcaacttaaagacctgggtcctttacgttttttcttgggattagggattggtcattcttcctctgagatttctgtctcccaacaaccttttacccttcaacttttaactcacacgggttttttaggagcttctactgctcccaccccaatggaatccggcattcggctctcatccgatgttggaaaaccattagacaatccaaaaatttaatgcagcctcattggtaaacttctttacttaactattacacggcctggtatctcttttaccgtaaacaaactaagtcaatttctatccaatccgagggttccccacctcactgctactcatagaatattacaatatcttaagggtacctctggccaaggactattcttttactcagcatcttccactaacttatctgcttatgttaaaactgatatgtcaaacatagactttcatcttaaaaaaaattcagatgctaattgggcctcttacagtgacactagaaggtttgtttcgggttactgtgtctttcttggcagatctcttatctcttggaaatcaaaaaagcagtccaccgtttctcgttcttccactgaagcagaata

SEQ ID NO: 147803 - DNA, 716 bp, Cannabis sativa
  modified_base (188)..(192): a, c, t, g, unknown or other
  modified_base (430)..(436): a, c, t, g, unknown or other
tggcaccggagattgggacatatctccattgatagaattaaaaggttggtaaaagatggggtactcaataccttagattttactgactttgatacttgtgtggatcgcattaagggaaagaaaaccttgaagtctgtcaaagtcagtaatgtgatgaccgctttagtaatttggattagtaaaggcannnnncactaatttctgttattttataataatttatgaatttaattattgtggatcccaatatttagaaataaatattagagttataatttcacaatttcggagattttattaaactttaggggtattatttgacttatatgtgaaatatgttattttgtaatttttgctcggcattagcgaaaaatgcaatggatggctagtttgatcacacgggtaagcttagaaccttatttcttagtgnnnnnnntttttgaggaaataaagtatcgggattgagcggggttatggaatttgactattttacccctagcttttggaatatcctagttttatgtgtaagggcattttggttatttggttaaatggtgggataggtggctgccctagcttggtgacaccttgcaaccattttctcagccaaagataaattaattaggtcattttatttagtgagaaagaaagagggaaattaaaggaaaataccaaaatttgagagaaagctttctttcttctctctctcttcgaaa

SEQ ID NO: 147804 - DNA, 603 bp, Cannabis sativa
  modified_base (168)..(170): a, c, t, g, unknown or other
cagcagggtgctcctacaatccctattcaagaagctccagtggcacctgcccctgttgtccaggccgaactagtgattgcggtgaatcggatggaacctctgtatgaaaggttttgcaagcatgcacctccagtttttccgggaggtccagatgtcatgaaagccgannngtggctaacagtgattacgagaattttgaatttcatgggcctcaccgggaacgatagagtggtttgtgccacttttcagtttcaagaagatgctttggtctggtgggacatggtgtccatgatacacgatgtcacaacgatgacctgggaaaagttccagcaacttttcaatgccagatactacaacgaggccgtcagaagtgccaagaggaaagagttcacccacctgacccagaaagaaaatatgagcgttactgagtacacaacgcagttcgattggttggcgaggttggcctcgggaattgtgccaatcgattgtagtaaaaaggaaaaatatctagatggattgaatgtgaagattaaacataacttgatgattactaccgacgacaaaaccacctatgctgaaatggtggaaaaagcactgcgagct

SEQ ID NO: 147805 - DNA, 916 bp, Cannabis sativa
ggagatcaatctttgagaagactgtcatcctgtgaagttgataaaaaagatcatcgatcctaggtaaatgatacttatttttgaatgtcagtttgttcaattcctgataatatacacatacgcaaagatccatatttcttgttgacaaataatacgggagctccctagggtgacacactaggctatgagagccctaggtcaagcaagcctcgaagctgaattttcaattctttaagttctgctaaagccattctataaggggccttagaaattgattctactccaggtgccgaatcaataataaaatcaatttctctctacggtggtaaaccaagaagttcatcaggaaaaatatctaaacattctcgaaccattctaatgtcttctggccgaattgtctcatgccgtgtggtatccaataccacgaccataaccctaaacatccatctcgtaacaattctctagctattagtactgaaatcactggtatccgagatgcctaaactgatctgacaataacaaacggttcctcaccctctggttggaagattaccatcttccgtttacaatcaatactggctcagtacttggataataaatccattccaagtataatatcaaaatttgctaaactcctttctattaaatcaacactcaactccctatcctcaattctaatcgacatggacctaatccaccttttggagatgactaattctttgccaggcagtagggttccaaaccctgtatcataactatcatgcggtctgcctaatttattaaaaattctagctgccacataagaatgagtggcctagagtcaaataacacagagaattaagagttgttgaccgagagctggcctgttacaactgcggtctgcagttggtgcctttcttttttggtcagtggtcga

SEQ ID NO: 147806 - DNA, 580 bp, Cannabis sativa
taaatgaagtaatcatgtaaattttcctatttttaattcgatgtttctcgcaaccctctaagaatacacaactccattattaatctttctatattagtattcctcaaatttttttatagtcacctttctctttctaattttatattttttgctaattctttttagttatcgtgagatttatatgttcattatttttttttctttttctttttgatatttctctcaaccctctaacaatacaaaattttattattaatctttctatattattattcctcaaattttttttttgtagttacctttctctttttatttttacactttttgctaatttttttttataattatccttagatttatatattcattgttattttttttcttttctttttaaaagttatccatattattaactttaatcgataatgatcatgaaaaggtcaatgtgtaagtttattagtagtaatatgtcattagtccctttctattttaattttatattgtgatataaataaatattatatcatattatttacaaattattattgttgttattgcagtatttagtacagggtcggcc

SEQ ID NO: 147807 - DNA, 604 bp, Cannabis sativa
gattctggtggcattctaaggcctctcaaggtggaggaattcattggaaaagctaggataagttgtgtctgcataaacataaaggtggattgggctttcgaaatttgagggactataatttatctatgttgggcaagcaaggttggcggctgttaactaatccgacttcgcttgtggctcgtgtttttcaagctagatattatccccaaggttcatttcttgatgctgagttgggagctaattcgagttatgcatggcggagtttatatgaagcgcaagatgtggttaaattgggggctagatggcgtgtgggttctggttcttcgatttctgttcttcatcagccgtagctcccttctgtggacaatccctatgtggtttcttctcatgaggctcttcagaattgttctgtctctaatattcttcggcctaatcgaatgtgttgggatatggagcttttagaggatttatttgagcccagagatgtggatctcatttgtaaaatttcgctgcctgcgttgccagaactgggtacatggtattggtcttttgaaacttttggtggatattcggtaaggagtgcctatcgtgctttacaagtgcg

SEQ ID NO: 147808 - DNA, 637 bp, Cannabis sativa
tatataataatataattctataataatacaaaattaaccagttagggtttgctaattcattctcttgatcctagggtattacaaatactctaaaattcattcttgcacttactgccattaataattgtcaattatatcaaatggacattaacaatttcctccatagaaatctaaatgagaaagtttacatggcacttcctccaggctccaaacatcaaggagaactcccttctaataatgttgtatgtaaactacataagagcatctatggccttaaacaggcctcccaacaatggtatgccaaacttagtttcacattggtaagtgaagggttcaaataatcctcttcggatcactctatgtttattagatcttctaacaacatttttcttacgattttagtttatgttgatgacattttaattcgtagcaataactctaacgatgctgaactatttaaaagatagcttgattccaaatttaaactcaaagatcttggttctttgatgttctttcctggactagaagttaggaggttgtaatacccagtttaaaatagtattttttttttgtttggatattgattgtgcgaggataattatcttttatttgtgttgttagtgagttgatattattg

SEQ ID NO: 147809 - DNA, 924 bp, Cannabis sativa
atcttattgaaatgagttttatttagggcataaaacccaacacctcctactacattgtttcctccataagagaataaacctcgcacaaaggtttgtattaattagtggtagcttttgcgaacagaatggtcgctcaatgtcctaagcttgtgaatcatggtttgcaacaacaaagatatcagtccaaacctcctcatatgggtaaccagccttagtttaacaaccgaattcgacctccacaatttagtattgctgcaactgttcctccatttagctcttacgattttgatgctctgttggaatagtttcaaaagctccttgctacttaacctaatgtcatgtttgtctcttctttggtaggtcaaccacccattagcacgtcaggtatgccaccttctatatgggttttggactctggtgcttcacaccatatgtctatgtattctacatcattcacttccttgagtcctacatcgtctatgcctatcatgactgctgatggtactcccatgccattagctggcattggttctgttttcagttcaaatttgtcgcttcctaatgcttatcatattcctaatctttcattgaatcttatctgttggtttgtgtgattctagttattcagtatatttttcttctacttcttgtcatgtgcagaatccacagtctcagaagttgactgggactggcggtaggcaggggggattatatgttttggatgaactaagattaccagtatatgcaactcctagggtttaatttgtcttttttttgtttgtatccttcgtcttctagtttttatttgtggcattcttgccttggtcatgtttcagagtctcatttaaaataggctaattagtaattttctccccgaactttgacatgtactcaatcatgccccctaaacttttttggctgtta

SEQ ID NO: 147810 - DNA, 535 bp, Cannabis sativa
tcattgagagcctttgtgaaaaaactctgaaaaaactctcctttcttttgaagaaaaaccatctccttcatggctgaaaacccaaaagatgttaatacaccacatgaggaaactcatcaccgttctgggaaagagcccatgggcaccagaaggtcttctgatccacagtccacatggaccacccgctccagaatggctcaacctgagggtggccctagcactcggaccacacattccgagaggacccaacctgacgttggtcccagtacgcgaacaacacgctcgaggagaactcagcgtgagaatggccaaaatcctagaactagagatgagaagcccattcgtggaggtacccagcctatgggagaaggcacttatgaaatggacacccgtcgccttagacgctgcctggaggaggcacagcggcgggacgctaagttaaaacgcgatgcagccgcagctagggcggcgcaggggctaacactcaaaatcaacctgaacctagcgtgagaagaccatgaggcagacctcgtgg

SEQ ID NO: 147811 - DNA, 607 bp, Cannabis sativa
tttattgctcttttctatattaggaaagaatcatttttcagctggatttttccttgtatggaaacttcttgtaagagaaaaaattctcttatgaaatatttgttttttaagaaaactttgactattatcatttttcttaatgagttcgattgtgtcttgataagatcagatcaaacacactgtttatagcaggtatcaagacccaatacatgaccggacacatttttggcaagtttccttttctggtccgatttgatgcgacagaatttggatctgatgctacaaatcagggttttatttaggaaatttttgtacaattgtagattcgactttgtggctgcctttagggtttctatgttctataaatagaacctagtaaagcagccattcgaatcaactcttctagcttttattttttgtattttctcatttctgaagagagagttctttttgtgagaatctagttgttcatctaggttctagtattttcatattcattcttactctgtcttcgaattgagtagaacacttgattgaacaagagagaggtcttcaggagaagacttgttcaagccttacttcaggaggaagtaaccactcacacttc

SEQ ID NO: 147812 - DNA, 701 bp, Cannabis sativa
  modified_base (649)..(652): a, c, t, g, unknown or other
cacttatgtagtacatgtgggccctcctttttctcacttacttcaccaactcatcataaaggcacataaaggagttatttctctattgcaatgaaaccagacagtcaagacaaaatgcttcaacacatgcaccgcattttatttagcaaaggtgacagtagttccgacaacatcaatattgctggtaaagtccctatttgtacaaacgttcgcacagggacatggggggcaaatgttatcctaatttttgtcctcatgatgtgacgtgcttatatggacaaaacctatgccacgtggcaatacagctcactagaagtaaggccaagtcagcatccaagccaacaaagaccccgacactcaaacagggatcaagtgacagaccaactcactcttaggagctggccagccacccctgcctagccccatggatggccaggccagggatagcatcatggccgtccagcctggccagcaccaagccctgactggtaaaggattgctcagtaggtccaacaagactctcctgaacgtggacaacattagtgggttgcaaactgggccccaaaagcccaactgacaggttgaataataactagaatctaagggtattttggtcttttgtaaatatctagctaactatcctattttnnnnggatttgaattgtaaacctagggtataggcctcctatataaaggcctta

SEQ ID NO: 147813 - DNA, 1187 bp, Cannabis sativa
  modified_base (545)..(547): a, c, t, g, unknown or other
tatatatacaattgtgaccctaataaatttctaacaatctcccattggccacatatgtatacatataaatatgttaacattattgagctcacaattttatcatcataaccgtaggcatgtacaatctcgttcattaactatatcaacataggatcaaagtaatttttattgtataaatcacaactaaacccatcaattgtcacatatatcagcatagttaaatgacatagatcaatcatgataatgtggtatgaaaattacatgcatggtgatcttttcatgtcaattttcagttagtcctactttactttatagagataaaaaatttagcttaatgtacaaagtgaaataaactgaataacataattttcgattaaaaaaatatctaaatacacatgtttcatgaaataaataaaacacactatataataaagacgaactctcactgaatctagatatcctcataatctaaaacacccatacaagcagtgtgctcatgaaggaccttaggtggaaaactcttagtaagggagtctgcaatcatnnngtttgtacctaagtgttctatacaaatctgtccactttgtaccctttcttttacaacaaagaacttgatgtcaatgtgttttgactttgtcgagcttctattgttattggaatacaatacaactgacttattgtcacaatacaactaaggggtctttcaattccatccacaatgcgcaacccggtgacaaagttcctcagccatataccatggttgaatgcctcataacatgtaataaattttgctaccatggtggatgaagctatgagtgtttattttgcactcctccacgatatacctccattacctatcagatatatgtatcccaaagtggatctcctactgtcttggcatctcgcaaagttagagtcagaatatccaatgatcttaaagtgacctaacctcctatatgtgagcatgtaatctcttgttctcttcaaatatctcataacctttttggctgctttccagtgatcaattcctggattgcttaagtatctgcctaacactccaacaatgtacgttatatctggatacatacaaacttgagcatatattagactcccaacagctgaagcgtagggaatctttttcatttcttgaatttcaaggcttcctttagggcattgtttaagacaaa

SEQ ID NO: 147814 - DNA, 811 bp, Cannabis sativa
  modified_base (765)..(784): a, c, t, g, unknown or other
tttagtcaaatttagtaggtacactacacatgtattgttgtttttattcctaaataaatatataaattaattatatttattacactttacaaaaattacaaccatactccgtaaaaaaaatattcttgtgtctagtatttttattaattaataaataattcatccattcatacacgtgtctaatagggtagacccttcatgaatattatttattgagatatagttggtgaactcattcattataatacattatctttgtgtttattttgttttttttctttttttgacatataggttgtgatttcatgccaattatatggctatcattcaatcacttttctttttataggatataataatttttatacatattttttttgacccaatttttatacatattttttttttcttccaatttttatacatatctaaatcaatatgtagaatagtatgtacattttttttcccttctttaatttaatttaacaaaaatattgtacaatcaaattttttattaataagaggaacttttaaattaagttgataaaaaattatcataaaccgaccaagaacaatcttaaacctaatataaaattaaaaaaaatgtatctttagtatctctatcgtatttttattttcttctctctaataatccatccacatgcttataaagtgtagatcttttcatgaatattatcttgtgatatgatgcccatagaaactctaagaacaaaacgtgcacttttcataataataataataatnnnnnnnnnnnnnnnnnnnntaataataataataataatgtatctta

SEQ ID NO: 147815 - DNA, 798 bp, Cannabis sativa
ggaaaaagactaaaaatagaaagaactctattcccttccctctctctctttgaaccagccctggtcaagggggattactgctggtttttggtgttttcagtagggattaaaagatctcttaaccaaggtaaaccctagaatctttttttttattattaaattccttaactttttacttggtttgagtagtgattttttcaattgatggcagttaggtttaaaaatgtttagggtttgaaatttaatgttcatttgagtttttttaagcttcttgtagctagtttggttgtatggaattggatttatgcaagtttgggtttgaaaacctaaactttgatctttaattgcatgttttagtttactaggtttttttgttatttattgacttaaatatgttgtgtataccctaattaggtactctagaaggtttggttacgtttggtgaagttttgagcaagaaatgagattttttaggtgaactggtgcaaaccagggaaccagttttacacgtacttgtaaaacctttggcagcgttccctaagtctttcatttcctcaattcttgtccattccgtgccataattgggtgattccctacctcctctgttagaataatccatagagagtataacagaacctagggttgtaggttcagatttccccgattagggtttttgatcatgtgatttacccggtttcattatgtgattagggcatccatctagcacgagactttctgttcaagtcagccggcacacttgaatcttgaaagaaggtaagaactgtgtataatgtgtga

SEQ ID NO: 147816 - DNA, 785 bp, Cannabis sativa
  modified_base (177)..(177): a, c, t, g, unknown or other
  modified_base (450)..(450): a, c, t, g, unknown or other
gaagaagaaggaacccacgatgacgagtatgaaggaaacttcgacgagtacgacgcctacgacgaaggtagctacacagagctggtactcttgagataaaaggatgccgatcatgaggctgaaatcgcagcccaaaaagaacaaaaccaaaaaatgcaagaggtgatgctggccatncaaaaagccatggaggcagcaggaatccacgtgcatcctaaagccatccctgctggacttggaaaggaaccagaagaatccttgccgagtacccaaaagcagaagtctagggaacctagccctataaggtatacctccaaagggaaccaaaagaaaaaccctacttccactcccgggaaaaagaaaaaggtgcaggatccgcgaaaggaccgctcagatttcccaaaagggaaaggtccgctgaggggaaaactccaaaaagggagtcttggncctcaggatcgagaggaccgaaagagcgtttctgtgcagcaagagcccggggggagaggaaggaggggtctgagatgtcctcccattgatctgagaaatcagattaacgggaaccacggtgacctccgggatcacctggaccaaaagaaatacggacccgtagtctccataggtatgttaaacgagggaattatggcagagcttgccatactccgaaaagacattgcccgagtctcccgacgacaaaaaggcgatgactccgattctgactgtgaagaccggaagccttgtgccaagcacatcctggaagcggagctccccaaaaattttaagat

SEQ ID NO: 147817 - DNA, 554 bp, Cannabis sativa
  modified_base (346)..(347): a, c, t, g, unknown or other
ccttaattccagggtattacacaatcccttttacatccctccattcacacacaaacaaggcttaattctaagtgatcttaatctaaaataatttgaaagtctcaactctaaaccaatgtaagatttactatttatagatgtcggtttaggttgttaggaagctaacaaagttagttaaattagttgatgatgtggcagtccaaagattcacaatgtgccttaattataacaatatatatttttttttaaaaaaaataatttgtgaattttaaaaaaagatataacaaatgtaatataagccacagttttgtcctatgtggcttgcgttttgtttttcgcagctcanngtttggcaaaacatgctcttcggttagacaatgagctatcatggttcgaggggctccaccgccgattgtggtgtgctgcattattaatcatatgtgactttgttcacaacgtcaaaaaaaaaaataataataatataaggtaattgattacatggtttttccatattttaaatttttttcttcaattttttccataaaataattttt

SEQ ID NO: 147818 - DNA, 578 bp, Cannabis sativa
cttgggtcaatctccgttagatcacggagacaattgatctaacgaatagaatttgaaaaaaaatatgaaaagatggtcattaaatgctgatataccttgaaactacaaaactaccaaaatcagaagacatgtgctttttcaaaagggattttgacaaatataccctctgtaatcatttaaaaagcactttgcattaaaaagaacttttcaaggggcaattgttatacccaaaattcggctagtattttagaggaggacacgtgtcaaccaaggagaatacgaatcaacaaatataatgatgattatattaaaggatattaaaatagaataactcattaaatgcagagctgatagagtatatttacaactcactgactataaaatcttaagcgagataaggatatataaaatattgtctcatgagttgacaagaaaccattccgcgtcagaagacacaatcataaggatgacatcagtagtacaaagcgaggcaccaacttcactacgtatgaagagatgtagacgagacatgttgactgttagaacacttagcgtataatatacattatacaaactaa

SEQ ID NO: 147819 - DNA, 607 bp, Cannabis sativa
cccagaccgagaccccctaaccaaaatcgcgagagactggactcaaacccaaacctagacctggaacccaacccaaaccagtactaggaatttgaccaagaatcaggataaggacctaggcaacaaaactaggaccgggacctattccctgaacctagactcagacttgaacctagcacccagctcgtgacccagcacccaaaatggaacaagaccgggactcaagattgggatccagatcatgactcgaggcatggactgaacctgtagtcagtgtctggatctaggacacagctccggacccaaaccaagacctagacttgaatccagtcccagacccaaacttgaacccagtcccagacccaaacccataccttgtgacccaaaattggaaccgaaactggaagtagaccaggacccaagattaggaccggaactaggacttggacctagaactgtaactggacttggacctaaggccccagttctggtcctagtttgggggtccgtttcccgggtccgggtcccccatctatgttcgagtcctaggtcctagtttaggtccaagtttgtgttctagttcgggtaaaggtctcgggttctcggc

SEQ ID NO: 147820 - DNA, 604 bp, Cannabis sativa
tctcattctaaaaattgactctctcttactcccttttctctttctcttgatctctgttaaacccagcaagaccaaggaaaagagcaattgaacccaccatctgagcaccactcgacccacttcactcaccacccagttgacccaccacgaagacaaacaaccaccaatgacggtttcctcctattgtatttttgaatatttttcttattgatttagggttaaaatattgtttattgataaaaaattagggtctgatatgtgcgttttgattaggtttagagttgaatctgtgatttttgggttagaaaatgcattttctaggcaggttcaatgtaggtctgatgcatccccgatgtaggcccaatgcatagtgatgaaaaatttgatctgggttgaagacaggctcggtatagggcccgatgactagtttgattgcagtcaatttttccaaaaaagctgacagacttgttccgataggtccaagatcaacaagacaatatcggacctactgggccctatatcgcgcccatcggactatcgggctatcttcttcaaccttcaatcgcttcaacattaaactaccatcaggccctatatcgggcct

SEQ ID NO: 147821 - DNA, 960 bp, Cannabis sativa
  modified_base (893)..(895): a, c, t, g, unknown or other
cacctacttttgcgcgcacatttttgcactgtgagggaaattgatcgcattttcttccccaactttgccggtgcagtttggcgccggcaaaagtaaataatattaaaaaaaagttttgccagcgcatgtaattgcgccggcaaaagtggtaactgtacaaccaacaattcccaccttttggcggtttggtgccaacgtttgtcggcgcaattggtgtatttcgccagcaatattggctattgccaacgataataggcgctggtaaaaagtttaggtgggcaaaaaatgttgactttctttgccggcgactttgttgacttgcgctggcaaatgtcaactaatgccagcgcaattacctaatagcgccggcaaaagttggcattcttgtagtgcaactagttttgagggtgaggattcaccacaaatacattgttacaaaaaatacggtatttttatattgtactcttctttgttgtttattttttgttatttgtatattatttttggttgttattttgatgttatttagatgtaattttcatgttactttaatgtagtttttatgttatttttgtgttatttctataaaaaatcggaaaaatgtaaaaaaaaaaattctttaaatgtaaaagtttttttttttaatgaaaaatagtatcttatgtaattattcttattttttatacaaatttcttgtttgtcctgctacaagcattttaatggccttaatttcaagtagaggtatttgctcttatggtatatggaaataaattgcgctcaagctataaatctttctgttcaagtattattttttctttctttctaattccctatcttttgttttgtctcaactttaaacaataaagcaatatattatggtgccgtttggtaannnttttgttttttaattttttaatcataaaatgaaagtaaaatttttgtttttaaaaattttatttt

SEQ ID NO: 147822 - DNA, 659 bp, Cannabis sativa
agatgattccttgctacaacagctatgcacatgctctctaagcccactctaacatcacaattcagttttatccaatcctgcggaggagggttacaagtctccctcaaggtcagtgtaggagcaggcaagagagaatcatgtaactctgcaaaagaagtacaaatattgtcaatacatttcatcacatctgggggagagttattgtgtaccatttcattgtgcgtcctccagatggtgtcaacaacaatcaaagcataaagaaatacatcctcagcacggatcccctaatactttagataaatattagggtttttcattcttaaatttatagctgcataaaattattttttcactttagccagcccaccgatcttccctaagcttaagtgaggcttggtcggaattgtgttttgctattgcgatttaattttaaaaattgagattagtcttgtctctgtgacatgattttgaatgttttaatctttgtctctgagacataattttgagtgttttagtcttgtctgtgtaatatagttttgttttgttttgttatttatttgcacagtagttgagtgctcaagctacaaggttgaatgaacctgccacaatagattctactattgttttttttttttttttttttagggattttttttttt

SEQ ID NO: 147823 - DNA, 777 bp, Cannabis sativa
  modified_base (33)..(67): a, c, t, g, unknown or other
tgcaacataatatgttatttctgatctttattnnnnnnnnnnnnnnnnnnnnnnnnnnnnnnnnnnntttagggcacaaaatccaacatggttcagggtgttagctctcggacaagtgcaaaggaacgactttttttctaggagttaagatattttaaggcatctttgggacgaaagggatctactcgaacagtcacctcgcatttaatgcagcatggggaaagcgtctgggaacacccataagaggacgtgtcaaacatcgtaagtttgatttagggcaattacacgataatcaaaggagttggtgacaactccattataaagaatcacatcaatcaaggaaggatgaaggttaatctcacctaacctctacgatacctactctgtaggtaatgcatgccctattttgtatcttttgggaacttgtgcttatccatagctggctttaaaagacaagttaccccttttcaactattcccaccaatctttataaatacccctgagaaaatgagaaaggggatcaaaaaaaaaggagagagaaaaaaaatacacaaagaacattctctgtaagaaaatactctcattaataacagaggctcgtggactatgactcattaatgcctgaaccacgtaaaaatcatctgcattaattatctcaaagctctcattatcatctcatttaattagttgccaaaaacttcggtcaacaaatacttattttaatctatttattttaatatatatttttttaatttaaattactaatttagataactc

SEQ ID NO: 147824 - DNA, 636 bp, Cannabis sativa
agtaatgaactgacccaaatgtatgtatgtaaatttttatattattattgtttgtttgttttggggtcattcaaaacgacatacttaatttttttaaggcctaattaatttttcactgaagcttaattgatgggtatttttttttttttttctatgagaagagtgtgaagttattaagttattactacggtcgccaaaatatcttaataatcctttccacaaaatcaaatcaatattttgccaagtccagatttggatattataataggttaatcccattatatataatatttctgcttcaagtctttgttaggttttctgaaatgaataaggattgatcatccactatttctataaattaacatgaatatttttagcttaatattttactctcatttgcacgtttttgagaaaacttctaaggctacgtgataagattgctctagttcaagttcgtttaacttttgagttctttataatggtagtttaccaaaaaacaagatgcaccttattaatatatgcagtacatatcaatttatttaagtcttaaaatcatcacacttaacattctccaagtaataatgtaattaaattgcacaatttatctaatatttttccttacggatcacaagacta

SEQ ID NO: 147825 - DNA, 506 bp, Cannabis sativa
aattagaaaaaattacgctttacaaatattaaaattatttttattaaatgcgaagaaaaaattagttaatagtcaatatccaaattcaaaatttaaatttaaaataattgataactaatctatttataattctaattaaccaactaatattctatacgtaacacatatttcaagtaacctaatacttaaaatataaaagtaagataaatcttaacatttctcattctcatcaaaaaccacacatattctttctcttcctcattctaaattactttgtcattttaatttttatcttacttgcttactaacttaaaaaataagtatacatatttactctttcttaataatttttatatcttagttgcttactaacttaagaaataggtatcttatgtagatttataagagtgtatatatctataaaggaaaagtataaaacggtgatgtggcactctaaaatcactttaatcttactatctcttctttctttaattctattttttctt

SEQ ID NO: 147826 - DNA, 611 bp, Cannabis sativa
atgtaatgatatgttaatacaaagtgcttattaaaatttaaatacaaatttttaaataaaacatgtatgtttattatttattttaccatatatagtttgcacataaaaatttagaatatgtttctcatagttaataaaatgtatgataaattgtaaatgattttttttttttttgcacaaaaaatgtaattaagtactataatgtatataaaattgtaaatttctcatttatgattctaactctcaaattgttgtttctatcttgctatatatattttttctacaacagtttcttaactagtggaattgtctcatttcatagtacctcctctttctagtccaaaacttggacaagatatttttcccatataataaatttgtttgaagtttaacatttcacagctcagaatatggatgatacatatttttctcagcatggagacatgaaacacattatatactctagctaataggctacctagcctatttaatcaagtgcacaagtatttaatatttctcttgtaccacacttattaaggtacctaaccagtggtacattcaattatcacttataaataaacacctcgtcagagaagagattattctaagat

SEQ ID NO: 147827 - DNA, 744 bp, Cannabis sativa
  modified_base (153)..(164): a, c, t, g, unknown or other
  modified_base (710)..(719): a, c, t, g, unknown or other
agcatctcgaggttatgttgaaaatatttaaccattataagaccaaaaatggagatcgaatatctcttgattaaagctcattatttaaaataatatatttttaattaatcattattttaatccatatatttataatgaaaattacttaatttnnnnnnnnnnnnaattaattaaaaaaattaattttcaactttaatttaattttgaaataattatttcgaaacactatagatatatataatatgtaattttgaaatttatatattaaaatataataaaataaattttttaaaaatatctaatttaagttgttctaaaataacgaaattttcatcttaaataattttccaaatttaattaaatatcaaagtaagtatcttgaagtaatcaccttaatttgaaaaaatatccctatttaagttgatccaaaatttaataaattttcaacttaaaaaatatttggaaaaatatccgaataactaattttcaataagattctacttaattattaatttcaaaatattctaatttaagttgatcaaaaattagtttgaaaactaattttcaacataaatatattttctttgaaaattcaaataattaagtatccaaaagaatctaattagttataacttcttttatttacttaaatacagaataatacatctagtttatcttgaatttgattttcattaaactaagtgtgtttnnnnnnnnnnaatttcaaaataatctgatgaaaaa

SEQ ID NO: 147828 - DNA, 601 bp, Cannabis sativa
tgaacggaaggagtcattatactctgctgcaactaatgtaaggttttcttgaacctttatgtgtttatttcattattttagagaattcaaatgtaggatgttaatttaacatacttgttattaaatatagatcctggtaaaatattcccaacaaaactaacctgaattcatccattcacacacatgcacttaagagttgagaagcactaaggcattaaactctctcttttcttctcatcacttgagaagtcttctcatacttgttctcattattgtaaaactgaagaaagccatagctagaaattataagatttcagcatgtaatctgcatggtattatctcaagagggaatgcaacaaaaggggagtaggtcattatttgatgaaaggggctgaatctaataaaatttgagtttttatgattaattttactatctaattagaaaaatttctcgcatttacatcatacatatgaactgagatttgtttgtttcatccatcagttgaaaaaaaaaataaaaaaagtttttagcaaaaaaaaaatatatgtgtaaaagttgagtttgacttaaatatttctctatgaacatatttttaaaata

SEQ ID NO: 147829 - DNA, 589 bp, Cannabis sativa
tctcgagccaataattggtcgccttagactacttctactcctgcctgtgttagaaactttagggacaagtgcttaatctagcttactgcttccaatccaattagtgtcgggcaacccatcaatacattgtatgctgatggaagatcaacaactaaaaattcttgcattggtgtcattgataacggtggctctcctacaattaatgaaagattgatgataccttggttggcgacactatcatttgtaaatccatacaagctcaccatacaaaggttttaacagtgcatcctctaatcccatcttttttagtgtgtccttgtagaggatgttgactgaactccaattgtctaccaataatctcttcacccttttgttggcgagctagactgttacgatgaggaggtcaacatgcgggtattttacatgttttgtatcttcatctgagaagataattagaaattcattttatttttcctttttcagaggttctggagcaaatgtcgattgtccattctttatttcattgatataccttttctgggcattattactatttccagcgaggtgagcccccccccccccaaatgac

SEQ ID NO: 147830 - DNA, 762 bp, Cannabis sativa
gacccaagtgccatcatcattctttaaacacacaatttgattggtacgcttcctactacttgcacatgagtgaaagtatttggtgttttgatcctcggcttgtaaccacaactgtttcgacctttgcctccaataaatttccttcttagagagaacttcaaaaagttgagattgtgtctctttgtacgttgaaatggactctgagtctcttctacccttcagtctcttgagaatcttattgcaccggttgatcttattgttgaaatttcccgtgatatcttttccccaaacaccaagagtcgtgctacaagaactcaatttcttatccaaagactcatgcggctccatatcccaattatcttgaacaatcatacgacacataggctcctgagaccatgcattttcgaaacgaaacttcttttgagttgggacatgtttacttacagcaagatcaatccaaataggacaatggtccgaaaccgagacctcaacctaaatacagtgaatattctcaaccttttatccttaaaacacttagatacctataaatgatatttcagtgaattaatataatcactgaaatgagtactcaatcatttatctctgttaagtcaagctcgaaggaaaatatcatttgacttctatatccagattgaagatatagattttgtatctatgattagcgctcccactcaattgaactaaatgtccttaatcacgagaagatccattggttgactttaacgaatagattgaagaaca

SEQ ID NO: 147831 - DNA, 954 bp, Cannabis sativa
  modified_base (34)..(53): a, c, t, g, unknown or other
  modified_base (894)..(917): a, c, t, g, unknown or other
ttaataaaagattagaaatcattttatgttgcannnnnnnnnnnnnnnnnnnnatgattatatttaatgtataaattatattaagtccagaacgcattgttatacccaaaattcagcgtgcacatcagaagaagacacgtgtctagcttggaagaatgaagaactcaaacaagcaatcgtgagtacacttgacctggaataactcattaacagaaaaaatttgcagagtatgtttataactcggctggctagaaagtcttatgcgagataaaaatgtactaattgttgacttgtgtctcgacgagaaactacgtcagtgtaagtgtgcatgacgagacattaacctcgttgcgggtaggagatataataacaataaaaatacttagcttatataacatgttctacaaactacgtataagtagaggggtggatcaaggtgacagacagtaaggcgtctatctcgctgtaagatggcacccacggaagaaagatcatctcgacattagaaactgtaattgtcagaattaaagtaaaatcagtattaaccttgagaagttgtatgacgagctccagctcgccatcaaagttaactcagcgaggcatccaaatgagataaggcttaccgtatatctttaatgtgcgttcatctcggcccaataaaagtgggatattcacagctgtgtgaattctaaataaaaactgcacttacttagcgtgatttgcaaatcaaatcccatgatttgagagaataattgctgtaaagattacagtcaactttgtaattaactgctcactatattattataaatagtggcaagcaagatgagaagagggacgaaaaaactcaaacaaaggaggccctaaaaaacaatcaaaaatctgaataagattgannnnnnnnnnnnnnnnnnnnnnnnctgcaaaaccacgtaaaaaaccttgtgtgttcatact

SEQ ID NO: 147832 - DNA, 528 bp, Cannabis sativa
aaaaaaaaaaaaaccaaacaaacatataatataggttcaacaccaattataaaatcaattaaatatctaataacttcaatcactacaaaaaatttagatatcaaaataatacttagtacttttgctaaacttttgatactgacgtgcccctaaaatatacgaattttctctaaaatataatagttacataattatgcatcttctattaagttctgtttcttttcttattaaaaattagtatttttactttctgaattttgaccaatactaaattttacctctttttattttaaaaaaattaattttaaaaattataattttttattaattctaaaaattaaattgaattattgaaagacttgataaaaatattaaattaataaaaatagtattaagtttacctaaaacacccaaattattcctacaaaaatatttttaaactttattttctttataaacacatatattaaaaattaaactaaaattattaaaaatctaataaataatttagggaaattctacaatgca

SEQ ID NO: 147833 - DNA, 525 bp, Cannabis sativa
  modified_base (453)..(494): a, c, t, g, unknown or other
ttttggatcaatgcatcaatctccatcaaaaattcaagacaacccttctggtacatggcttgcacaaaatgccgtcaaaaagcagatcttgacaatgaaacgtcatgttttaaatgctacagttgcaacgaataatctattgagacaattccaaggtttatattaactcaatttagcacaaatcttattatcataatttgttacttaaataaattaatttgtatttgaatatattaggtgccgctttcaagctcaactaacaggccacacaggctcactaatagcaacgttcttcgggaaaaatgcaaaaaagtttttaaattgtaccgcacaagagcttattcacatcccaaatgtaatttctactacttaaattcattcacttcgttaacatacattaatattactatctttctcaatgatattgttaataactgttggaaattattttannnnnnnnnnnnnnnnnnnnnnnnnnnnnnnnnnnnnnnnnntaaatatgaattttctaaaacgatgaaataa

SEQ ID NO: 147834 - DNA, 676 bp, Cannabis sativa
taagttaaatgagaattttttttttataattaattataattattaaataaatagatttgacatttatagagttagaattaaaatatggtatttgtgaaaagaaaaagataagctttaaataaaatgacaaaattaaaatcttgtagggcccacattagggttcgaccataaggttcaattaacgccatctttttaactttttttttaattccttttaatactaaccataaccctagaagttaccctatcagtagaatattataagctcttattttcataacatgattagactccttttgtcaaataattagaaagtagaaagagcaacctaatattcgaaaccctcttcttctctccctcaaattttcatgccctatagtaattgaggagttgcccacacaattcaaggcaatactcaagatagtgatggagattttgtagaattccaacaactgaaggagaatccaagttcagatcttgatcatactctgtgacaaaaaggatcaagggttagagatctaaacggaaggattcattttattttgctgcaagaaatgtaagatattctataagcttttatgtatttatttcattgttttagagaattcatatttaggatgttagattatagtgttataatcaaacatacatgttagtaaatctagaccctggtaaa

SEQ ID NO: 147835 - DNA, 611 bp, Cannabis sativa
cctacacctattttgaaaaataaatccccatttcagattgtttttaataagaaaccagattacaagtttattaagacatttggagttgcttgttatccttgtattagaccctatcaaactcacaagtttcaatttcattcagttaaatgtgtcaatcttggatatagtgattcccacaaaggttacaaatgtctaagttcaacaggaagaatatacatttctcggaatgttatcttcaatgaagacaacttccctttccaatctggttttctaaacaacttccaacccgaacaatctgtctgtgttagtgttccatcgtggtctgcattatttcaatcctccaagagtcaatcaaatttggctacaccaagttccatgcaccaagtccctgaagcagcagccactgagattaatcttgactccactgatcctagtgatcaaaattcacatcaggtattagactcacccgcatctattgattcacagtttcacgtttgtactcctattgacaaagaacagaacagtagcatttctccaattagtgttgcaggttcaattccacagcctgaaacacatgatactgctgaccaaattgaatctgcaactctgaa

SEQ ID NO: 147836 - DNA, 1089 bp, Cannabis sativa
aatttgtagattaatgctttaataaaatattaaaattgagaaaattaaagagagaagagaaaaatagctttagagtgattttagaatgtcatgttaccacctcatacttctccttgatagatatatatagattgaaatggttgtactaaggaattaattactttcaattttagttatggtaaactgattcacacactatatttttcgtaaaattttggaataaaaaacttttatatcaaatttacgaatccagtctatctatagaaacattcaaatttgattatgtgagtttttgttaagaatatagtattacaatatatgtattatcagatatgttacctaataaaaaaaattaaaaactttaaaaaatacgtatatatataatcatatctaaatgacactccaacataacaatagctaattttttttttcttaacgattcaaatctcaaaccccatttaaaaattaaaaaatatatataaatatatattacctaatgttaaagtgagattttctcacctagaaactcgagaccgaactcctatttaaaagacacgtgtattcactttcctcgaggagagctgagatgtcgatgagagaccctttgagtacgaacctcgcctgaaccagattcagcgagatgatgcgaacatgaccgagtctaatcgtattcgcatgactcagactatgtaggaccaaggaacggttttaagctcgcatataccagggtatatgtgagtatcctcgtgatcctcctgcgaaacataagagatcgattctctattctgcgagctggtcccattaacccaacaaccttgataaaccgatacagactcgcatgtcttggttctatcagcttgttataagatgtccatataagcgacttcaagaggacacagacatcctagactcgactagtctcgaatgcaacctaaagcctgggagcttatgcaagaatatgaacaaccgactcgcactgcagaagtcgcatacgttgttgtatttagtgaattaagctagaaactgttcttcatttattatttttacgttttttagtttaattattgtaattcaatgtatgaacggatt

SEQ ID NO: 147837 - DNA, 514 bp, Cannabis sativa
cagttcgcaagatctttaaagtttcacccaattggttttgagccaaagcatgaaattcctgtaacttctcaaacgtttaagatttaataatttcggagggcatttttgccaaaatcttttcttggaaaaatgcatcctttaattctggcggttgtacggttttgagagtcattatgaattccctattcatattctgcacaacttctagccgttagatttctcaatctttggcttctttagtgaaatccattttaagaatggattatttccttcctaccaaaatgtctcttctgagttcagaagtttatccttccaaactcataatacccagatgccccaactattttctattcgttcctacagacttcaagcctcaaccgaagccgaaaacgatggattccagggctaaggagctttcgaccaatccaaactaggggcacctcgtagcctaccatggctgatcctcacaagtgattccagagggtatcttgtgagcaatctcaaaggtcctcct

SEQ ID NO: 147838 - DNA, 661 bp, Cannabis sativa
tcttttgaaatatatatatatatatatatatatatatatatatatatcatctacaatctataacaatataaaaagagagaatattgttttgggctccttacaataaattacaaagatgtccttattttctttgttaattaccattaaattcaaattaatattgtagtgagttattagtaaaaataaaagagttattagttaaagaaaaatgagttattagtaaaaaaaaaggagttattaataaaaaaaatatatatatgttttttaatactcttgtaaaattattaatttttaaagtactttttccaacaaaatatctagaactcaagaagtatatgcatggaaaagtatttaattattttacaataaattattaaaaataatattaaaaaataattttaataaataccccatcacacataatattaaaagaaattataatttagagagttctattttttatatacaatattataatgcatacaaatatatttttatatatttatatatatttggaaaaaagtgtcttataatattatttcaattaagataatacaaatttaagattaaattatttaaatttttattatctaatataaatagtaaaaaaaattataacataattataaagtaggatacaataataatttttttttttttt

SEQ ID NO: 147839 - DNA, 533 bp, Cannabis sativa
atgggaacgagtttgagttttttcttttttttttttctctaaaaatatataaatttatttaagtaaacataatatttttcaatgtaatttataacttttctttcaaaataattttatatttttattaaatttttatttatttattttttaattttttaaggtaagagtttataaatataaacttgattttttctcctaaaaattaagtttttttataattatttattggattccaataattttaatttaatttttgaagttacttgtttacaaataaaataatgttttaaaatatttttgtttaagaataatttagatttttaaagtaatttaatatttttatcagattttttagtaatttttatatacttttttaagagttaatataacaatataatttttaaaattaattttttcaataataagtgccaaaaatttgtattggtcaaagtttaaagggtaaaaatattaatttttaacggtaaaagaatagaatttaatagaagaggcataattatgtaactgtgatattt

SEQ ID NO: 147840 - DNA, 595 bp, Cannabis sativa
  modified_base (131)..(139): a, c, t, g, unknown or other
  modified_base (426)..(430): a, c, t, g, unknown or other
  modified_base (480)..(487): a, c, t, g, unknown or other
tccagggcattggcaaagtttacttgtatcggatgtatggagtatacataggaaaggaccgatattgaactttgattagatatattaaaatttacatgatataaatcaattatattcccgaaattctatcnnnnnnnnntataaatcctcaatcttaaaaatcacctacttgtatgggaaaatcagacttagagttaaattagtagttgtggtccaagaaagaattactcattatatttggtataagtttaagtctttgactttaaattttagatttcaaataatttttttaatacaatacagtttcactttgacaagtgttttaataaccattttctatctatggattcaaactgtatgttagcattgaatatgagtttgaaattctatgaccaggatccacttgtactattctaagaactcttnnnnntaactaaatcaagtcatcaaaagagacaaccatattttataaatctatgnnnnnnnnatcttgttcatagtggtttggacaagatcattgtctccaaagagtaaatatgcctatatccactgaaactaagttcatctcattcacatatggatgtacattcagggg

SEQ ID NO: 147841 - DNA, 819 bp, Cannabis sativa
ttttcaaataggtgataagtaaaattggtttttgataatttaattttctaagctatttgttaaaaaaaaaaaataataatgtgctatatttttttttactaactcagttttgtgtttcaaattttatgtttgttcatttttttttttacgtaattggcttctctatttaacatgtttaattggttgtttaatgtaactggtttttttgtgtcagatttttaattgtttaatgtagataatttctctatgtcgaaaatttaattggttgtttaatgtaattgatttttatgtgtcaaaaattttatttggttagttaatgtacctcgttttaatgatttaaatttatttatatgtgaagaattctccaatggtagtctactttttttttttttaatttattagtttttgtgtttcaatatatcattttattattttaagtttcttatgtttttatttatattttttaggtaattgtatttagtaattggtttttgtatttaaattttgttttagatattttggtatttggtttatgaaagttaatttttaataattattttacgaaattggttttttatatcaaatttttgctaagttgtttaatgtaacaggtttttgttatttagtttataagttattattaaaaataattttatggtatgtatttttttattttttgagtaactggtttttgaaattaatatatcttttttattactttaggtgtggtatgtttgttcactttttagttgattgtaatatgaaacaggtttttgtattaaattattgtttttgttattatatgtaacttattttaag

SEQ ID NO: 147842 - DNA, 698 bp, Cannabis sativa
acttaaaccttcttaccgcaaaccatagcacatagatattttcgaaaaaaatgtactaagtagaagtctcaactccattagcctcacaggtttttaaaatatttatacatggctaaagtttttattcatagagttggaaattaaaaagtgaacactcgaaatggatagatcgatttaggacaaatatttgaataagcattgaaacaaagataggttataaattatttggaccaaccaccgtaaagagtaccacaaaccagcttttcaagatttttgcacgaaactagacaatcttttatatttattctaggagccaaaacaaatgaaaaatgaaatactataaactttttttccttttctttttcttttatttttctttatttctttcttgtttttattttttattttttttttgaacaagagacaacatgttggatataatgattgaaatgttgctcttgtattttctttttttttttcacataaagaaaataattacacaaaggctctccaataagatttgtctatatagaaaacttatcccttaaagcaacatctaatctcaccctagtaccatgtccaaaataattataaccatttttaagaatcaataaaaatttaaagattgttttctcaaatctcaccactcacaaaaaatatgaacacttaaacttggtatagcttttctaatcaaatat

SEQ ID NO: 147843 - DNA, 1320 bp, Cannabis sativa
aattttaagatgccagagatggcagcataccttgaggactcagaccccagcgatcatttatctcgattcaaccgagtaatgacggttatgagggtcaacaatgatgctaaatgcttatgctttccactaacattgagtggttccgcgaaagagtggttcaaaaagttggaacaaggatctgtggattgctggaacaagttacaagttagttttcggagacagtttgtcgcggcgagaaagatcaacctcgaagtcagcgccttaagtaacatcaagcaactacccacagagaccttgaagaattttataaagaggttcaaggaagaagcctcaaaaaccaagaaagttgatgagggacagcagcttgcacttcttcaggccagaatctgtacaggaaccccattctggaacgaattgcaacaagaaggagctgctaacctccaggatttccagaagagggttcaaaaatacattaattttgaagaggctcaaatagtggcttacggaggatactatccaaccagagtggccggatatgcacccggagttcagctctcaagagccctgcctccggttaatccaccaatgagcggcatacagttcttcgctaccccaggatacaaccagagcccaaccttggctcccgcatcttcgcattacgggaacccctcagggatgagtggacaagtcccgcctcactctgctcctgctgcgagcctaactagacctcctcaaagctcccaaagtaaaaggtccttaaaaagcagcaaccggacggaggacaagcgccaaaaaagggggtatactccccaatacgcccagtacacagagttgacggacacgctctagcgagtgtattttgccacgaggcaaaatacgcactaccgaaggcctcctcctctgtacaaggatagttctcgaagagatcccagaaagatatgcgaataccacaacgacattggacataatactagcgagtgcaagaatctgaaggatgagatcgaaaactttatccaattgggtcacctgtatgagtggatgaaaaaccagctgcctcatctcaaccggttccagcagggggtccggtgcctcaagggacgccaggaggtacgcccggagcattggcaccagctgtaccctttgggggatcgatccctcagtagacccttggcctgccacctagacccaatggaagagtggccatgatctatggtgggccccatattgggggaaccacccgaaaataattaaagcgctacgtcggggccatcaaacatgatgaagtatgggaagtcacccagcttccagctcaaaggcccc

SEQ ID NO: 147844 - DNA, 932 bp, Cannabis sativa
tattatcacaatatattagtataggagaggaaatagaatcaactagtcgtatctctaaaatcaaattctttaatcataaagcttgtaaatatgctccataacatgccacagattcaacatatatagtagatgatgtgattaaagtctatttaatactttttcaagaaataggtacaccagcaaaagtaaaaatatagccaaaattcaactttaaatcatctacacaactaccaaaatctgaatatgaataaccaacaactcaaagattgtcgatatgcttatacataagcataaaactcttcgttctttgcaaatatctcatgactttcttggctgcaatccaatgatcatggccaggatcagataaatatctcctaagaacatcgactatgaaagcaatgttaagtctagtgcaaacctaagcatacttaaaactccctactacacttaggatgttcttcattagttttctattcaagtcattcttaagacattgttgcttagtaaatttatccctttcagaataggaataaaaccaggcttacaaaaaatttaggttgaaccttttgagcacacgattaatgtaagctttcttgagataaaccaatttttttttgattcttatcatgatgaatctcaatctccaaaacaaaagatgcctctccaagatcctgatcatataaaaaaaaatggtagacataaaaattttggtctcatttagtaatgacaaatcactgctggcaagtaaaatatcgtccacataaagaaaaatatgacgactcccaccgatcttcatataaatacactagtcaaacttatttcgatgaaacctaacaatgtcacaaccttatcaaacttcaagtaccactggtgagatgcctgtttgagaccataaatggatcatttcaatttgcaaaccaaattgtcatttc

SEQ ID NO: 147845 - DNA, 527 bp, Cannabis sativa
tgattggcctttatattttgtaaaatagattgaattggtgctcttaaatcaatattaataaaataagttttcaacaaattgatacttaagtagggtcaactttggtgagttataaaaaaaaaattgggtccttattttgaaagaaatatagtctttttaaaatcaataaaaaactatgtgttttaaaaagagaaaatttattgtttgggcccctacgctaggtgggtcgtaggcatagacctagtccgcatatcccaaagtaaagcctatacctaagcttaatttttcaatggttgctttagatgtaggctgatcattaactttaaatttagtaatagggggattttatttacacttcaaaatttataaatacacctcattttaatcatttttattttatataaaatatatatcttcaattatagtagttttttttttttcttccaatttatattcttaaaaaatatacctactaaataaaaataaattatattttaaatattataacaaaaaaaattaaaataaaa

SEQ ID NO: 147846 - DNA, 989 bp, Cannabis sativa
attagtttgtattttaagtatattattgaaaaaatccctaatattaatatacatcacaactatatatgttacatatctcatatatataacatttgtattttaacgtgcatccacatcataatatatattatctccacataatatattttatatatgtatcgcatacataaatattctcatcataaatatatattatcatatgttcaacatatataatatatatatatataactcatatacatgttatatattcaggcctggcccaaggattgggcagcttgggccattgcacaaggctcccatttttttaaagcccaattttttttttttttaaaaggcctatttttttctctttttttttcctattatatacacataaataaaaaatttattaattgaaaatttatgaacaaatcttaaaaaaaataaaaaactagtaataaaattgtagttttaatgtacacatttttttttttttttttaaaaagtccaatttaaaaattttgcacaaagcccccaaaatacttgggcctgccctgtatatattatgtatatctcacatagaataacataaaaaatctgtatctcagcatatatattttactatataaaaaatagtaaatcacaaaatatcacaattcttacccttgtattatcacaagttgatttcttaccttccattgaagctaagtaggaaatgataaacttttgattgttggaaatttataggtgcttcaatagacagaccaatgtcaaaatacagctcaaaataaaaaatacaagaacaataatattgataaaataatattataactctagacaaaatatacacatatatagaaaagaagatgaggagaagattataaaaacacaataatataaatagagtatatatttatagatgtgagaatctcaacatcactaacaccaagtgtcaagtaggggaatcacaaaacttgaacaatattttacacctttgtccaaaagct

SEQ ID NO: 147847 - DNA, 820 bp, Cannabis sativa
cttgatttgggacttacaccaaaatccagacccaagctcgaactcaaaccaagactcggacacataccaagacccagacccacactcgggaactaaatcgaaacttgaactagaaacggactgggatcttggaacaagatcgagaggtgcacctggacccgaacccagaaccagacaaaaccttagaccctaaccgagactgaaacctagaactaaacctcggctcgaacccaaatcaggaccttaaaccaaactcgaccagaacccataccccgggacttgaaactgtaaccgaaactagaagcaaatcgggacccaggagcaggactaggactaggacttgaacccagacccaaaactgtaaccggacgaggacccagacgaggacacagacccaccttgggattgggttcgaaaccttaatccaaactcgaactaggacttgagacccgaacccaaacctgaactcagacccaatcatggaacaagactcggggacacagaattgtgatcgagacccagaactgcaactaagtctcagtcccagacctagatcgtattcgggttcaggtctgagtcttggtcccaaatccaaacaccaccacatgtcgagtctagttcgagttccagtacgggtacgagttttggtctgggtctgggtttgggtcatggtcaaattcccaaatttaaacaccgactatggggttgggtccaagcctctggttttgggtcctgggtcccaggtccaaatccagatcatggtcaagatctagctcatgtcttgggtcgtagtttgggtctcaaatcaaggtttaggtct

SEQ ID NO: 147848 - DNA, 627 bp, Cannabis sativa
tgatgcctatgccatcaatgcaaaacaaaacataatagctgcctgtccttaacactccgcattgcaattatttagaatcgacgactataaaaagaaaatctaattttttcactatagccactggtttaaactgacatgataaaaaaaatctcatatttgagatatatctcaaatctaatcaacaacaacaatccaacaactacaatctcataacaacgttaacaataatataatacaatattattaagatctgagatgaaccaccacctcaccatcgcaccaccgccaccatcggacgcctgagaagaaatacaaaatctaagagatggttaagtgagagagagaaagatcaaaatagattgtgacagagagggatcaaaagagtgagagaagaaaataacttactgtcacagttgaagctttgaggtggctcccacagttgagaaaaatgaaggaggaggagccttcgatcttaggatgagcgtagaacggaccctttaatgtagctcgcgcatggataggacgaatgtgttgggctttgtgacttaaataaaactctatttcaatgtaatcttttatattcatttatcaataaagaaacagatttattttcaatacttattaaat

SEQ ID NO: 147849 - DNA, 780 bp, Cannabis sativa
acgactagagtacgactagcgtaccgagtataggttgatattatggtcagtagtattgtcatacgaatgttctagactcaatactgtgtcgaacatgaggatagggttatggttgggtgtataggcgcctgattgtaatccaagttatcgctatgttattttttatatatttcttactcagtatgttgactcacagatactgtttgtatgtgtaggtaagggtaaggctaaggtcgagcagtcgtgagagtgagcatatgaagattgtacatgtcgggacgattagtcttggagcgtacgatctttgagacagctgagcttattttgtatagtcgctaggcgataaacttttgtaatatacactgtgaaatgtttgtaaatgttttgtaaaacgagatcccagtttaatataagtatgttattttgataattataaatagttaaataaagttttaattattcatgattttcaataaactcgttgattagtaacgagctacacagttaagttaaaaatcacgttaacacgtctaaacttgtaacgccctaatattaaggcacgctacagtgcatttttaattacagttcaatctttgctaataaaattttttcttgaaaaatgtgtcaaattaaaactttcatattaaatattaaactttatattatatcaaaatatttccaagtgtcgggatcccttttttaaatttttaaaacataataaaccaaaatacatattaatcaggtcgcacagcgactacaaaatacaattcccagatgtcc

SEQ ID NO: 147850 - DNA, 690 bp, Cannabis sativa
  modified_base (468)..(472): a, c, t, g, unknown or other
catgagcaattttattaagctcacgaggaacatggactatgaccagattaggactgaacaacaatgagttcttaatacaagtgacaatatcattaacaatagaattatgacaattagtactataaactttatctactatgcttttacaatcagtttgcaaaacattaacaggaagcttggtggcttgcacccaagaaatagcagtcaagatagctttagcttccgcaacctccggtggaactgagccgacaataggtataattaagccagccttaatatcatcattttcatctgtaaccaccacgcccaaactgtgcttcctaacagaattactaacacccgcatctgtattaactttccatccttcatgctgtgataattgaacctgttcattacacctgaaattaacattgtctggcttaaaaccaggcaggttagcatgctcatactccaataaataactcacannnnnatcataaagatgccaaggtggcagcaacttcttattatggaagagattattcctatgattccaaagtaaccagataaaacaaaaaaaatatagcacaatcatatttatccaagagatcaacagctagtgcaataaatataagaatattttatttaaggaaatatatttctatttaaggaaataaataaataattgattttctgataaatgaatatttt

SEQ ID NO: 147851 - DNA, 658 bp, Cannabis sativa
catttcatcactcctaaaactaccctgagcaggtttagaaaacgcagcaattacttcgcccttgtagttgcgcacaactgcaccaattcccaattttttgtcttgaacatttgttgcaacgtcgatattcattttaagggaattacctgctggtggcttccaaactatctcatccaattgtcttcgattaccgttagcaacagtggtcgaagaagtgctatattggtcttgcactgatgtggagggttgcagatgctggtgtgcagcttgccacgaagagtgattatcagtttggcttacaagttgctcagcccttgtgtgtgtattcagacatggtgcatattggtggccatccatctgacaggagtttggaaaattaacattgccataatgttgttgctgctggtgcaagattcctcgttgggatggtctgttattctggggcagatcaggtggtattgaactctgttgcctatacgtgttcttattgcagctattgaccttggcagaactgtatttttccaagtagttaagagcaaaagccactagagaagatgggtcacgttgtgaaccaccatgtaggactttattcctatcactccagatgcaccataacacacatattaagagttccacttcagccttttgcaatgttttt

SEQ ID NO: 147852 - DNA, 1478 bp, Cannabis sativa
ttcattcgatttaatgagaagtattcatctctttcattctttcctctttttctctctttgataatagagagtacacagaattgtgaaaattttaataagtgtggaatttttggcaggtggagtaatgggtcaaccaaaaaaagcactttttctgttatgcataaactgagaaacaaaatttcacaagaagacacgttattttgccaaatttattcggtcaaattgaagttgaagtctgagttgcagcactagttccgctgagtctgcttcaatattgggggaaaaaaactttgagtgcgctcattagcactgtggagaaaccgataatggtagataagcacaccaaggaaagaacaagagttcaatttgctcgagtccttgttgaaatggacataacggagaaccctgaacgctcattctagtttgttaatgaatatgggcagcttttagaacaaggaatagaatatgaatggcttccggttaagtgtaaacattgtggtaggttaggccatataatggttgaatgtaggaagattgagaagcctaaagaggaggaaaaaaagcaagaaaataaggtagaaaaggatggtaatgatgctagtgctcctgttgtaattgagcagcctactggtgagattgctacttctagtaagggtgaggctgaggctactacccctgtgatagaggctgctgctatggcagtaataaatgaaaaaacagttgatggccaaggggaaaaaagctgcttgtcaaaaacagtttagtggggattggattgctccaaagaacagtgggtctaaaggctctggttcgacaaggagagatagtgacaagggtgagaaagtgcttaggaattcctttgcaatattaacagggggacagcatgaagaagtagagggagagaatgactttagcttgtgttgttaatggatttttgcaatatttgttggaacgttaggggtttgaataaaaaggagaagcaagataaagttgctgaagtttggagagttaataaagttggcattggagcccttgttgagaccaagattaaaggagaaaaaaattcaaaaatgatggcaagtagctttttatgttgggacttttatacaatcaataaagtggaaggtcagattctcctgctctagaggaaaaattttgttaatgttgaaatcattgaggaatctaagcaacatgttcattgtcatatcaaaatgatagggcagaaaaaagattactttgctacctttatctatggagctaacaccatagaaggtaggagtgatctttggaccgccctatcaatgataaatgtttctaaagcttggatcatccttggtgactttaatgcagtttttcatcatgatgacaggcaggggggaatgatattagtaaataaaaacttgtagactctaaaaattggattgctcaatcttctgttgggttttgtgccctaaataaaaacccatttcaatataatc

SEQ ID NO: 147853 - DNA, 565 bp, Cannabis sativa
tgagaaagtgttcgaattagccttcatagttgaggaggctgagcaacatgtgattaaggaacagactgcaaaggattccgccacggcatcgagttctcttgttagtgataatatcagtaaggggaccgacggtggtaaccctgatcaaaaacggaaggtagaagcttttggaacatcagggagtattagaaagtttcagggaaatagaggtggctgtcaaggtcacggatcctctttcagatcatatctagaatgtccgaaatgtaagaaacaccatcaaggtgaatgtcgggccaaggctgcgtaccatatttggtatggattatgtgaatcggatgttctaggattacatggacagatgtgtgattgtgtttattgatgacatattgatttattctgaatcaaaagaggaatatgagttgcttctcagatcagtattgcagcgattacaagatcacaagttgtacgctaagttcaaagagtgtgaattcttgatgtctcatgtctctttcttagggcacatagtggataaagatgggatcatggtagatccgaccaaaattga

SEQ ID NO: 147854 - DNA, 562 bp, Cannabis sativa
ttaccaaacgacaccataattaaaacaacacacaatgcacaacaaaaatctaaaaataaaatataagcttaaaatataagcttaagtatgaaaactagtttcgaacttagacataaaataataaaaaagctcaaaataaaaaatatagaataacatcataaattgaagcaactacattacaaaagcctcaaaacttgtaaaccctgtgaaactatttcaaactggtgaaccctatgaaaccagtttcgaccttataaaatcataacaaaacataagtgataaacaacaaagataactgaaaccagttttattagtaaaaaaaaacatacactcaaaaaatactcacaaatataatcaaaacaacacacattgcacaacaaaaaatttaaaacaaaatataattgtgaaaactattttagaaccctattaaattgggtttgaccgtataaaaaatcataacaaaacttgtgaactcatacaaaattataacaaagcctataaaaccagtttcgaccatataaaaaaataataagacaaacttaaaataaaaaatagacaaatt

SEQ ID NO: 147855 - DNA, 511 bp, Cannabis sativa
tctacacgcaacttcggacgtcccctacagacttgggggggcaaatgttatcccaatttttacactctgacgtggcatcactcgatggtgacatgtgtaatcgactatgggtatctgctcgcaagacacaggccgaacaggacacctcacatattcactcagacaaactcctctagaccgagcagtaagcaatctgcgcagaacgccaacactaagcaaattcagctttcgcatcatgagtcatcaaggaaatccctataactttgggatcaaattacagagatatggaaagctgtccaaatcccatgattagtgtattttcaatttactatgcaatctttctgcttatagcaattgtaacgagaagggaaattgtaacgccctaaataattaggcacgctacacgaaacacttataaagccctaatcccctaaccgggattactaataaaattagtgcagaatttaaactttaataacaatatgaatgaaaataaacttgtaataactta

SEQ ID NO: 147856 - DNA, 817 bp, Cannabis sativa
gaaaatttccctacccctatctttatatgtataccaagaatactgccatagatcgaaaactatgggacctacctccacaaaatacttgtgtcttctagtcactactattaattgttttatgcatgtctccactcacagagctagtacttcatgacttgacttgttgtatggtacaacaacctaaaatgtacatttacatgctgtcataataaatctttttgaaactgatccttttgtgctatttaagcttagagtcatttattaaaaggattttaattcatcatcaaaatggaaaaaataaatacaatatatagttgccgacaatattgattcaaactaatctaatagattgagttagaggtgtatattgtgagccaacattcttgaagtaaatactttttgcatgagattcaaatttatatgtttacataatgaactgcttgttggtatgtgtaagattaattatggtaactaccaatagtttaagttataataaaactaggtgttcatcaaatatttaatccaatttaatgtaagtagatttaattaaaaaatataaaatttatatacttgtgtggattgaatttttttttttttggaattcagaagagtttattaaattcaccaacacttacaagataaagttatttacaaaatttttgttaaagcttccacccactctctatctattttactcaagttcttagctttcaaagagttcactctaacacaaacactattagcaatataattaaaagtgaccttaacagtagaaaatttttgctccgaaagtaccttgtttctagcatgccaaatg

SEQ ID NO: 147857 - DNA, 1114 bp, Cannabis sativa
  modified_base (737)..(742): a, c, t, g, unknown or other
tatgaaatatgttatttttgtaatttttgctcggtgacaacggaaaatgcaatggatggctagtatgatcacatgtgtaagtttagaacattatttcttagcgggatatattttggagaaataaaatatcagagttgagcggggttatggaatgtgaccattttacccctaatcttgaaaataccctagtttaagctaaatgacattttagtcatttgttaaaggggagggttaggtggctgcctaattatatgacacctagcaaagttaatttcagccaaggtttaatttagttaaaccattatttcattttagaaagaattaaagaaaattagaggaataaaccaaaaaatcaagaaagctcactcttcccttcctctctcttcgaactagcccagaacaaaggaagttgtttctgatttttagtgttttcagcaaggattcaaaggaaatcaagccaaggtaaaccctagatactttctagctatgttttctcaagattttagttggtttcaagtagtgattttgcaagttaggagctgttagggttaggttgtttgataattcaaattctagggttcatttgagttggtttcagcttctagcaactggttttgatgtatggaattagtttttctcaagtttgagctttgaactcaaagctttggtctttaatgacataaattgatttcgtgtgtttttctgtgaattactagttggaatatattgtgtatacnnnnnntaggtactctggaaggtttggctgtatttggtggaattttgagcaagaaatggagtttttgggtgaactagtgtaaactggctagccgattttaccagtacatgtaaaatcgattagccggttttttgcagggtttcccaaatgttccattttgtcaattctcgtgcattctagttccgtagttgggtgtttctctatttctcgagttagtgtaatccatagaaagtataacagaacctagagtgttgcgttcgggtttcccagattaaggtttttgatcatgtgatttacctagtttcattatgtgattaagacatccatttcgcacaagactttctattcaggtcagccagcacacttgaatcttgaaag

SEQ ID NO: 147858 - DNA, 534 bp, Cannabis sativa
ctcacaaataaccgcttacctgtatatctttccacactttattttagtgtaaggttgacttctttctaatttttataggacaaccctattgtctgacgccatctaactcctaaagtcgatactaacttggagtagtttttgccacagtactgtcctttgtcattcacctcgagtgccactcttttccttggtccatcagcttagatatttcattcatctgagtagctcctcgtgtaggtatcgacctaggacactctgcttttgggtctgaatctgatcctgaacctgagttggccatatctacaccattaacaaataaaatttacagttagctatataacaagtaacaaactaaacaatacagaacagctgtaacaaatgtttttttagtaaaatttattctaattttacgaaaattttggcagcataacgacggtagttggacgttcccaaaaaatttaaaagtgcctaaagtaacaaataaaacaaatataacaatacaaaacaaacaaaataacataaataatacaaaat

SEQ ID NO: 147859 - DNA, 628 bp, Cannabis sativa
cggtgccttggttgggtgtttccccatttccagagttagaataacctatagaaagtataacagaacctaaggttaaggttttgggtttcccggaagtagggttttaatcatgtaacttacccggtttcaaaatgtgattagagcatccatctagcacgagacttccgttcaggtcggccagtacacttgaattcggaaagaaggtaagaattgtgtataatatgtgatatttatgcaaatgtatatatgtatgatatatatatatgttgtgtgcatgattgaatatgtttgggtgatatcatagcgacacaatcattgtgtcggttcagcggtacaggcatcgtactggataagagtgatattcaccccagagagtatgaattggtgctatcatagcgacacaaacattgtgtcggttcagcagtacatgcatcatactggttaagaatgatattatggccaattgtactcttcgatgttattgatgctatcatagcggcaggaacatagtgtcgatcctattgtacaatcttagtactggtagtgggtgatatcatggtcaatagcacaaccagttagaacgttcttactcatctgttaagccttgtaaatgggtgtatgggcgcct

SEQ ID NO: 147860 - DNA, 555 bp, Cannabis sativa
attttttatataaaaattatgagttttttatattaacataatatcatttcataatattaaatttaaaaatattacatataaattttctattaaaaagtaggagtgtttacataatttataattcctggttccaaaccttaattaatctggaccaaatcctttgagatcggactaaataaattcggtgtgaatgatttggtcaatcaggaccatttagaattctttgattcaataacagttttagaaatctcctacatttttatttttgtaatttttttatagttattaatgaaataattctaaaaataattcagttccttaagatctataaacgtatgaatttaaatatctttaatgctaatcaaataatttagtacaaatattacaaacaatataatttaaatgcttttgctaaaagaataatttaggtattacgtaagtactacaaatctaacgctttaggtacttttgttgtaaatatttcttatttaattttatgatataactatctatgaaatagtaaatcttgtgaaaataaaatattcttaatttttt

SEQ ID NO: 147861 - DNA, 595 bp, Cannabis sativa
ttggactcaccaatgtgccccggtagtattcatagagatctcatgaattgggtattcaaggattacttgaatagatgtgtgattgtgttcattgaagacatcttggtttattatgaatcagaagaggaacatgagttgcatctcagatcgatactataacggttacgagatcacaagctgtatgctaagttcaaaaagtgtgagttcgggttatcttttcaaattatgcatttaaaatggtatttttgtaaagtaaggtaaaatatcggggcgttacactttaagcattgattgtgtaaatggtgttaaatgaaattatgaggcatgcgtttaaacgtgttcgtgtccgtgttttataaatttttagtgtcacgtgtcgtgctcgcgttagtaactttttaataaatttaagacctcagcacaacatgaacatgaaacaccaacactaattgccaccctaactataaagcatgacgagcacaagaaagttcaatcccaatctaaatagcacatttaacattattttcaatgcatgattgactacaatatgtgctacttgattagcatccctacaaataaaattcaaaccaattac

SEQ ID NO: 147862 - DNA, 898 bp, Cannabis sativa
  modified_base (26)..(27): a, c, t, g, unknown or other
  modified_base (299)..(312): a, c, t, g, unknown or other
taatggttttcaccattgctagaaanncatgaaatttctcaaacatttcgaatttctttgcataaggtaaaatctagagtgattgtctaaaaaataaaatgataactcatatcaacccctgaatgtacatccatatgtcaaatatagatgatcatactttcaagtggatattggcatattgactctttacaaagaatgatattgtcaaaccactataaacaagatacaaatgtcgtagatataattattgtggttgtgatctagttacaataaatagttcttagaatagtccaagtggnnnnnnnnnnnnnnatacaaaactcataatccatacataaacatacaatttggatccattgacaaaatatagatattaataacttgtgaaagtcatactgtattgtcaaatgtattctaggaaactgaaataaaaatttctctttggaatctaaaatttaaagtcaaagacttaattttataccatatatacaatgagttattattctctcttggaccactactactaatatatctctaagtctaatttgcctaaagtaaacatatacaagtaggtgattttctaagatcgaggatttatattattgcgggatagaatatcgggaatatagtcatctgcgccattcaatttcattagtgaaaacagaatgacattataagcagatgatttataaactattcatgcaatgatatattatcatagcaaattcaaaatgaaaaagctaagaggaaatattaaaggataatttcgaataaaataagaatcccacgatgtttcagtaggcgagagtaaagattattcttattttataaattttttcattgtttcatattataaacactaatctaagctatcatctttggatgtacaactagatgt

SEQ ID NO: 147863 - DNA, 501 bp, Cannabis sativa
tctcaaaagctagaaattctttaatatcacaatatctattattttttattaaaaaaaaaaactctataaatttagtgtgcttctaatatttacctgccttggaaaggtaatgcgaattagaatcaattttattaaaacaaaaggagcagaaagcatcaatcataatttaaatataatatatttatatcaaatacgacatgttcttcccaccacactaattccaagtccacactattagtacccatttagcatgaaaagaaaatcgagaaataagcaggcttactagtatattgatactttagaatgaccccattatatataagattgaccttttgcctatcaaattaatccattgcaaattgatggccctaaggactcatttgatgaaggcatccttttgcaagtcaggaaccaattctgttggaattgaggagaatgtttcgctgataagtaaaattttaaagtaggcaaatttatgttgatttaagaaaattaaaaagt

SEQ ID NO: 147864 - DNA, 628 bp, Cannabis sativa
  modified_base (33)..(38): a, c, t, g, unknown or other
  modified_base (259)..(267): a, c, t, g, unknown or other
atttgaataaatgtactaggttaattaaactannnnnncctaataaaattgattagcaatataattaatttaaaaatatatgaaattaatttagaaaaaaacacttactttaatgaaatttaaattcaagataaacttaatgtatttttttgtatttaattaaataaagaattaataactaattagattcctctagatacttaattatttaatatttcattaaaatatatataagttgaaaattagttatttataactnnnnnnnnntcaacttgaatttgaatattttttaaattcataattaagttgagatattctaggcaattagttattgaaatattcttttaagttgaaaatttgttaattttggatcaacttaaaaatagaatattttttttttcaaattaaggtgattagttcaagatacttaatttgttatttaattaaattttgaaaaataattttaaattaaaaatttttgttattttagaacaacttaaattagatatttttcataaatttatattttatatataatttcaaattttttatattaaatataaatggattttttaaattatcatttgaaaattaaattaaaattgaaaattaatttttttaattaatt

SEQ ID NO: 147865 - DNA, 511 bp, Cannabis sativa
tttcgaatttatttgggaaatggaagtaagacgattcgactgtatttgaggagtattgacaaagatgatcacttgactgatgatcctcccaaagaaaaataccttgtttaattcgagtaacttcaatacccaagaaatacttgagctccccctaaatccttcgtgtgaaactgggtatgaatgaaagacttaagggatgagatgccttcagtatcatttgcagtaataacgatgtcatcaacatttactactaacaaaatgatgccaacagttgatcttttttaaaacacagaatgatctgacttactattcaacaaatcaaatttctcaacagcatgactaaatttaccaaactaagcacgagggctttatttcaatccatataaagatttgtgaagaccacaaacttgccctaactccccctgagcagcgaacctaggaggttgctccatgtacacttcttgctcaagatttccatgaagaaaagtatttttaatatcaagttgatgca

SEQ ID NO: 147866 - DNA, 538 bp, Cannabis sativa
gtaaaataatttccaacagtaaccaccatctcgaataggttatgagttggtgtagatatgaggtttctaatatacacccttattgtctaacatataggtcactttcatagatcttccttgattgtctcctaatgttccttgtttgattacatcttagatgactcccactcaacagtaagagtctggttaagttcgtacatagaagtacatttaacctcttactattgtttctcaaggatatcttgttgtgacatattatcttagtctgaaactataatttccttatagactaagtcatcaacacagcaatctagtattaacattagtataaaatccttgcttaagattaagtcatcattagagataccataaaacatttcatgaggattaggaattttgcctaagtcattcaaatagactatgcaaaatttactatcttatcctcaaaataagtcatttctatccatatgaatggttagatttactttctcagttgaattctaaagttcctatcacaagtttcatccaaataaagatg

SEQ ID NO: 147867 - DNA, 502 bp, Cannabis sativa
catctttaattatatagaattatatattaattaaaattcaccttaatggacataacttgtaattaattatataggtataataattttatcctacaaggattttcttatatttttataattaattaggataatatattaaattaaattcttttaatttacttcacagggagttacgaggatttaatataatagttttatcacaaactttaattaagatagatttcattcctctttttcctaacttaaatatttcattaaatctatcataaaattcatataatttcattagatttaaaatttagtccacagacaattttagatttaataaagtttttatcttcatcatgtttctacattggtaaaacatgaattcattaaagctttaatttttttgacatttaaatttgtaatcctattcttgcagctatttcatccacttctaaatacgctgaaatcactagtgaaatccctgaacttcggagtgacaacttcaaaatctgga

SEQ ID NO: 147868 - DNA, 604 bp, Cannabis sativa
aacaaaaaagtgatgcacaacagtctttcttttgtcgatacaaaattgcacaattttttcgagatgtgtagggtgagattttaacagaacacttacgagtgtaagagtaaggaaaaaaaacttttaaaatttattgtggaaaaaggactaatttcaatttttgaattaggcaggcattttaataaaatttaacgcgaaacaaaccttcatattcacatcttagtagtacgaattccttgagactactgacaaaaattattctgagatgggtcggggccacatgtcacaaaggggtaccaatatcagaaatgttagattttcactatttccattaaaataattgttacggcatgaaaactactttttctctcaacgtgtcaaactgaaaagtgatgcataatagtcttgattttgtccctgtgaaatttcacgattttttgagatgtgtagggtgagatttttacataacactaatgagtgtaagagtaagaaaagaattaggagaccattttaaccaaatttaatgcaaaataaatcttcatattcacgtcttagtagtacaaattctttgtgactagtaacaaaagaattttgagatgggtct

SEQ ID NO: 147869 - DNA, 666 bp, Cannabis sativa
accttccacatcaacaataaccatctaaaggataaaattaaagaacggttgggtagttatttagtattatctcacatgtgatttaaatgaaacgtgggaatggtccacgtttcatgaacaaatacatttaaatcaatctcaaaaagaataagtgccaacctatactcctataaataggggcagattctatggaaaacgggacggtaaatttaagagtgaatgattattattaaaattttgaagttgtactatgtattcaaaaagatctctaataataaggactcgtggagtatgtagatttcaactacaaaaccacgtaaaaatatcttgtgttataattacatttatttcttatttatttctgtagaatatttattactaaaaggctatttaattttagttaacaaaaatctacgttaacagtttggtgctttcattgagagccttagtgataaaactcaaaaaaatccctccttacaaacagaaatctatctatattcaatggctgataacaatcaaactgatgaaaattgtcctgaggaaactacacatcgccttgggaaatagccaatgggatctcaaagactccataccactggaacatcacgttcaagaagaaactatggtggtgatagtcaaaatcaagaaagaaggaatgaagatacc

SEQ ID NO: 147870 - DNA, 812 bp, Cannabis sativa
gtacacttactggaaagctataaacaacttgcttttaacaagaaaccacttaatcagatttatctgcatttcttcatctctttgtccgttttgtgagattgaagaggaatctcatgatcatcttttcatgtagtgtatcttcactaagaaagttgttgaagatatttactcttggctgggatttgtgaattggccgaagactagacttgatctagttgattggtgctcgaaaccatctttggggctgaaggaaaaagtgataaacaccgttattgcctcaacgatttatataatttggaaaaatcgtaatagatgtgtatttgataattgttgtagcttggtcaatgtggttagtaaggagattaaatttcttgttaagtggtgtattttgagggtaattaccaatgtaaaaaaggatgataattatataattcgtgttgtagaaagctggtagcttgtgggatgttttgttggcgtttgccttgtttgtattgtttgctctgtttgaataaaaagtttccttttgttcacaaaaaaaataataaaatattatttttaataagcatacttaataataacgttttattaaatattatgtaaaatatattttaatttaataattattatttaaaataattaaaacatttcacaatggcaacatagtagtgttggaataaatagtatctaagaactatgctcttatattattatttttttctatgaaaaatattacttttgttataaatattaataactatgtggatgtccaaatcttttatttattaccatgaattgtaatcaacattcctctt

SEQ ID NO: 147871 - DNA, 566 bp, Cannabis sativa
tgaactggggttaaatgctgaagacacaacagtgcactgtgacaaccaaagtgcactgcatctcatgaagaatcctatgcatcatgagagatctaaacacatagatataaggctccacttcatcagagacattatctccagcaaccaagttcaagttagaaagatcagcactgatcacaacccagcagatatgctcacaaaatgtgtcacccttgacaagtttaaacactgtttaaacttactaaacattgaagaagcttaagtccaaaatcctcaatgtgtctcaattaaggtggaaattgttataattaagacacattatggatctttggactgccacatcatcaacttccctaactaactttgttagcttcctaacaacctaaaccgacacctataaatagtaactcttacattggtttagagttgagactttcaaattgttttatattaagatcacttagaattaagccttgtttgtgtgtgaatggagggatgtaaaagggattgtgtaataccctggaattaaggaaataaattagcaaaaccctaactagttaattgag

SEQ ID NO: 147872 - DNA, 590 bp, Cannabis sativa
gaaccatggtgcctagtgcctagggcttggaatgtagggcttggaatgctgatcatggaatgctgatcaccgaatgctgatcacctaatgctgatcacctccgaaagtattaccaatagtcaaaaagcaaagtttattttctgtaaaagaaatttgtaccgaacaaatatatgcgacctctaatttaattttgtaagactaagtgactaaaaaactaattttcatgtcacttagggggtactaaggcatatcacacggacaaatgtaaacagatcaaatttaaggaagttaaaaactaaatatattcgaacataatgtagattgtttgaacaaagagaaaaaactttaaaaagaaaaggcatggggacgggccataaaagtctccccttaagaaaaagaaagaaattatcttaaaagtgaggggaagacaggatatgtaacaaaaagaaaaaatgataataaagataacaaagataaacaaatgatttaatcatcccgaggaggaagacgaggacccctgcgctcctccaacactgcatctagcctcttcttcttctcccagaagcgaacaagaacctcttcaggcttgg

SEQ ID NO: 147873 - DNA, 525 bp, Cannabis sativa
  modified_base (321)..(324): a, c, t, g, unknown or other
tatttattaattgagagactttattaagcctaattaataaatatattaaatgggaactttatttgataattaattttaattattgaataaatagtcttggcatttaagaggtcaaattggaaaatatgacatttttgagaaaaataagataaatagtttaaaaattgcaaaattgcaaagtggtgggcccacatcaaaggtcgaccacttatgctttattttaccatttatttattaattttttaatgcaaaataatttgaacctaaacctagatggattcctataagtagatagtgatggtctcaaattaaaagatgatnnnntcaagcctttcagtcaaattttgagccttctcttctctctctatttttgaatccttcatctctctttctctcttcaatttcgaaacctatagtgatagagtacatgcctgctataacaagttggtactcaatcatagtgtgtgagactgtgaagaatccaaatcaagtgaaggagaatcgggcttagatcttggtgatact

SEQ ID NO: 147874 - DNA, 831 bp, Cannabis sativa
tatcggaaggcaaccccgagccagtacaaatacctcagccaagtaatagtgaagacaagccgacttggaaactacatgtggacgggttgcatatagatcaattattcagtgcaggagtcgcccttgtcacacatgggggcaacaactgcacgctgcagtcaagtttggatttaaagcatccaataacgaagccgaatatgaagctttgatcactggcctataactagccaggagatgacagccgaacatatcaaaatctgtagtgtttcaccgctggtggtaaatcacgtatctagagaatacgaggcttggggagaaaagacgatagcatatctgagcaaaatccatgacctactcgcacaattcaaaagctacggtctccaacaaattccaagggaagaaaacacgactgcagatgcattagcttggctggcgagtagtaatgtaagtgataaagcaaacttggttcctatcaagttcctcgaagaacctagcattactggcatggaagagatcgaaatgttccctaaactggatgatgccaatagcaacctacctcaacacaggggaactcctagataatcgaaatgaagctcgaaaaatgagaaggaaggctgcacggtgtatcagagggaattacagacgagggttctccatgccattgctcatatgtgttacccgagaagaagctacacgacttttatctgaagtgcaggattgattttgtggaaatcataccgccgggcagagtttatctaaaaaaattctaaggcaaggttatttctggccgacaatgattgagttaactcagatgcaaagtgcgtggccttt

SEQ ID NO: 147875 - DNA, 515 bp, Cannabis sativa
tagtacacaatagaatgagcccaagattacagctcaacacagtaaagtattacaaacaaatgcctcactttgaggaaaatctgttcaagagtgatactctcttttacatccctctacacacactcactatgatcttgggctctctctctcaaatgaatctaaagtatgagctttggagattagaactcagaactctccttttgagaatagagaaacacttatttatagttgttggtagggtcccctttaagttggtattaaagccaactattataaataacaacggctttcttcaaattcatctgatgagcaaatagatggacataatgacttgataggttaagtgagtttaataccaacaattctacctgattagactcacttaaacactgatcccaaataaatgagtgagggaattaaatgtcctgaatgctcaacaagtttagacagtgcctaaacttgtctctagttacacttttagtgaaaatatctgcagggttatcatgtgtgcttat

SEQ ID NO: 147876 - DNA, 655 bp, Cannabis sativa
gtgtaacaaataggtgatatctcttcattttaagagacatcaacctatcatctcttgtaagctctcctatataaagagtactaaactaaacctaatttctctaagtccaaaacgctctacgtcttaagttctaagcttgaggtccaagctcaatgtgctaagtctaaaaccctggctctccctctctctcttctacatgcctcaaccaatgtagaagagactaagtctctctcatctcttctacttgagatttgcttctcgattctcaccattttgatcttaagagagccaattcataatcttcaaaagttatgatctgagtggtattatatctggtatcaatacaactaaaatgggagtaggtcattacccgctaactaagggggccaaacctctataaaaatactacgtctcttcgatttacttatttttattgtgtacacgtggtgatatcagtcataaatatgactttactgtcggttggccaaatttgagatcaacaatattgtgctttcatttagagcgttgtcgattgatttgatctaccaccatgtttttaataagaagaactccggctacaactccagcctcattgggttttcctcaagaccccatgactccaaattcggatgttcgtgttctagccacaactaga

SEQ ID NO: 147877 - DNA, 886 bp, Cannabis sativa
ttttttttcgaaatggtgccctgagcggtggggggcctaaggggaccgcctccttcgtcttagctcagggccggccctgactgtgggttttggcattcgacagtgtcatagatctgtgtaaggatttgattttcttttttgtgtagctttttttattattcaaaatttgttctattaatttttaagttttgtatccatttcgtagtttcaattgttttgaatattatgcttgtctaatatatatcaatttttcagtttaattttttattgtatttgttgaatcattggaattctattcaacattcaacttattacagtttgtattacatatttgcttgaaaaaactttgaacatataatatatattaagaaagataattggtatattattacagtttattagattgattttatttaaaaaaataaaataaaatgaaaaatttgatgttgcttttattggtcaaaaataaaaataaataataaaaaatagatacagtgacaccctataagggtagctattatttttatagtctcacaaggtggaactctaaaagtctaaagggacgctccacgagggactctaaaaagttttgagtgaccaacattcaagggtcattaaatattgtctttccagtcactcacattagtgatgaacagtgaagtgtcactaaaagtttttagagtccctcggagtgcgtcactgaaatctatttttgtagtagttaaccctaacccccactattcagttttctttaatttttaacccgaaacctagtatttcaagctctggtagtagtaggatagtaaatcattcaagagtgaaagcttaagataaggattggttttgttttaagttaaaatgattagttttatatagtgactttata

SEQ ID NO: 147878 - DNA, 1031 bp, Cannabis sativa
attaacccctgattggatcaaacatcttttgtaaatggatctcatattttgtttctcaagtctataaactgtcaaaatatatctataatataattgacttttgaactataccatttaaaaatatgcgtgttatttatttttttgctttaatctctcttatttcatttctactttttgaggtgacaaaaaatctaatcaatatttagtgtttttgattaagagcttgaaagtgaaagtttgctactccatacaatggtagctacacacaacaacgcctagccttttgggctctagaatagatcattgccaactaacaatgtccaaataccagttgaacaagctcacataccccaatcagcaattgacggaaattcaaccagcgggacgggtacttaacccaaatggggtggggattacccgttttgatgggttatagggcaggtattagtactaaaagtggtaagttttatattcatcaacttgtaactgcacgaatctttactgaagtgcagaaattgtaaaaaatgagatcgaggctatgagaattgcgtgagattgaagaaaatattcatttaatctaaattatttaaactctaacctagtttcaaaaatcataagatttttgggaactaaataaaataaagtgtttaacggtaaaaatgtcagtaaaagatatttttagtggtatttggttaagatttcagaatccacttaactgtatataaaaatatttatgtttatattcattctcatattttaattagtaattaaactaattattttctaagaaaaatagattttcaaaacccaacacattcatgcttgatgatcttccctcgaatcaatggagatctcgttttcaagaattcagaacatggacccttctagaagcacaaaaaccaagggcagagatacgagatatattgctacaattagtatcaagattcactggaatcttacaagattggtggctgttgaatgcattttttttcttcttcttttatttattattaaaataaaataataataat

SEQ ID NO: 147879 - DNA, 698 bp, Cannabis sativa
tgtgatcttaattatattttctccgttgagttattgttactgtgtttgatattctaaaatctgctcaacaggttcatcaagtgatcaaaataagcagcccttgaatcgagttttgaaaaacatgattacttaccaaatattacctatgttgagtcaaatgtcaaaacaatgaccacaagaaaaaaagttcacattaggaatccatacctgctactattttcatatcactacaacaaatgatagtattaggggtgacaaataattacctctaataacccattattagggacgatattcattagtcgcccctaaattattgtttttattttttaattcagtttaaaaatttaataggggcaatgttttttaatgtttaatgtttaattattgttcttccctacacgtagggcccccatcacagcaccctccaccgccatatcattatccttacatgtatggtcctcaaccgcaacaacctcagccgtagcagcctatgtcgccttatgtctatcccgaacacagagacatacctggatcttcatcttttcctcaacagatgccaccgtattcatggcctatgctgcctatgtcgtcaatgccacaatagaaatcataaaatcagcactatgagagcgaggatagggaggatgatgatgctgaagtaaccaggtagttttattattataattattgttatt

SEQ ID NO: 147880 - DNA, 559 bp, Cannabis sativa
tggcttctctgttgcggcgatccagcttttcttggtgagttcaaaggatgtactattggccatccatccatctcaagaatttgcatctctactttgtgaatacatcacaatcaatagcgtgtggttcttaagttaggctggcttggtagacggcctctctcagtctagctaactcgagatcttctcccaagtccacatggggcttgccaattcctggtcatgtctctccaacatagtactagagatgaggttcggttgttgaacctgagggctattccctaagggtctttcctttagtgagaggcgccagtggtgggtcttccttcggaggcaagggtctgctgcttagatccaccgggatgtttgtgtcactctggcagctatagtgaccagattcgaggtgcctgtcatgatggtaagattgaccacatttgcatgggaattccaatagtggctggaacatgaacatcaggatctacagtcagagcgtcttgaggaagacctaatgatgtagatggtgcaaccagagttctcatgttcaccatggcgtttgaataga

SEQ ID NO: 147881 - DNA, 1296 bp, Cannabis sativa
  modified_base (85)..(88): a, c, t, g, unknown or other
  modified_base (117)..(118): a, c, t, g, unknown or other
  modified_base (247)..(255): a, c, t, g, unknown or other
  modified_base (542)..(558): a, c, t, g, unknown or other
  modified_base (1016)..(1018): a, c, t, g, unknown or other
  modified_base (1250)..(1253): a, c, t, g, unknown or other
tacttgtgagtagatctaacatcctggtaaaataatttccaacattataaccatggataattaatatcgttttagaagttcatannnnggatgtttaaacaacatacttgttagtanntctaagatcctggtaaaaatatttccaacatatctgactctaccatggaggttgaatacaaagctgctgctgaggctactaaagaactggtctggccaagaaagttcttcacagaacttggtgttgttnnnnnnnnngaaaaaccactggttttactttgtaacaacactggtgcaatagccagcagtaaagagcctcgaagccacaataagagtaaacacattgagaggaaacacacatcatcaaagaatatgtggcaagaggggacgtactggtgaaaaaggttgatactgaagacaacttagttgatccattcaccaagatttcgacagtgactgcatttgaaaactacagagagaatctaggattaattgaaatgtactaatttttttatgttagtacaagtgggagtttgttgggtttnnnnnnnnnnnnnnnnntctatttcaatgtaatcttcttcaattatcaataaaaaaaaaaacagatttatttctttacttgttcaatgtattatttggttcacatgtttattttatgatcatttgctaaatttataaatttatctaaatccttatcacattgatattcttaactattgtgttctcaacacagtggaaagtaatcaaaattacgtgattaaataaaatcctacgatttatcaatacacatgatgtcactattatgataatctacattgtagtttacttgcaccttagataagtgctatgtcctttctaggaaattggtaaagtaagcttggattggatgtatatagtatacatcgaaagggaccgatattgaacttagataagatataataaacttaccgtaatatctatctaattcaatatcacctaattgatcttagatcaaatgatctcaatcctaagatggnnnggttctagttcaattgtattatttatgctcttcaatttgtttaataaagtcgaccaattggatcttcttgtgacatacagattaagaacatagtagtgtaattgagtgggacgctaatcatagatacaaaatctatcgcttctataaatacatataagtgaaataatgttttctttcgagcttgccttaatagagataaatggtggagtactcattttagtaattatattannnnactgaaatatcatttataggtaactaagtattttaaggataaa

SEQ ID NO: 147882 - DNA, 552 bp, Cannabis sativa
ggtgcggtgcggacggtttgagcggttttggcggtttgatgaacacccctattattttgacaaattttagtctccatagtccacattatataatttagatgtctccacacaaaaacttgggaaggaaattgaaaaatacctcttttatttatcaattaatcaaatttatatttaattaaaacatacctctttttatatgcattgtatccaaaatatcttgatataaatgagtcacatggagactatattgaagtggcaagagaaaaattggtaaagtatttaaataaagagataaaattaatagactttaaaaaagaatgtaaaaataaaaaaataaaaaaaaagacaatataaaaagggtatagagtctaatttcctcaaaatctaacatactatgtctatggattgtacattatacatttttattattatatttttacacacttcaaacccttgttttagataatgatcaattagtactctctatttataacaactaccacttttttttttttttgaacaaaggatgattatgcattaaaaaaggcctca

SEQ ID NO: 147883 - DNA, 764 bp, Cannabis sativa
  modified_base (710)..(725): a, c, t, g, unknown or other
ttagaaagttcatatttagggagtttaaacaacatacttgtgagaagatctaagatcctggtaaaataaatattccaacagtgggggtgtcttattaactcaatggtcatgtgaggaatgcatgcccattgggatactggttcacccccagccatttcttaaggtacacagttagttgtatatgtgcgacttatactttgcgaggattgactaaattttcgaaatggcgggtgtgtctcactaccttaattctcaggtagcgacttgatcattatgctattgagatacaccgaaccatttctcgagatgtttggccaatcctttatattttttgaattttatgcgggtgagggcactttattatccttgcactttcaccacactgaaaagatcttctatccttttttatttctgattaaaaatagcctagttttttggaatagggatggctacatttgtttcctctgtctaggacccatatgattccagatgatactttgtttttccttttgattggctttttgtgtttccaatttgattgtctagaatttatactctttgagactttgattttgggatgtttggtccggtggggacctctcacgtgtccctactatcttctttagtatgagtatctaactacttggttattttttttcttattattttccaacttctaccacggcaaaagtgttggaatttattttacnnnnnnnnnnnnnnnnctcacaagtatgtttattaacatagatcggaagagcggt

SEQ ID NO: 147884 - DNA, 596 bp, Cannabis sativa
tataattgttgtaagaagaaatgagaaaagttttagtaatctatgtaaatttcccaaaataaaaattggggcaaataaaaaaataagactattgggatttgaactctgttaaactaatcaaattatcactaggctacaatacatatttagtattaaaagcattattattatttattttattactaactatttttttttgcgaaatggggccctgactggtgggggcctaaggcagccgcttccttcgtcttagctcagagctggccctgcacaagattagtagtgtagataaatttattataattttcattttgtgagcaattgtaatttctaatagtcttaaaaataatgttttaagggcaattactaactgaaggaatttacttagaacaatatttggttattttagtctcttttatcttttcttttttactgttgatgagatttgttattgtcttgtcctctttaggtttcactttaggatggagggtgtgatcaaatttaagtcaatgctttagttccgttagtataaatagttagtgttcagttcattttaaggcatagccttgtacattttttattctctctctctctct

SEQ ID NO: 147885 - DNA, 890 bp, Cannabis sativa
tgaccattttacccctagtcttgggaaatacctaagttttgacttaaatggcattttagtctttttaattaagggattaggtggctgagtttggtgttggcagctggccactcaaattattcagctaagattaaccctttctcatttgaagaaaatcaaaaattaaagaaaaaaaattaaattaggaaaaacctcttgaagctctctctgtctctctttcggctggggcaaaaccagagggaatcaccctcaaaccttggtgtttggctggattgaagctaagaaatcaagcactcttgaagctaaggtaaccctagacacttttagctaagttttcttaaggttttaattggtttcatgttgtgatttcaagagttagtggctattagggcttgggatgtttaggtttcgaagtttaggattcattttgattgattttaacttctagtagttgatttggtggtgttgtgttgaatttatgcaagtttgagttttaaactcaaagctttggtctttaatggcaagttgagttttattgggtttttctgtgaaatactagctggaatatgttgtttatatattgtataggtactttggaaggtttggttacgtttggtggagttttgagcaagaaatgaaatttcttgtgtcaattggtgcaaaccgagtaaccggttttccacgtagccggttttggcagggttacccaagcctctcatttcctcaattctcgtccattccgtgccatagttgggtgtttccctatttccagagttagagtaacccctagagagtataacaaaaaacctagggttgtgggttcaggtttcccggattaggattttgatcatgtaacttacctggtttcataatgtgattagggcatccat

SEQ ID NO: 147886 - DNA, 675 bp, Cannabis sativa
gactccgggcacatatcctgctactccggtcgcgtagtatcccccataagccactatttgggcctcctctaagttgatgtacttttggactctcttctagaaatcttgaaggttcgaggctccttcttcctgtaattcgttccaaaatggagtccctgtacggatccctagttgaagaagtacaaactgttgtccgtcatcaactttcttagtcttggaggcttcttccttgaacctctttatgaaatttttcaatgtttccgtgggcagttgcttgatgtttgttagggcactgacttcgagattaaccttcttgcagcgacaaactgtctccggaaactaacttgcagcttgttccaacagtccactgatcctgggtccaacttcttgaaccattcctctgcggacccactcaacgttagcgagaagcatagacatttagcatcattgctgactctcatgacagtcattactgggttgaaccgagataggtaatcgctaggagccgagttcccggtataagctgccatttcgggcatcttaaaatttttggggagctccgcctccagaatgtgtctggcgcacggttcttagtcctcacagtcagagtttgagtcatcacccttttatctccgggagactcgaacaatgtctttacgtagtatggcaagctca

SEQ ID NO: 147887 - DNA, 1214 bp, Cannabis sativa
  modified_base (69)..(71): a, c, t, g, unknown or other
agaggcgttggttggagttggttaaggattatgattgtgagatcctttaccatcctgggaaggccaatnnngtggtcgatgccctgagcaggaagggtccaaggtagatagctagtatggttcagatttcatcttagttagcagaggacatggttagatctagcatcgagtttgttgtaggcaagcctcataacttgacgctgcaatctgatctgttagaacgatttaaagtcgctcagttaactgatccagagttagtaaagatcagaaaagaggtatcagctggtcaagccatggactttacagtcttagacagtgggatgctgttgttcaaaaccagggttgttgttcctaataacgcggaactcagaaatgaaattctcgaagaagctcatactactccatattccctacatcccgacaccaccaagatgtacaaagatcttaaaccttacttctggtggagcggaatgaagaagaatatggtagaattcgtatcgagatgcttaacctgttagaaaattaaggttgaacatcagagaccggcagggtcgttgcagcctttaaccctacctgagtggaagtgggaaaatatcatgatggacattgtggttggattacctagaactacgggtttgtttgattctatttgtgttgtggtagaccgattcacgaagtctgcacattttctaccacttagaacaaccttctcagtggatcagtacgtggatttgtacgttaaagaaatagtaagactgcatgctgtaccaaagtccatagtttcggataaagatccgaaatttacttctaagttttggcagagttttcaacgggctatgggtactaaactgaaatttagtacagctttccatcctcagactgatggacagtccgaaaggacaattcagatgctagaagatatgttgcgagcctgtgttatggattttgagggctcttggagtaagtacctaccgttgatagagttctcatacaataacaattatcaaagtacaatagggaaggctccctatgaattgttatatggccgaaagtgtagatctcccatacattgggatgagagaggggagaagaaatacctaggtccaagattagtacagcagaccaatgaggcaattgagaagattaaagctagaatgcttgcctctcagagtaggcaaaaaagttatgatgatcctaaacgcagaaatgttgag

SEQ ID NO: 147888 - DNA, 1081 bp, Cannabis sativa
tttttttttctaaaaaattaaattcaataattatttcattttactttttagtacacttaagtagtaatttttcattttttcatattcttctaaagatattttttttagtatgttgctttcaaaaaaatatttattttaataagcttgttgatgattaaccgtttttaaaatttattttctaaagattatattttatgtctttcttagatttgttttctttatataatataataagtacaataattataataaaatataaattaatatgtatacatcaaggtacatttaaataagcatataaccaagtaactcatattaaaataaagggaaatttacggcaaaaatccccaaaaaaatcattttgatgcagattagtccccaacctcaaaaaatagcggcaatagtcctcaatgtcacactttttatttgtccgttagtcctaattttaactgagccgttttcttttttaaaattgtcacgtgtcaaaatattattggtccaaattattattttaattttaataaataaataaataaataaataaataaattatttaaaaatgatttttttttctttttctttcttttcttcttcttcgtcttcttcgtcttctcactgcaccctaaccctaattctaaccagccaacaccagctgctgaaatggctccagaatcacaaccccaatagcctcaatcacaaagattcacttccctgatgaggacgacgtagctctcgacgcctctgtcgagacctctaaccacgacaaattcatgtgcgacgttgatacctccctttctgtctgcgataaacctactgaagatcctcaatgccagcccaaccctaattcttttcttcaatatacaacaacctcacttctctctctcaagaaatctgggtggtgatggcatctcgggcgtggtcgacggaagaggagagggcgaagtctgagatttagggtttaggtcgaaggggagagacggcataatttttgttgcaggccggaggggagagggatgagacgtaggtggagagagaatttctgggcttggacgcttgtgaatggttgaggtgcagctggtgg

SEQ ID NO: 147889 - DNA, 511 bp, Cannabis sativa
aaagaaaagtttaaacaaaggtgagacgaaatcctataaatcattttttttaacaaatgattcataaaaaattaaaagagttattaaattattaattgcacaagtagtagtaggtagtaaataaaattatgatacatgaaattatatatttatcatacttataaaagtaaaaggccaaaatttaatatttatacttattaattattttttattgaaatagcacattatttaagatataattttatttttttatataaattttaattataattttcttaaataaatactcaaaatctagtctatttttgttttaataaaaagagatcaggtagcaatactatctatatttcttttaaattgtttattttttctatttatattttatattttttttagttttactattttatactaataatctttcattaaaattcctttatattgttaatttttatcaaactataattttatataaaaattaaataaattattcaactatttatatataata

SEQ ID NO: 147890 - DNA, 631 bp, Cannabis sativa
acaaagtactatatttcttaactagagacatcattttttttctaccctgatgaatttttctaattttgactcttagaaaaattatatcctatagctatttttttttttaaaaaaaaaataacattgtacattataggtattataacgtacacatctcacatgtttttaaaaaattaataatttaccatattgaaaataaaattcaaaataattaattacaagcataataacaactaactaactatttgaattatgtttttcatactttaaattaattaatcagaattttaatacttaaaaacaacggaaaaaaattgaattataatgtctcattattacaaaatatatagaaattaaatgagccatgcaatattaggagggaaaataatatccttatctaagaattttttctatatatatatatttttaattttacatatattaaatatataactatatgcatgcaatattgttaaattattacaacactactataaattacttcatgataaataataaaatgagattaaaagagcaatagggctacatcaataaaatctttacatataatatatataataaagttatatatagaatctgttatggatagctttgaagggggtttgatgaa

SEQ ID NO: 147891 - DNA, 750 bp, Cannabis sativa
gctacatatttcaattactgacttggtagaaaaatcagtagatttaatgatgtttttttttttgttttgaaatttcggattaaattacaagatctactattgttttgggcgttttaccccaaattgaatccataggtagattagatttttagacccgatcaaaacccctcatttttccaatgatttggcgttgttttggttcgtttttgtcttcgacccgactagagaaagtcgggtcacgtgaccttctttcagactcggtccatggtagcagattactccctcgctagcgaagccaactctaggtagcggcgcatgggggcacgtgcgctcccgtatgatgtcatttttcgacgattattttgttaacatggttaaaatttaatttctaattattttaagatttttaattaattttttgactccgtttaataattattattaatttaataataattacacagaataaaattattaaataatttttttgataacttttagaaatctataaatcatagaaaatattttgaatttcttctcattatgtttgacatagtcactctcttattttaatttatcttgaatatgaaatttccatcaatattcttattttcacatctttccattagttctaaatttataaaatttgattgtttgatgcaaaaataatgtgttatggtgtagactttactttttattatcaacatattacaagcaatttatatatatcttttttgaaatttggcttaa

SEQ ID NO: 147892 - DNA, 585 bp, Cannabis sativa
atgttggatatgtttcaatggtgtctgtgttttttacaatgttattgatgaaatatcgataggatatcaataggatgtcgatattttgggtatctgtttgaccattagaattgtaagtgttgttattgtatgtcgataggatatcgtatgtgtgtcgataggatgttgatatttgattgagtttattttctgtcctaaattgtcgacagtatgtcgatatgttgtcgacaatgttatgttgttgctttaagtttgatgttatcgactgaatatcgacaggatgtcaatattatgtcgacatgttttcgtaattgttgattgtttgatattatcgactgaatatctataggatgtcgatattatgtcgacatgtttttgtaattgttgactgcttgatatttttgactgaatatcgactggatgtcgatattttgtcgacatgattttgtaattgttgattgtttgataatgccgacatgacgatattttgtcgaccattttttttaattttttggcagtaatattgatttgttatttgttttttcagatggctcccagactcataattccagcacccgagcattt

SEQ ID NO: 147893 - DNA, 1233 bp, Cannabis sativa
  modified_base (27)..(30): a, c, t, g, unknown or other
actaatcagattgtaaagagttttatnnnnggcataaaacccaacactacctaccagagactagcaaacaaaatgttcaaaaatcatatcagacagaatatgaaagtatatgtagatgacatgctcgttcaaatccaagaaggcttgagggcacatagaggatctggatgaatacttcaaaatcctcagaaaatacaacatgaaactcaatcccttaaagtgttccttcggggtcagctcgggtaagtttcttgggtttattaaatgctcggggaatagaagctaatataaataaaatacaagccctcttggatatgaaatcacaaaaaaaacaaaggaagtctagagcttaattggccgtgtagccgcactcagcagattcattttaaaatccacagacaagtgtgtttctttcttcaacatcctttgaggtaataaaaagtttgaatggatggaggaatgcaagaaaaccttccaagaattaaaaaggcaactcacaaaacccccgtactctcaaaacccctagacagagaagaattaggaatatacttggttgtcactgaatacgttgtaagcgccgtgctgataagagaagaaaataacgtccaacatctagtttactatatcagcaaacgaatcgttgaagctgaagggtgatataactcacttattgcctaatctttgccacaaggaagttgaggccctatttccaagcccatcttgtttgagtgtacaccgtccaacctttgcgctaagtattgcaaaagctagatccctttggaagattactcaagtgggtgatagagttgggatagtatgatattattttgtaaccctgtacagcagttgaagggtaggccttggtagactttgtagttgagtgcaccagaaaagaagaaagaaaaacaagggatgacttgaagccagtacaagaattcctaccagaaaagaatgaacacaaaccctattggaaattacatgtggacagatcagctacagactagctttttcgcacaggaatttaactcatcacacctgggggcaacacctgcatggagcaatcatatttcggttcaaggcctccaacaacgaagcagagtatgaagcactcatagctgggctgaaacttgctcgagaggtacacactgaatacattgaggtctgtagtgattcacaattggtggtaaatcatattttacgagagtacatggcccgtggacaaaaaatgatggc

SEQ ID NO: 147894 - DNA, 525 bp, Cannabis sativa
cataacggaaattggacatcgatccaggaccataaccggaccaggacccagattccaaatctgacctagacccaaatttggagccggacccgggttcactcaggacacgaacccgaccttgaactcagactcaaacatggaaccagactagggacacagaaaccaaggtcgggacctagaaccgcacccctatctcgatcccgaacccaaactcacgaataggtcctgggccctgaacaagaaccatacctagacccgtgacagtgatcaagatcttcactcgagattttggtaacgggccctggaacaaaccagtagtcggtttctagatctgggacttagactacgaccgaaaccaagacgaagaacaaacacgaacccatacgtagacctgggatccaaaattagaacgtgaacaagaatcgccaaacagggaccctagaataagactaggaccgtgaccaaaactcgaaccttgaccttgaaccaaacacagacctagcctcagacccaaactgagactgg

SEQ ID NO: 147895 - DNA, 917 bp, Cannabis sativa
gttacaagttttattgtccatctcatagcacaaaaattgtggaatcaaggaatgcaaaatttcttaaaaatgccttggttagtgggagtgatcattcgaaggacttaggtcccgagaaagatccttcggaaccctccaactcaaaagtaagactaataatggtcaacactcctgtagttcaaacagatgttgaacaatcattaccaatcattgaagatccacaaggtggtaattataatacagtagattaagatgttcaagagttttaggtaactattgcacaacctactgaaccaactgctgctccccaagagcttgttggtgaagtcttatgaagatctactagacctgttaaaccaaagatttacaaaggttgtgttgtgtatttattagaatctgacatttgaattggaaatcatcaagaaacatttttacaagctatgaacaacagcgaatcaaaattgtggtacaatgccatggataatgaaatgaattctatgaagtgtaacaaagtctgggaacttgtaaagttacctaatggggtgagagccattggatgtaaatgggtctataaaactaaaaaagactcattaggtaacactgagagatacaaagcgagacttgttgctaaaggattcacagaagaagaaagaattgactatacgaagactttttctatcaaagaaagattccattagagtcatcttggcaatagttgctcattttgatttagagctgtagtagatggatgtgaaaactactttttttgaatggtgatctggaggaggaggtatacatgaaacaacatggcggattctcctctaatgaaggtcgagatttggtatgcaggctcaagaagtctatcaatggattaaaacaagcatcccaccaatggtatttaaaatttcatgatgtca

SEQ ID NO: 147896 - DNA, 697 bp, Cannabis sativa
tacaaattatggaatcatgattttcctaacggatcaaatgctggttccctttaagtgttaattctagaactggaaagttatgtacaaatttagatgggatctaaattatacttccactagtgttttaatggtactaaaagataaagaagtaattagaagaaaaaaattgtattttaaccaaaactaattacgaaccacctgattagtatatgaaaatgcatatttcaaagcattgattatataataaaattaagttttagtatttatattcataagttttaaatgagaattttattgaaaataatattattacttaacttttgtattatttttcaatatttgaaaagttttgaagcccaaaggaatgaagctcctataaactttaacaaaacccacacttaaatcatttatatgcattgtatcaccttggtcacttgggtctcaattcatgggctggagttaataagttatagcccaacagcaactcaacaacatcaattgttgactgggcatggtggttgtgtgaggtggctgggaccgggcaaagtcggagtcaggcgtggttgtgtgaggtggctgggatcgggcgaagagggaccaagagagagaaagggattaggattttgacaaggctattttgggggtttttgaaaattggtcctattttaaaaattacctacactaagtgttctccaaa

SEQ ID NO: 147897 - DNA, 603 bp, Cannabis sativa
ttttttttttttttgtatattgagaaatattaaatgtataaagtttgttcattagtagagaggtcttgaagtacttcacatgcatcaagaattatgaaaatttatattgtcattaatgtgttatattcatatctacttgaaattttaaattttagtatgaactaagttgtgtacacacataaatgatacaattagttggataaatattgatgttgcaagaaccattcatctagaatttaaatgtcaacatatactctggaagatttatagaaaatatatgatcatagataatatacggtaatattttaaaagtgataacaataattttatgagatatattatcaccaaaatgattgtggatcatacgtacatgagggggagacatattcatgttgcactctttttgccttagctcaggttttgtcccactgggtttttctggcaagatttttaacgaagcaacttgcaaataattatgaatgtgaaatatatattgcaatcttttttttagctcagattttgtcccactgaatttttctgacaaggtttttaaagaggcaactttaaatcatgttaacatacttgcattttatgaaacaagta

SEQ ID NO: 147898 - DNA, 1087 bp, Cannabis sativa
tttttacatatttttgcattatttgatctttgtcaaatatttaaaatattaaaaaaaatatcctttatttttctatcaaataaacataatatatatatatatttagaatttttattttacattaataatttttttgaatatatctttattttttcattttttttcacattttttatgtttttagtaatataagagtcattccacaaaagtcccacatagtttagaaactattgtgagtgatataatttcatattaaatagatcaatattcttttagttttatttgttacaatgttaacctaatttattttcaatgtgggtgattgatgaacttattcttacccaattagttataatttttttttcaagtgaatgcaaattatatttttgtatttttcaatctttatcaagtttaaagtaattataaaaaaatccttcaaatattctttcctataaaatgtattttttattattattctttgttttaatgtatttaaataattaaaactatatgttaaatttataggttatgtataatttatttgtttcaaagttaaaattatttatttttacatatttttgcactattcaatctttgtcacagatttattagagtaatacgactctttaaatatatatttttatttgtgtttatgagactactgtgaatgttaaatttatagattttatatattttatttgttcacaaattaatattatttatttttacatatttttgcattatttaatctatgtcaaatatttaaaatattaaaaaaaaatatcctttagttttttttatcaaataaacatattatatatttttagaatttttattttacattattaattttgttgaatttatctttattttttcattttttcacagtttttatgtttttagtaatgtaagagtcatttcacaaaagtcccacatggtttagaaactagtgtgagtgataatttcatattaaatagatcaatattctttgagttttatttgttacaatgttagtcttgttataaaataatataaaataatataaagtagatgaaaagaaagaagaagaagatgaagagagaaagag

SEQ ID NO: 147899 - DNA, 655 bp, Cannabis sativa
ttacaaaatctatcgcaatgtcctcccacttccactcaggaaggaccaaaggttgtaataatcatactggcctttgatgttcagctttgatttgttggcaggttaagcacttggacacataatctaccacatctcttttcattccataccaccaaaagtagggttttagatcctgatatattttggtggttcccgaatgcagtgaagatggtgtggtgtgagcttcatcaaggatttctttcttgagttcaacaacatcaggaacactaactcgagctttatacagtaacatttcattatttgagatataaaagtctttaggtcaaccagctattatctcatctcgaatttcgactagctcgagatcttcttgttgcgcctttctgactctctcaagcaaaccagactggagtgtcaagttgtgcaactttccaactaccaactcaattcccgcactgaccatctttgaagccaatcgaggagctatcataacaatggtgaaaacctgcccgaaaccttttctactcagtgcatcagccacaacattggctttccgggggtgatacgaagtctcacagtcgtaatccttaaccagttccagccaccttctctgcctcatgtttaaatctttctgggtaaaaaagtacttgagact

SEQ ID NO: 147900 - DNA, 1204 bp, Cannabis sativa
  modified_base (1047)..(1051): a, c, t, g, unknown or other
gctaaaagcgaggtcaacatttttgtgctttcattgagagaagaatcaagaatcgctcttcattcaaaatctaaccacaagtacgattgtggtggagactcgtgggggtcaggttgatccagccaattcacagacgctggatcctgcattgtagaaatcatgaaacacaagggttccgccggctgttaatcctgaacagccggcaaccgtgggtcacggtgtaacaactactatagatgaaattgcgtctggtgtgcaagagacttgggaaaaatagttccgcacccaaccagggcattcataacacagtcgttccacccagtactaatactaaaacaaccattggagatgctactgagttacaaaatctccgtgacattcttggactcatgcaggatcataacaataccctacatcatgatcaggaagatctccgcgctgcggtaaatctcgcattcgaagaacaaaggcgtatgcttaccgagtggagagacagagagatggaggcgttaagagctcatcatacaaagattgaaaatcttagttggcaagctaccatgctaatacgaaaagcttaccaaactgtaggtcagcaacctccgaatgtcatccccctgtgtgagacagatgaagatccagcgatgaatacttcccagactacaatttgtaagccgcccaatccccggtcacgagttccacttgtgggccaagcggtaggcaggcagaacttgtctagtaagtcatcgggagagatcatacctgattgttcaaaccagattaacggtgccattccacctgtcaaccaaacaaatcaatcgctaaggcagccaggcgcttctgtattcgaaaggttggggacaactcattacctaaggaatgatctgaatagaaggagaggagtagacgatcagaatgtcatgaagatcgtgcagcctggagcccgtgctaaaattcccactcaaaaagatgcagacgtgattcaaattgattagaatgccgagcaagttagcgcagccgtacaggcacagctagacgaactgaaaaatnnnnnccaaggcatggctggacaaagaaacaatgatctcgagcgggaccgagcatgtggaactcctttctctcccgagatcaatctcctggcgttgccccacaagtttaaaatgccaacatggaaaatgtacagaggaagagaagatcctctttccca

SEQ ID NO: 147901 - DNA, 576 bp, Cannabis sativa
ctcttcaactgtgtagtctcatatttacacagtctcagaatcatcccacttgaccttctccaagcggtgtggaattgcacagcttacccgatatttacccttacggatcacggtactactgattgtcacatattgataataatttgtgatgcaaaaatcatatcagttaaatgtaattttgaaaaataattaaaaatttaagaaacatgtaaaaaaaagtgagaatggatataagtctaagtttaaggaaaaacacaaaatttaattagtagggatctaaaaatttatatatatatatatagttattattatttttttacatgaaatatcaactcattaaatttagcattcccaatacaaaagatgttgaagctctcaagaattacgaccagagaaatatcaaaattatctaattacaaattataaattactcaatttatttattgtctaataaaatgcaaaataatattacttaaaaaaaaataacatattaaaatgcaaacttatattatataaaaaaattatactatgtatctttatatattaaaagtgcctatctaacggcaattcttggtt

SEQ ID NO: 147902 - DNA, 571 bp, Cannabis sativa
attctctttcacttggtgaacacacctgtgcacagtttgcattttaccattccataaacaatcatttcggttgctctagatttgattaatcaaagcagccactgctgctgcataaatattccttctaaacttggatgtcttaacccgagaagtccacctgatcatggctgctagaggacgatctgctatttgccaattcaaccatgttttgatctcttgcaaacacctgttattgaaatagcattcaaaaaataaatgatttattgttacaagctcaatgccgcataaaaggcaactgccttcttgacagacattaaattttagcaatcggctcctggtttggagcctcttttgaacagccagccacattataaagctatgtttaggcatgttatatcgattccagacttctctatgccatgaaactctgttttgatcaacatttagcatcttgtaaacttggtggatactataacttcttctcatgattggctgcaagtgagaaagatttttatgtttttctttaagctttactacttgtctccaataccagctgccatcattggtttga

SEQ ID NO: 147903 - DNA, 585 bp, Cannabis sativa
tttgtgcaagaatccagtttatcaagagaagacaaaacacattgacattcggttgttttgaataagggagaagatagaagaagaagtaatcgagttgaagaaagtgaagtcagaaatggaggcccttggattccaagaggcaaggggtactaaaacaggaagttgacaagttgttagccaacaaatttatacacgaggtgttttacccctcgtggatagccaatcatgttctcgtcccgaagcccaacagaatttggagaacttgtattgacttctccgatctgaataaggcatgcccaaaagactgttttccacttcccatgatcgaccaattagtggatgcaactgctgggcacgagcttatgtcatgtatggacgcatattctggatataaccagataaaaatgtatgtcccaaatcaagaacatacaagcttcgtaaccaacatgggactctattattataaagtcatgtcgttcggactgaagaacgctggaacaacgtatcagcgattggtaaacaaaatgttcgcaaaccaaatagggcgaaacatggaggtttacatcgatgatatgttggtaaaat

SEQ ID NO: 147904 - DNA, 500 bp, Cannabis sativa
ctgccaaaaaaaaaaaaaacagtataaatgttgaaattgccgtgcaacagtaaaaaagttataaattgggaaaaaacagtatagggtgtaaatttccctagggttattctaagtgggctgagctctttcttccctatactataaggccattttctcactaatgacaaaacataaaatttgacattcatttggcataaaatggattttctgtatacaattattttgtatttaattataatatctattttttttaaacagaattataataactattttacttttctatttttttatttgctacagtgatgaaaaaggaaaagtaattttattgtgggtacagtttccaattttcataataaattaattttaaaatttgtggaactatttaaatatcgggaattttttcatttttacattttaaaacatttttttttttggcatttctacggaattctacatagaaaccctattacaactagtgttgtaacctaaatcgcaac

SEQ ID NO: 147905 - DNA, 508 bp, Cannabis sativa
ttactaactgtcaaatctgacagtaaaatccaaacatcaagatatcaaacctcaacaattccaccttgtttgatcacttgaatacctctgtaaagttttccaatgtgaagactgctttctaattccaatataggttgtctccattaggagacatggctttagttgattctgagtaagtttagacaatgtctaaacttgtcatccgtagtactctttgtgaagatgtctgcagggttgtcatttgtaccaattttcttgacttgaacttgctttgaactgattatatctcgagtgaaatgtagttttatatcaatgttctttgacctctcatgaaatatgggatttttcatgaggtgcaaggcactttgattatcacagaaaacagtgatgtcttcagactctatttccatttcagatgacattcccttgagccaaatagcttccttgatggcttctgtagcagccatatattcaccttcagtgcatgacagagcaaccactttttgca

SEQ ID NO: 147906 - DNA, 621 bp, Cannabis sativa
ataaggatcatgatgactaaagtggccaagtatgacctagaaatgaatcaaatggatgtgaaaacagctttcttacatgggaaacttgaagagaaaatctacatggaagaaccagatggatataaaatcaataaaccaaaccaggtatgcctattacggaaatccctttatggactcaagcaagctccaagacaatagaacttgagatttcatgaatttatgatgagcattgggtacaacagaagcaactatgatccatgtgtgtactacaatagtgaaccaatctggttactgttgtatgttgatgacattctgataattggtgagaagagacaggctattgacaagttaaagcaaaatctaatgctgaattcgaaatgaaggatcttggtgaagctaagaggatacttgggattgacatcaaaagagttagacctgaaagactatcattatctcagaaggcttacattcagaaactaattgacaaattctgtatgaatgaagccaaatcagttagcactcctttagctcagcatttcaagctaacacagaatcagtcaccaaaaaacagaggaagaaaagatatacatggattctatgccctatgcctcttgtgttgga

SEQ ID NO: 147907 - DNA, 510 bp, Cannabis sativa
ttaaataactataatgtacattaccataagaaaaaaattgactaaaaattatttacgatactaaaacacatagagatgcatcggtacattatagaagtttccaataatatatatgtctataaatgaataaaaaattaagaaattcagaaaaataaaaaaataaaaaagaaggacactcaaacaaaaaaaaaagcagaacaaaaaaaaaagtttttagattttagtgaaaactttatatttacaaaaaggaaaaataaaatggaattaatgaagctatttgttggatgtaggtggtgcacgcgcgcttgggtgaattgattttgttgacccattgataattggtcggcattcataatggggaggacggtactttgtgtagcaatgtcacattaacgttataattgtaattaatttacctaaaatgtatattaatgaaaaaaatttctaatttaaaccattgttattcattgaataaacctaatacctattgggctaaataaaatctatcaa

SEQ ID NO: 147908 - DNA, 511 bp, Cannabis sativa
ttcgtaactcaaaatatgagatgaatatgacacatactttcaaagcattgaaacataaaatttgtgagagagtataaaagagttaaaaaaaaaaacgagatataaaaatatacattttgagaaaaaaaaaagagagagagaatggaaaaaaaaataaaaaagaaaaataaatagagaatagaaagaatgaaagaataataaaaaaataccagcaaactcacttaaaaaaaaagccagtcaatgactaaaaaaatataaagaagagaaaaaaaaacttttttaaagctttaataagtaaaaatagtaaaaaagaaaaaaattagataagaaaattataaatataaaaattttcttgtgaaagtataaatgtaaagttttttagaaaagccaatatttggtataaatattttttttttctaattagaaataaaattaagcataaaaattcaatttttttaattaatactatccattcataattcatgagtaataggggtgtacgtcggtcggt

SEQ ID NO: 147909 - DNA, 677 bp, Cannabis sativa
tttttgctgccgtacgagaggaatttttatcctcctgattatttcaaagaagatcttgagcgtagtatgagcgactcttagaggattggggcttggagtattgaacaaattcgagcaggggagatccttccgttgaaggattactttaaagactattgtaattatattagaattgctccattccaactggtcccaaatgggtatacaatgttagcttgtttgaggtctttttatctacgacagtcagagtcccatgatctacaagggaaaagactgggagctgtacaatcccacatcgcctgggtaaggttaagtgtgctaattctgagattgtataggtatgggactacacagttgaagaggacttaaatagattgattggtactacttatatcaacaagatgtatcttttttttgttagcccataatgaaagaactccaacctaaatgtgcttgacctggggtaacattttaggttgggtgacctcctaggaagttttcctaggaagcgagcgagtgaggacaaagcacgttggcaaaactcgtgttggtctgtagggccagtcatcattccatgaagcagccaagagtgacatactcatggataagagtcattagtctgtgggagaaggcccaatggaggcttgaagtagggacattactgttgggttttgtgc

SEQ ID NO: 147910 - DNA, 662 bp, Cannabis sativa
gtcattttgaagaggtaaaaagcgtactcataagcttgtttttcctaatttaatcttcaagattctttcctctcagaaggatgtggcatattctcatggagacacttgagcctcccttcactggtaccattttccaactctcggagtattttgatggagtttttcccaagtgacctaaagttggtgttgctgctgctgttggtgcaagctcgagttctgctcctgcagatgtccaggaggtcaagcatgaggttcaactggtgaacaatcatcttgctgccatggagaaggttcagtaagagatgtccaagcagctgtcctccttgatcaagctctatggggcataagttctctttcatttttatgtttcttgttggacatacttttatatttttcatgttttttatctttggcccttagataaacaaaaagggggagttatagtttgttttaacttcgtacttgtgtttcattttggattaaaagttagcttattattgtcatttcaattttcgattgtgtttctcaaggggagtttgtgtttgttcttgctaacttcgatttgcaagtacttctttgttaaaaaaaaatattttgattatctaaagtgccaaagggggagattgtaaagtccttttttggcaatttagatgccaaaatat

SEQ ID NO: 147911 - DNA, 801 bp, Cannabis sativa
gttgtttttgtggtttttttacaattaaagaatattaagtcgaacaggtaacaactattaatagaaagaacaatatatatagagtatccttaaaattaaagaacaatgtcaattgtcgacatcataatgtttaattcaggtaacacatcagccgcgaacacctctagatttgtttttgaaacgaaaaattccagcctcgctacgagtatccttaacaatacttggtgtgggactaggatcgatacatacattcttcttcacctaagtcacaaacaaggaagtaaattcatctggcttcttcacaagcatagaaaaaaaataaccttacacgcttattatttccaataacttcggggctatactttaagcctttcatgtacttattcacttctaattttaagtcatacggtactttatcaacatcgagttcttcgtacaaaagatcaactaaacatgagcatgttacattcatatcaatttcgaatgtcaaattttggctcagttataaacctaatctctacccttaagctcccaaacaccattatgcataacgaatgaaaaaaaaaatagttgaacctgttacagacatttaaaaaaacacaattaaaaatttagaacaaaactctaacaaaaaagtgaaaaaaaaagtcctcaaaaagtcataaatctgtcaagcatcaaaccccatcaagcccactatcgggcccatcatccctgaccttaggtccacgaagaccatcggactagcatcaagctgatatcgggcccatcgggcctacccttaggtccaagttgaccatc

SEQ ID NO: 147912 - DNA, 560 bp, Cannabis sativa
gatgtggcatgcttatgaaaaaacttagtattcctgtctccagcattaagccatctaactctagccctctgtttccaataaatctcctctttatagagtagagcatcaagcaaagattgtaatctacccaaacgagccctatcctcatcatttaaaaacaacttatcctgaatcatatcaatttcatgagtaaggtactggattctggttttaaagaggaggttattgtccctattccaattttttagagaagaaatacaatctccttgcttcttaagaaaactcctataacaacctacaagaggaatattatgtccttgcaccgaactaggaaccagagtacaattccaaacatttttaaccacatcataaaaggagggatcctctagccaagtattctcaaaccgaaaacgcctagtcctatgggaagtataattaatactagtgggagctaaacttagtttaagaacacggtgatcagatccataataacctagatgctgaagactatggttaggataaaaatcactccaagattctgacactacaacccaatctaa

SEQ ID NO: 147913 - DNA, 572 bp, Cannabis sativa
gaagcttggaagtcagttgcctcagccttatcagcccaacatgaaggccgattcagtttcagcatagtcgaatcttcatcgtcttccttcaagacgttttccagttcatcgcatgggtccaggagtatatctgcagcttgttcctcttggtgcgcaggccgctcaatcacactctagttggcttcagtatcatcttctgcatccacactcaccgctcgaatggcactggcaggctttcgtatcgtccgtctcttcttcgccatggaagagcagaggagaaaatgcacgccccattgtaatgacatttctattattaaataaagagttaaacatttgatatatgtatgatgttatgttattaatattattattgaataatatatattaaatatctaaaaactccttattcatatatgaggttgtggcttgtagttgtacagagaactaagaccacttagctatgaataaaataaccaaaaacatattatagttatggacaaattaatcaatggttgttacgattcactgatcccgttcttcggtgcaagtaatctcggcttggattacggatg

SEQ ID NO: 147914 - DNA, 575 bp, Cannabis sativa
atctaaaaataacaaatatatagttataaatttttttaaatatttttatgattttaagattttatttatagaaaatacgaaattagtactcttcttattggattgttgttttgttatttgtatattatttttatattgttattttattatttttatgtggttttcttattattttcaaattatttttataagacactgtgaaaatataaaaaaaaatatttaaacatgaaagtgtaaaaattttgttaaaaataatatcttttgtaaatttatctttacaattaaatatcaacttccatatattaataatataaaaaagagaattacaaaaatatctaaaattttaaccgattaccttaaattatttttctcatatgctttaactttttattttattttatttttcatagaataacttttttaaaaagaagaaaaattcatatttttggacacattctataaaaatttatatgagtaatttttaatttttttaaaaaataaattaaagtaagagtttttttttttttttaaactaataaaataaggaattattacataaaaataacaaaaaatta

SEQ ID NO: 147915 - DNA, 835 bp, Cannabis sativa
gtagcaaactgatgagtcaacagactcagtaagatatgcaaaacatatatttatgagcaatgctaaaccggcttaatgcttaagccgccctgagctcgacagcgagctcaccgaatgattaagaacgttcttaagggaagtactactgtaccaaatgcactaaagtaccaaccctatactcgtgttggtagagtcatatttgtactcccgggaattactaagtgttgtaccacatgcacgacataccccctggtactcgtattggtaacaccgtaactccactgatatacaacactatactaacactctttaaatcacattcatattaatgctagtagtgcaaacatccaaaataagcatacattcatatatacattcttatgctattttacctcgttccgtgctcaagtgtgtcggtcagcctgagtgaaaacgcagcttgacgctttacagggccctaaaccataatgttcaaaattcgatgagagacacgctaaaaaacttatcggggatttaaaatcaaaactaaggataaccctatcgataaataggatgctaacacctcaaataacacaaaaacagggaaaactagggttcgagaaaaagccccaaccggcagaccggttcccaaccggaaccccgaatcctgggtaccaaccggtcgaccggttgctcgaggtctcctagaaccggtcgaccggttctaagctggaaacctcaaaactgatccccacaaatcaattcaagtccaaaccttctaaaaacttccagaacacctgattatactccaaacaactcattttaggcaacaaaccacaacaaacaactcaattta

SEQ ID NO: 147916 - DNA, 542 bp, Cannabis sativa
agtacgagtctgggtttgggtctgagtctgggtccaagtttcagtccgtgtctgggtccgggtcttggtctgggttcgggtctgggtccgtgttcttgtataggtctttgttctgcacctggtcccgggtaaggggtcctgggttacgggatctgggtcgcaggtcctggcgcaagtctggtcttgggttcgagtcattattcggttctgcgcctagatatggttttgggcccatgtccaattcctgttccacggaccttattccatttcttattctgatttcgggtctgggatccgagtttgggtttgggtcctagtctagaaaggtttccaggttcgggtcttcgtacgattccaatatctagacccccactaggggttgggtccaagccccatgtcgtgggttcgtgtcccgaatcctgattcaagttgtaattcgagtcagcatctcgtccgcctctagttgtgggtcctagtcatattctagttcctagactcaaacccagtcttggactcggacccaagtctggggtacgggtgtg

SEQ ID NO: 147917 - DNA, 1133 bp, Cannabis sativa
ctggtgcactgggttctgcttatttgattctaatttcgattcgaccgtttgtctagtttttcacaataactaaaatccatgaattcagataagtcatattagagaagtcatattcacaactacgcatttctcatttccaacatgggaaactcactcaggaatgaagagtttcgagtctctcatttccgtaaaattagaacatctccgagaactattgaccaactttgctagaacacagaaatagagtaagtgatgtcaaaatatcacttaagcatcataaagtacatccccttaattcttttccacttacccaacatacaggttgacgtcatatttcaaccagggcactgggatgtcaacctgggacgttgagttatgaactgtctttagtaaaataaccataactcactcaatattgaatattgatctaatttatgcgattcaaattgcatttcaaaactaattcaatgctctaccaagtcatgtctcacacttcaatcacaattttgatgttatcaaccttaaatttcattcccaagggagttacaaaaataagctccgagttacccgcatacccgcagcgagtcctgctagacttcaaaaattgactattagctttaaaagttaatttttattgttagatcatcatctatggtcaaaattagccaatttaatttttttttttttttcatattttgaattaatttttcctatttttgtgggcctccttcaactataaaaagagagttctcttagtttatttttcacattcagaaaactacccacgagattagagtttctctctctaatttctatctctataaattggagctttgacacttagccttttcatgcaataccatctcgtgaaaaataaaaactcgaagtagacgtagtttaattactatcgcgatacaagaagtgaactactataaatttggtgtgtctctcttataaatacttaacatatatttcattctcgccaatctagcgagcatgtgtgacttagaaatcttagtctagattttcgagtcaacaattgtaatacccgaaattaagaaatgaattgcaaaatcctaactagataattatgtataacggaggaattatattattatatggttcaatatatg

SEQ ID NO: 147918 - DNA, 504 bp, Cannabis sativa
tacctagagcttggattcacaaaatatctgcttactatgcttgaaatgctgaagaacaattgaatccctagctagtttctagggttcacgagagagagtgaactttgaaagagagagagagagcttctttctttcaattgtttttttttttcttattttggaaaatgaaataaaacttagcttttctaaaaataatttgagctaactaataaaaatcagatcattaacaataaatttaattcactaaagacaaaaagactagtggccaaaatgaccattttacccttttccaacaaaaacaacataaaagggcacttaggggaaatttgggaaactctaaaatctcgactatttccgacattcccaatgtctaaactattgccccgttaaactaaaaatgcaaagatgtgattctaatagccattcaccgcgttccaatgttgccgagcacaaaaatatgcaaaattacgaaatttctacatgtgacataaaattgcattctga

SEQ ID NO: 147919 - DNA, 645 bp, Cannabis sativa
  modified_base (151)..(153): a, c, t, g, unknown or other
  modified_base (281)..(283): a, c, t, g, unknown or other
aagtcagatctggggttggattcgagttcgggtcagaagccgggttcagcgccaaggtcgtgaggaaggaatttgggtctaagtctggttgtaatccaaaagattgattaagaaaaaaaactttttaaaaaaattttgaaagtgatttttnnnttttttttaaaaaaaaattttgatttctaattataaaattgaaaagtaaaaataattttatagaatatgtttttcaaaaatactttcacttttctacttttaaaaacaaaaaattaattaaaaaagtnnnaccaaacgccacctaaattaatttaatagtattaaaagttgtttagaaaagacaatgttaataaaagctataatttttcaaaaaaatttaaaaaaaatactataaaagaaaattattaaaatatataagtaaatctaaataattaatacaatataggtaacagataataaaggtaattaaaaaattaccaaaaaatgctgaaaacaaatttgctaccaaagaataggtgcatttggaaagccacaatgtaattggatttgtgtgtaattggaggtaattatacaattgggcatctttgtctgaccatgtaattacactgtaaccgtgtaattggaagtaattgaggggttccaattacactc

SEQ ID NO: 147920 - DNA, 537 bp, Cannabis sativa
  modified_base (364)..(370): a, c, t, g, unknown or other
ctgggcgtaagtacgggcgtcagtgatatatgatgagtaacgagcataggtacgagctcacctggttaggggatgaaattttcctagcgacgcatcgggcgtaggtacgggcatcagtgacatatgatcagtaccaggcataggtacgagctcgtataattaaacgatgcgatatattggtgccaaattgttgcataggctacctaattaggtgatgcaattatgtgatatatgggtgcaggtttttggtacaggctcatctgattaggtgatgcagttatgcgatatatgggtatcaggctatgacacaggcttgcctaattaggcaatgcaatacatgattatcagattaaagcatcgactnnnnnnnttaggcaacatgatgttatgaagaggattactttatgaggtaacatatatatatatatattatttactaggtggcaactacgtgcgaggcacgtgttattttattttttgtaatttttttatctaaaatatttaatttaataatataaatattatttataaatttta

SEQ ID NO: 147921 - DNA, 998 bp, Cannabis sativa
  modified_base (295)..(297): a, c, t, g, unknown or other
ctaacatcaaggaagggcttgacattcaatttgaaatgaaagatttgggtgaagctgcttatgttcttagtattcaaaacatcagaaattggaagaacagatcccttagtctctctcaaacaacttacattgataaggtgctagagagattctcaatgacaaataacaaaggggcagtgacgccttctagacctagtatttatctatctaagaaacagtgccctactgatcctcaagagatagaggacatgagaagagttccttatgcttcagcagttggaagtctaatgtatgnnntgttatgcactagacctgacatttactatgcagtaggaattgtgagcaggtatagacaaacccaggagaggaacattggaccgtaagcatattctgaaatatttgaaaagtactaggcattatgtgttagtctataatggtggtgctttaaatctcgtaggcaataccaactcagatttccaggcttgtcttgatgacaggaagtctacatctggaatggtatttactcttgggggtggagcagttgtttggagaggtgctaagcaaactgcaacatcagactctaccatggataccgaatacataactgcctctgaggctgctaaggaactagtatagctaagaaagttcttctctggacttggtgttgtttttggaatgaaaaaactactagttttactttgtgataatgttggtgcaatatctaacagtaaagagccttgaagccacaagagaaacaaatacatagagaggaaataccacatcataagggaatatatggcaagaggggacgtactggtaaagaaagtggatactgaagataacttagctgatccattcaccaaagttttagttgtaactacatttgaaaaccacagactaaatttatgattaattgaattgtactgattgttttatgttagtgtaagtgaaagtttattgggctttgtgccctaaataaaactctattttaatgtaat

SEQ ID NO: 147922 - DNA, 925 bp, Cannabis sativa
  modified_base (872)..(880): a, c, t, g, unknown or other
ttttctttttcctttttctttttctttctctttcttctcgacagaaccccctcccctaacccttcttcttcttcttctgccactcttcttcttcttcttcctatcgacataaccccctacataacaaagtcaatcgtccccttcgcgtactcgacgacagcgacacagagggaggatcaacgacccaaacaaagatctataggtcaaatgtcaaaatcggtgagaataactgatttggtaatgctctaaatttttggtcacatgaaactaataatctgaagcaattaagttttgaaaagagagagaatctggctgtttggaggctgataccgctggtagctccagtgacaataacattgagattaagcaagtggtttggaataataagtggagaagaacgagctctatatgttaagaccctctgcaaaaggatttccttcaaggcctcccatatgccctttaaccatgctcttctctgcaactcaatcctctctctctttcactctctcactctctcctgaattataaataaaatttgttgttggattaaactctttcctaaattggtgatggaggcgggaatgaatggttttgtgttcacttgtctgttggattactcttgtttaatggaaagccacaaaatgatgaccggtgccggaggctgtcgttgaaaccgacttatcgattgctttggtgagatttgatgtcgtttgatttgaaggagatgactatggaatcatctttgctgccttcctccgtcgactgcctctgcctgacggagacggccgtgagggcgaggacgatgaaggtgaagagcacgaagaaaatgtaggggggttctgtcgaagaaagagaaagaaaaaaaaaaagannnnnnnnnaagaaaaagaaaaaggaaaaaaagtatttataattattttttaaa

SEQ ID NO: 147923 - DNA, 566 bp, Cannabis sativa
tatcgtgtctccgcccctatcatgcgcttgctgacatagtacacggggtgttgagttttttcctcttcctggactagggctacgctgaccacattctcgaaaacggctaagtatataaacaagtcctctccaagaacgggttttgataggattggaggtttagccatgtgttcttttaatcttttgaatgcttcctcgcattcttcggtccattcaaatttttggcatttcttcagaatgttaaagaaggggatgcacttgtttgttgatcgggaaataaaacggctcagggtggcaacctttccggttaggctttgtacgtctttgtgcttcttgggagaaggcgtgttcaggagggcttgaattttttacgggtttgcctctatcccccgctggctgacattaaatcccagaaactttcctgatttaactccgaaagtgtacttcttttggttaagtttcattccatatcttcgaaccacttcaaagcattcctcgaggttgtcagcatggcttgcacatgcctttgatttgaccaacatgtcgtccacgtacacctccatatt

SEQ ID NO: 147924 - DNA, 866 bp, Cannabis sativa
aggggcaaactggtctttttgcccatgtgtgttttgtcctttagtggactttatattaataaaacaatctgatttttagttatttaatggctgagatttatattaataaaacaaggtttatttcatttatttaaaaataagtaaatttggaaataactctctctctctatctcgaaaatccctagagcatctagggtttgatattttctgcatcatttcaagtaaaattcagctaggtcttgtgatttaaagctgtaggtaagcttccatcacctctctttttggtttcatgaagtttgagaaaatggattatgcatgtttttgtagtttttgttgttgtagctgctgttagtgtttgtattgatttgagaagttaaattatgtttagaattttttgatttgagcatgttttgataggtagtttgtagtttgagcaagctttgagttttagaactcaagcttggctttaatggtgaaatttgattctgagcttgggtactagttttattgcttggtttatatctattggggtatattatgcaggtctggaaggtttggtaagatttggagtcgatttggttagggtttgaaattgtttggattttctggggaaaatcggctaaccggtttttgcagcagggttctcgaaaaatttaagttgtcgattcgcatcagttttaggtttctggttggttaattccctgctagtttatggtattgccatattaagttgctgtagataggtttttggtttaaaacctatgttcgggttgtgatttagcgtgtcacttatccatgttgttatcgatgtgatttaggagcctataattcaccgagcagttgttccactcaggttgaccgggaca

SEQ ID NO: 147925 - DNA, 850 bp, Cannabis sativa
aagatggggaatccccaccccattaggagcgggtccccgcggttacccatccccgcggtataaatttccatctctaactatgggtattgttggatttaaggatttttggatttttgttaaatttcattcaattttactatttcagtgatcgtttatgtactaaattatactctcaaaaatttcatatttaccaaatcatgccccttaaattttaatatacaccaaatcatgccccctaaactttgattcatgttagacttttcttactaaaattagacaaaagttcttaaatccaacaatcttaataattcatgagaaatttttaatagtcttaaaagttaaagagcatgatttaatacatgttaaaatttagagggtaaaaatcataattagctatttttttattatgatgttgagatctttagtggtattttacatcaattaatgaggggtctaaatttcacatcacccttattttggcactagaaaaataactagaatatatgcactggcggacccaataaaagaccagtgtgggcttaagcccatggtgaaaaaaatatttcttttacatcttaatttaaaaaaatcttttaattattttaattgcccacaacaaatgcgcaacagaataggagatcaattattgaatgatagtttgacagtatatctcaaaaagaatgtattcaatgttattgacaacaagattattatttatcattttcaaaaaatgaaaactcgtcgagcacaactctaaagatatgagctcaaaaattgatatatttgctaaaattttaggatattgagtatgttatatattttgaatatcgttttagattgcttttttttt

SEQ ID NO: 147926 - DNA, 810 bp, Cannabis sativa
gacccagacccagaccaagactcggacccaaactcagactgaaaactggacccagacccagacccagaccaagaccaagagctggactcgtaccagaattaggactcgaacccaagactcagaccccgactgagatcaggactgggacccagagaaagactaggaccgagccctaaacctcgattgggactagaacctggattgggaccgggacccgagatcgagacccgagacccaagacacaaacctgggaccaaagaaccgaaccgtgacgtagatgggggactttggccccaaacccgaacctggaccaagacctggacaaaggatccaaacctagatgggggacttggacccaacactgggccttagaactggggtttaagacccaaaatttgaccctagactcgagacactggacccgaccttacacttggaacccaggacctcactaccaggacacaaccccaaactcagacccaaactaaaacttaggactcggcccgggacccgagacccaaactagaacaagactgagatccaagaccgagatctgaatctgaatttgagacttcaacatgatccataatcagtttttgaatccaagacccggacccatacccgaaccgggatccagacccaatcttggacccagaatcggaatcgaaccaggactgggacgagaacccagacctgggactgtaacagcatccaaactcaacctgaacccataccgagacttggacccagactgggacccggacctagacccagacccaagaactagggttggacctaggaacaaagaac

SEQ ID NO: 147927 - DNA, 541 bp, Cannabis sativa
aaacattgggtacttataccactaaaaaaaattattgggtttatgccgctgacaaactcaaaactttgggtacttatgccgtcatttaccctattagtaatattaaaagagagattatactcttcaaaaatacgatcaatatataaacaagatgctctagacataagatgagtaacctgattagcagaccgtttgataaaacgtaaagaaacatccctaaaagaagataaaagttgtttataatattcaatgataccaccaaaagtggatgacaaaacattcaaatttctaacatcttgtactaataccagacaatcagattcaataatactaacacccggaaaatcacgcttcaactatgataatacttccttgagagtcaaggctttagttatatctggaataacttgcccaatctgcagtcccgtaatcccagccacgacccgacccttgtgatcccgaacaacactaccaaaactatgccttccctcctcgttaaacaatgcagcatcaatattcaccttgaattttttataacctg

SEQ ID NO: 147928 - DNA, 817 bp, Cannabis sativa
  modified_base (711)..(724): a, c, t, g, unknown or other
  modified_base (774)..(787): a, c, t, g, unknown or other
gggcataaaacccaacatgggcaccacctacactcggttccaacatatccctatatatcaccgcccacccttcacacttgctcttagggatagagctcaaaggcttgctgagctgtcgggtgctacctggaatatcactttgttgactctgaggacaactttgtggagtagggctctacccaaaggatttcatccctcagcctctaaaggagaaaaagaggaaatccggtgctagccgggctgagggagctcattaggaggatgaaatcattcaactcaagcgtgaggctaagttgaagggaggagtcctaaaggagtttacgagggttagtctgtcctaatagtttcctctaatccttctttacttgactcagattctaacgttttttctttttgcagactggtctgaagatgacttacacttattctcgagctaagtctgctgcttccaagaatactgccatatccaacaccatgagggcagaagtagacttggccgggaaggatgctgatgaagctagggttcaacttggagccgtatgaatggagctaggtgaagtcaacaaaaagcttcttgttgccgagaagaaagtggccaagctgaccaaggatttagaggcatctgaccaacttgaggctgccatgacctccttgtccaaagaagtgaccgacctcaaggaagaaagggaggttctgttggaaatattttannnnnnnnnnnnnntactaccatgtatgttttattaacaacctaatatgaattctaaaataatnnnnnnnnnnnnnntaaagtttagtaaaccttacattaggtgca

SEQ ID NO: 147929 - DNA, 963 bp, Cannabis sativa
  modified_base (39)..(53): a, c, t, g, unknown or other
aacaacaaaaatacggttttacggaattttaaatatttnnnnnnnnnnnnnnnttttatttacataaaatacggtccagttgaaattttgttcatttgtgtatgttattttttgttatttttttgttgttattttgatgttacttttatattgttttttttgttgattttatgttattttcgtgttattttttaaaaaaccgtaaaaattttaaaaaaatattatttgaacgtaaaaatgtaaatattttacaaaaaataataccttacgtaaaagatcaaatatgtacttgttgcatcatttggaaagacatttaagcccatctgtttgaccaataccagctactatactcgtaggaggagcctaaattctagggagatttttaattatatacacaaatttgttaataatcacaaaaatgaccacgtaggcagcttatgccgaatgtaagctatttaatttcaatttttttgattctctttcttacgtaagccatttttaattattttttttttctaaaaaaacaaaaagaaatctatcattttgtctctacttttagtcaattttttgagaaattattttatctataattcttttttatttatttatttatttttaataagaatttttttaattatatacattatatttaaattaattatgaaaataattgaagtaatttaaataaatataaatagctaatgatgttatacaccgaaaacataaataattattttccattttaattttttttaattattttcctctctctttctctctcttctcttgtctattatttcaaaaaaaaaattcctatcaccattttgatcatttcaaaaaaatatattattataatttatttttcaaattaatctttttaatatatatagaaaacatatatttcatttattgtaattaaaaacaaaatataacaaaaataaaaacaacctcttagtttatttt

SEQ ID NO: 147930 - DNA, 689 bp, Cannabis sativa
gaaaggagaagatggagcaattactaaagctcacattggaagaagaaaattctgacaacagtaaagatcaaaaaggaagaggacgtgaccgaggaagcgagcgtggacatggtcaaggacaacgaagagaaggaagggggagctataataacaataatttcaataatggagaacgaagtcgaaattcacaagcaccaagacggcgtggaagaggcaactcattgtcaaggagtgacaaatctcacatcaagtgatacaattgcaacaagtacggtattatgcctccgaatgtagatcaaggagagtcgaagaaagagtcaattttgtcaaagacaaaggtggagaagaatgaactttgttgcttgcctgcaaagacaaagatgaagctcaagaaaataaatggtatcttgacaccagcgaagcaatcacatgtgcggagaaagaagaatgtttgtggagctcaatcaaatggtaaaaggtaatgtctcttttagagatgaatcaaaaatacccgtggaaggcaaaggtaagattcttatacgtttgaaaaatggaggccattaattcatctcaaatgtttactttttgcctaacatgaaaaataatattttgagtttgggtcaattactagagaaaggttatgatattcacttaaaagaaaatagccttttcttaagagatgataaaag

SEQ ID NO: 147931 - DNA, 784 bp, Cannabis sativa
  modified_base (729)..(730): a, c, t, g, unknown or other
tcttttatttttaccatctttttttaaacattgtaccaattttgctcacttcaagatactctccatgtgactctcttatgtcagggtattttcggtactatatgtataaaaagaggtattttccaactaaatataaaattagagataaatttgatcaattgattaatgaaagttgtattcttcaacttaccacttctttaatttagtgaaatttgctgtgaaatctctttatattttaatttttagacacttaatttttttttttttttttgtggttttcttatgttttactttttatacacttttaactttttttttgtggcaaaatctctttatgttttaatttttatacacttaaccccctttttttttgtaacaaaacctccttatatttatttttctttacaaatttaacacgccagttaaatattaatgttaaaacatggttttgccacaaaaaaaaaaagaggattaaatgtataaaaattaaaacataagggggttttgccacaaaaaaagaaagataagatgtttaagtgtataaaaattaaaacacaaggaagtttcgccctgaattgctctttaatttaatacttatttgttttcccaaaaaacaaattagggatttttacacttgatgcccttttttaccatttttttacatttttatttattctagattatttaaacttttttaattttttatttttcaattttactttttcaaannttcaataattacaaatatacatttatcatgcatatgtcatgttttatccattct

SEQ ID NO: 147932 - DNA, 1203 bp, Cannabis sativa
tccaaggaaaaggcggaaaaggcaccaaaggcaccggcgcaccggccggccggccggggccggggaggtggggaggttattgaggttattgaccttaggagctaactgttgcaaacccctttactccaaaaattgctaagtccgaagattcttgaggaagaagcttggataggcctgagcaatcaaaaggttgatccgaactggccaagagtggatagtggatccgagcagatgcgggcttgtactccacctttgccagtgcttctagaggccaagaaaggcaaggagatgctcgcccattacatgaactggttggttcctgaagtaagtaaccaactggccggcgctgagaacgaatcttctttggagctgctgatgggaggagtcttgaaggaattcacaagggtaagtctttcttgacggtttcctttaatctttttaacttggctaagattctaaagttttttccctgtgcaggctggtctgaagttggcctacacttactctcaagctaagtctgccgcctccaagaatgttgctttgtccaacaccatgagggcggaggtggacttggcgaggaaggacgctgatgatgccagggtggagctcggagctgttcggatggagctgggtgaggtcaacaagcagctttttattattgagaagaaagtagccgagttcactaaggacctcaaggcttccaaccagcttgaggctaccattggctccctattggcacaaatgaatagccttcagaaggaaaggggagttcttcagactatcttctgtcggctggaagaggagaagaagacgaaggacgaggagcttacagccgagattgagaagtacaagttggaggcggtgaggcaggaagaaaatgtgcatgccttagagacaactggtctcgagattttttatgacttttggaaggctaacccccaggaaaatttctattacctgggcgaagccaaagacatgtatcttgagtactgtgcttctcaagtgcttatggtgagcccgatgcgactgcttcttcctctgaccaaaatgttaatgtacctctcattcaaacaatagatcctccaactccttcaagcccagaagatctgaaccgatagcctgggaatccagctgtttaactactctcttatccttctttttatatatcttattcggccataaggcctttttttaagacatcat

SEQ ID NO: 147933 - DNA, 614 bp, Cannabis sativa
tttggatcacatctttctgctccaagttcaggttcttgcaaatctgcattaaacggttgaaggagcatcgaccgtacacagatgcttcttcactttcagtggcaacctattcctcatccacctcaactttcttccccttaccctaaactgcctttggtttcctcccccttgtttgcactgtcttcttagcgggagtagggctagggtcatagtttctccactcagacttctgctcgtcggtgaaacctttaaattgtacttttaatttatcaataacgtgaaatatgaggcaaacttacatcaactccagagtacatggaaaaaatgttaaagtatgtcaaacaattaagatgaattacagacaattgactaaaaaaaattgagtaacagtcaagatcaaaaatctttttcagttaatcccttctcagctgctcgaagtgctttatagttggtattgctacatatggacataatttcaatcaaatatataataaaatacatgttaaacatcattgacacaagtaaacaactatccataattcaaaacttacaagaaatttctccaagctacggcattatcgttcggctcaggggaaacatccttctttacgggt

SEQ ID NO: 147934 - DNA, 658 bp, Cannabis sativa
  modified_base (562)..(582): a, c, t, g, unknown or other
aaagacttcaagcctcaactagaggcacaaatgatggattctaaggctgaggagcttctggccaatccaaaccaggggaaccccgtgacctgccatggccggccctcacaagtgatcccagagggtatagatctttagagcgatttcaaagatcctcctcaggcatgtgaagaattctagaggaagattggcaatgtttcaggtggatatgggaaggaagttggcatggtttctatcagagaatctagccaactcaagaccttaacccgtggcagaagatctttgcgttagcctctctccaacgttgagaaatttcctgaggctggaaaatagatctcgacttcagaaaatgggatcttctgatgatgagggaaatgaggatgtgcagagatcaaggttctatacgtgtagccggtcttcctcaagctatgtgtagttggtctttctcgagttcatcgactttccctctcatccttagtttaggagaatgacttaatggttttcccctagtggcatttttggaaagacaagttgtaactttgggttttgtgccctaaataannnnnnnnnnnnnnnnnnnnnatttactaattaataaagatcagagatcattttatgttgcatggttcacataatttacttcatgattatatttaat

SEQ ID NO: 147935 - DNA, 812 bp, Cannabis sativa
aattgttgttgtctacaagtgaaccaaagacctctatttatagtatttgaggatcacatttgaaaatcaaatcttttcatcacatggctgttactaatactttaattggtgtttaatgagataaaaacgttggacaagagagctagaaatatgcttaattaatttatgtacgtttatgaacgttttcaaaaacttagttccaggtattcgaaaaacaaccataaaataacataataacaatcattaaacaactgtttccagaaaacttagaattttgtttttgtaactcctctccgagttaaatccttccccaacgtctcactacccatttaaatgatatcattgagtattgtaacagtttctaaaagctagaaacttatctcattaattccataacttccatttgtaataactcaattaattacatatttatcaattgtgatccttaggttacaatctattttaagatttgtaactcatcatatgttacaacttttatgtgtattattacactatatatgatataatacaacctccaacacataatatatatattaatctcatattaatatataatatgccacattttaatctttattatatatttgctaaataacaaatatataacatttccccactagattaaaatttgtgacatctcattgtaacactttatttaatcaatcaaaatatctcatgtatcccgcgccctccctccactttgattgaataaatcaacaccatccatagagactttgctcaagtgcataaagtaaagtgtctttcaacttgaactttactatagtgtaatc

SEQ ID NO: 147936 - DNA, 505 bp, Cannabis sativa
tcatggaactcaggaaagataagcatgcacccacctgaccaagaacatagaagctttcgaacggacgtatgcttgtattgctacaaagtgatgttgtttggcttgaaaaatgctggagccacctatcagaggttgatcaaccgaatatttaaagagcaaataggcagaaacatggaggtctacgtcgatgacatgctggtcatgtctaagaaagcccaagggcacattgaagacttaaaagaatgctttgagatcctaagacaataccgaatgaagctcaatcttcttaagtgttctttcggggtaagctcgggaaagttccttggattcatagtgaactctaggggcatcgaggctaacccaaaaatgataaaggccctgatcgacatgaagtccccaacaaaagttaaagacatccaaagcttaacaggctgaaacgctgccttgagtagattcgtctccaagtcaattgacaaatgtgtccctttcttcaacatcctaaggg

SEQ ID NO: 147937 - DNA, 1464 bp, Cannabis sativa
cttggtcatactgcttctttccattctccttctcggtctccaagtcgtgagacatctcctcaatcttcgccttagagttcttggcttcaagttcggcttgtttacggaattccttgagttctttgtccttgttagtcgcttcctgcttcagcttcttgacgttctcctgaagctggacattttgcttcattaaaagctcgacttccttggaaccggcaacgaagcccttcgagaacatagtcataaactacgaagccaactctgcagagcgaggcataagttcctcagagggagtcctctcaacctttgacatgaactcctcgcccatgaacttctcctaaagaactagaaaattgcgagctcgaacaactggatcgatcacgactttcttccccttatcttgcgagggcctcgccggcttcttggacgtatcagtagctgggataatcacgatgtcacttttccttttttgaggaacgacgggagaagtcatcgctgttccgatcttcgacttgcgattgagaacgggagcttgcttcaagaaagtcatttctgggaagacaagaaaagataagttaaaatataaacaatggctcatatatataccgcatatatgcgctgtgttacctgatgttggtcaagaggtctgtttagaaagacgtttatctatcttctccttttgcttctcagatggctccttgtatactggctcccgatgaaggctggcgttctctggaattaacttgtgttcccgcagcttcaaggtcgtgcacagcaatcgccggtcacgatcttgaacagggagacaaccgagaacctcagcgacttccttgctagccgagtctaatacgggtcgagccggtctatctgcgaacaataaggaagagcgtgttagatcaaaccacagggtaacgtgaaaattaactaagtgttagagtgtgcgacgtactaggtcgacgaataaaatcggtcctaattcctggtactttaaaaacgtaaaaccacttagatttccaatcccccatattgaaaaccatgccttccactccgttgatttcagaaccgttgatttcagaagtagcccatttactaaagcaatagaagccgttgtgaaggcccacgctctttatgtcataaaagtagttaaagtcctcctctatcgatggctcctgatgatgtgcgtactccatgtacatcgcataaaacccgagggctatgcgataactgtttagggttaattgaaagggcgatacatcgtatcgcttaagaatagcagcaatgaatgggtgaaaaggaagcgataccccacagcggagaatgggtatagaaacaaccacattctctgtaggtattatcacaggattggtgaaagatagatgcggtctctgggtaggacgaggacacatggtgctgaggcgtagcagatttaaccttgtaaaggcggttaggtcggacttggtgact

SEQ ID NO: 147938 - DNA, 617 bp, Cannabis sativa
tacacgtgcaaatgcacgtggtatgaaatgcacgtggtatggtatactcacctagttttattaaatatctcatttttctcggtatacgtttttgcttggtgtatcattttgataaatagttagtttgccttatctttttttttttaattaaattttttaaaaataatatatttttttgcttttttttttttaattattcattaaaatttatatatatcctaaactatttctcttaaattcatatttcactttactacttactttctctcttcttctctcatgatggagtattcttttcttaccgacttaaatactgatacagatagttggagcatgaatattagagtttgtagaatgtgtgagtctcttaatactaagaagaatagagaattgataagtctcaatatgatttttattaatgagaaggtgattactattttattcatattttctctctattattttttatcatttatctcaattattaaatatgtctactatttatcctacaagaaaattttatgcatgcaacaataagaaaaaaattagtttctaagtttaagaagctattaagtgaaggttctttgtactgtctacaaaatttaaaaattgtggca

SEQ ID NO: 147939 - DNA, 511 bp, Cannabis sativa
  modified_base (80)..(80): a, c, t, g, unknown or other
aagcaactataaaacaacttataaacaacgttaaattaacgtagccattaaaatatttagataaaatctctaattcatanaaaagataaaatatagatcaacaatgatttccaagacgagcatttaatgctggagatactgaagcgataatggaagatatgcatactttaggtagaagttacatcaagtccaggatggcacgtgggtacagaagcatgtcacccatctgagaaatgtgaaatccaaagaagtccacgtatgaacatgagctttccatgcagacttggaaggtaaatgttatctcaaattttgcacaacgtgacatgacactcagtagggtaacacatgtgtacatattcagacctagacagagtatacccacttatggatctgtttagatcaagtcagagacaaacttgaagggtagaacagtaaatttgtccctattcaatgtagatctttgttggattttgtgccctaaataaaacccatttcaaaataatcagattta

SEQ ID NO: 147940 - DNA, 523 bp, Cannabis sativa
  modified_base (33)..(39): a, c, t, g, unknown or other
  modified_base (467)..(495): a, c, t, g, unknown or other
cactctttccctacacgacgctcttccgatctnnnnnnnaattactagacaaggtctgcccacctacaacttggcccccagatggaacctgtgactggggatttgacggttgaccatttatagtttgagagatattcatcgctaaaacttcgtaggctgctacctggcggtctgataggcttttcgtatcaacacagtggcttgtcgactgcgatcgtcaatgactccttgttgagcccttaacgtttccatctccttatccctccattcggcaaacatgagcctctgctcttcaaacgcgagattcaccgcggcacggaggtcctcctgatcatgatgtagggtgttggtatgaccctgcatgattccaagagcagcacggaggttctggattttagtgtcatccccaatggatgtttgaacattggtagcaggcggactgtgttatgaatgttggaaattatttnnnnnnnnnnnnnnnnnnnnnnnnnnnnntgttgattaacaccctaaatatgcactt

SEQ ID NO: 147941 - DNA, 1245 bp, Cannabis sativa
ggacttcgatgccccctagtgtcgcggataactttccatcttcagttaccagtgaacctttggtcgcctctgtcatgaatctactgatgtatggccggagaggctcgcctggtcgttgcttaacttcaaccaagtctcctagatgcaatgaaagtgggcgtgaggaggagaattatgcatggaattctgaagagaaggctttccatgaactaaactttctaggggacaacttgaaataccattgctgagcgacttccgacagagtagcaggaaaaattctgcaacacacatcccctcgtactccttgcaaatccatttatatttgcaaatacttgaggtgggagagaagatcttctctccctatgtacatcttccatgttggcattttaaacttgtggggcagtgccaagagattgatctcgggagagaaaggcgtgttgcgtgctcggtctaactcaagatcattgtttctctatccagccatgccatgcaacatatttttcagctcgtctagctgtgcctatatggctgggctaactcgcttggcattctagtcaacttgaatcacgtctgcatctttttgagcgggaatttgagaacgggctccgggctgaacgatcatcgtgacattttgattgtctactcctctccttctgttcagatcattctttaggtcatgagtcgcccccaacctttcgaatacataagcgtctggctgtcttagcgattgatttgcttggttgatgggtgggatggcaccattgatgtggttggaaccatgaggtatgatctctctcgatgaattactatacaaggtctgcccgcctaccgcttggcccacaagtggaactcatgaccggggattgggcgactgaccatttgcagtctgggaagtattcatcgtcggatcttcgtctgtctcacccaggggaatgacattcggaggtggctaacctacagtttggtaggcttttcttatcagcacggtagcatgccgactacgattttcaatctctgtatgatgagcccttaatgcctccatctctctgtctctccactcaggaaacatacgcctttgttcttcgaacgcaagatttatggtagcgcggagttcttcctgatcatgatgtagggtaatgttatgaccctacatgagcccaagagtgtcacagagattttgtaactcagtagcatctccaatggttgtttgaacattggtaccgggcggaacgactgtgttatgaa

SEQ ID NO: 147942 - DNA, 696 bp, Cannabis sativa
agaataatatgtgatatgacatgttgttatatgtatgcaagtatggtatgaatacatgtgatgttgtgatattgttatacttatggctatgttatctagttggggggggttatgtcctacatagctcttcttactgggcgttagcttacgggtactctgtgtgcaggtaaaggcaaaactaaacaccgaggatggcgagctcgagtcatggattacatgttagaagattgttacgatgttttggtttaaaaatatttcgttaaagattatgactcgataacttttgtaaaagttaatgtttaaaaatttataaatgaatcaagtgttcttgttttaaaataatgagatctcatgatttagttatttccaataaattaatttattgtttttattataaatagttttaaatagactatttagtgtgtcatctcaagaaatcgggacgttacatgagctaagtaccaaaatgaatttaattataaaactaagcataatttcaaagataaaaaaaattactttgtagaatttgtctaaatatatgcatatttttaaataaatatgtttattttcataagttaattatctaaaatcatggaatcatttggaaatgttctagaatttgtctcaaagaaaggctcggtctgcttcccctagtcctacaactgatcctgctgctggatctgcttccacttctgc

SEQ ID NO: 147943 - DNA, 904 bp, Cannabis sativa
gggagttctgtgaatttgttgtttcaggaagccttcacagcgataggcctcacggaccgagatctatcaccaagcggttcccaactcacgggattcaacagaaccacacttatcccaatgagaaatgtgcagttgccagtcaccctgtggcaggactcaccccagagtacttttaagtactgcacgtttgtggtggtggactacccaactgcttataacgcaatccttggccggccagtcctgatagactttggcgcagttacgtccatccgtcacttgtgtctgaaattccccacccaggaggctggaataggaaccgtgaggggaaatcagggtgaggccaggcaatgttataatgtcgcggcccacttaccggtattgatggtccgtgaagatatcgagccaggattggcaaaagaagatgagttgaatccctgtgtgggatccgaaaaaattgtagaacctatggaagacgtcgaggaagtgccagtatgcgacctcgaccccaccaagatcctccggctgggaaagagcctagaaccggaggaaaaagatcaaatagttaaagcactaagggcagccacagatgtttttgcgtggtgccaaggagatacgaccggcataagtcctcatgtaataacccacatccttaacgttaattcggatatgccaccagttcagcagaagcggcaccccctcgatctagtaaaggcagaagctctagaaaaagaggtggacaagctactagctaatggcatgatctgggatgtatattatccagaatggctggccaatctggtactagtgcctaaacccaatgggacagggcaggtgtgtatagacttcactgatctaaacaaagcttgcctaaaagactgcttccccttactccgaattggctaga

SEQ ID NO: 147944 - DNA, 637 bp, Cannabis sativa
  modified_base (75)..(76): a, c, t, g, unknown or other
ataccctagaaatagagatttcttcgtggctaagaaataataagataactattaataataaattttttattaatnntattattaatattatattatattattattttaatattattattataattataatatgatataaactgaattttgtaagtaatatatatatattaagtttaacatatataacagtaaaaagaacgaatgaacgaacccttgttcttctctcttcaataaaactttctctttctatatttattttctttcattttcgatctgaaacctagcgatctaagctctggtagtagcaggatagcaaatccttgaagaggaaaagcttaaggtatagtttaattacgttttaaactaaaaatgattggttttatataggggctttatgatttaaaaaaggttatggagattttgacttcgtagaattattctttggtaactatgggactagtttatatgtttacttgttgaatttgaggtgattttgagttagaaatagagtttggaactttttaaagcgtaatccaaacgttaatggcgttttcaatttaagggctcgattttaatttctgttatgcaaggatggtaatatttatggtatatatgcgccctgtgaagtttggagtga

SEQ ID NO: 147945 - DNA, 517 bp, Cannabis sativa
  modified_base (83)..(93): a, c, t, g, unknown or other
  modified_base (452)..(454): a, c, t, g, unknown or other
gaaccaaatgacacacaaataagtgataaatacttttgtttctttattgatatttaaaagataaagattacattgaaatggannnnnnnnnnnggcataaaacccaacagttatgtgaataagaaataattgggttaggtctggtatatatcaccaagataaaccaccaaaggaacgtaatagatagattacgtatattgttaaatagggttatgcgagcaaggcataaccgaattaggctcggtaactagaaccgagatgaaccgttctaaggtcttattgtaaatagacgtgtgagcgtaacacgtaggtctatgccatatagatacaaataggcatgtgagcgtagcacgtaggtctatgccatatagacacaaatagacgtgtgagcataacacgtaagtgtatgccatatagacacaaatagacatgtgagcgtaacacgtaggtcnnngccacatagacataaataggcgtgcgagtgtaacacgcgggcctgtgtcatacagacaaatat

SEQ ID NO: 147946 - DNA, 1031 bp, Cannabis sativa
  modified_base (143)..(144): a, c, t, g, unknown or other
aaaaaaaaaaaaaagagtttaggaaaaataattatttttgaaaataaacaccaatataaaaataattcaaataaactatataaaaaataataaaaattcaaaataaaaaataaaaaaaattaattattaatattattttattnnttaaaaaaataaatattattataatatgtataaacttttaattgtatgcaagcagtcttatcgtaagagtatataccttacatcataataaccacatgatctaaaatcaatggtaaaaaaaagttccctaccggtagagaacttttgctaggtcctaccatagtcttgcccattatagtattaggtttttgattcctatcctttagtaactttttttgattacgcgcgtacatatgttttagaaaaaagattcataatgttataattttagtgtaacatgtaattaatttgtaaaactttttagtcttaattaatttgtactagttcacgactctaccaaaaaatacaaaaatatatagtttttgactaaaattcatctttaattttatatataatatatattatattaatatgatccattttatatatatacatataaatttaattttttttttatttttctataatatatctttttttctcactatctctatttatatatgttgtttcggatttttctcaaaatacgtggcagcgactgcgtatgacacgtagatctcaaagaacacccactcacaaaaattagttaagtcatagacagagaagtgcacctcacggagtgagcctctcggagaggagcattaagcacgcctttactcttggaaatataacaatgcatctccgggaggaaaagagatcgttcgagtagtcatttcgcatttaatactgcatggggaaaacgtatcagaatctccataagagaatttgacagatgacgtaagcttcttttacggcgattagacgataatcgacgagtctagtgacggctccatcatgaagactctgttagactttttatttgggcttacattaagttttattggttt

SEQ ID NO: 147947 - DNA, 1159 bp, Cannabis sativa
  modified_base (417)..(418): a, c, t, g, unknown or other
tgctgacaacactataatcataaataaatacatatgttgtggacttaatagaatttataatataatcatgaaataaatcatgtgaataatgcaacatagaatgcaatttcttaactttattaattagtaaatcatattatattgaaatgggttttagggcacaaaaccaaacacaaggttcatgcttaaccaaacatttggtcgcagttccacatccaaatttggagaattcttagaggctgtcataattgctatcgggtttcatcacaaatgttggtgtggttcgtatcaatatcactttgttgacctcaaaaaacaactttacggagtacgagctctacccaaaggatttaattccccagcctgtgaaggagaagaagaggaaatccagtgctggccgggctgagggagctcatnnggagaatgaactcatttaactcaatcgtaaagctaagttgaagggaggtgcgggagccaagcagtatgctaaggagcatcttgagcaggaagatgaggttgaggaagagccagagactcctctcaaaaggaagaagaaacttttgaccgagcacaggcctatcgaacatacgattcagattagggagcctagtttacttgctcggctctccactcctatggtaggaaaggggaaagccgtcctggaggaacaagaagactcgtcagatgatgatgctccatcaggtcttgctcgggcagatgcttctgttgatgtgcaagatactccatcttgcctttaactttcctaattatcaagaattcacatttctcatgatttttcctaaccatgttgctttcatttaatacagacatgtctcagaaaatgctcgaagttctgaagaagagagtgggaggaagctcgggcttatctcctccgaccaagaagtccaggggcagtgagacaaccccatccagagagaaggtgtcggccgaggcagctattgatctctccgaggagccaaccaatacaacccttttgccccaaaaaatgacttaagtctaatgactcccaaggagggagctcggacaagcctgagcagtcgaagagcggattcgagctggtcagaaacgaatttgagcagatcagggcccctgccccacctaaagtgttgcatccagagactaagagaggcaaagatat

SEQ ID NO: 147948 - DNA, 1178 bp, Cannabis sativa
ttcaaaaaatgaagtggcaaaatttggtgaagacacgtgtaagccccaaagtattaataaaatttatattaatggtagtatactccatataaaacaacaaattcatacacagtataaaagtaaaaatacgcgtgtagcagtatttttgaaataaaatgaaaaaagttagtaaaccatgtaaatttccctttattattttttctttaacaaaatttgatattatgtgtttttccatgaacaaatgtaaaattcttattatattagagatgagcatatgttgatatattatttattatttttttaaacaaaatttagtatggtaattgtaatagtaaatagattcattatattgtttattttttccttttacttttgtaatccattacaatgtaatagttattacattaagtattgcaatgatgactacatacaaaaactaatgtaatcctcattacaattacactccaagaaaaaatatattttaataaaaatatagtaaaaaaagcagaggcctatattattattattattattttttgaatattttaaattataaaataaaattaataaagctattttgatcaatacaaattttattctattacatttgcatatcaaactatatataataattttgattgcaatgttcattctaactacaaactaaacattgtaattaatttttattaccattcttattccattacattaccattactattaccattaccattccactacaccaaatcaaacactatctaaatattaaaccattttttcttatgtattgtattctatagaatagtatatatttatatacaaagttaagagactaaataggttactactaaatacaattaattctaattttacaactaatatacaacggaggaggtttcaatagttacatcaaatatgtaaccacatggttacatttatttttaaccattagatcattgttgaatggttgtgattaatttagaaattaaaaaaaaataaataataaataacttgggacttgatactttattttcttataaaaacttaattaaaattgattttatttaaaattacataactaataattacttggaaaattttatttacaccccaaaattttctaaaggcaccccattttcataattttaatttaatataaaatttatatctttagttat

SEQ ID NO: 147949 - DNA, 511 bp, Cannabis sativa
aacttgataatcatgtgttgtgagaggagggtgagcatccataagaactcgttgaactaaacttggaaatggtagcttgttacgagttccagtagtttttgaggcttcgtgtaccctttcaaaaatgagcgagggcagatcaatggacacattagtgcctacagcatacaagaacttgccaatctcaagtgtaacaacagataaatgagaattaggaaaccaattgtacaaggctacccgatgaagaaccctacagaatggagtcagatgagtgaccaggatttcctgtttgtcccaaatatagtcatccctgcaagtttgcactctacccatcaaagattgacctggattgaagtgtttcccatatgttggtttccggatggactcaactttcaataatgatgcaatagtgtatggaccaaaaggaactctatgacccctaacaaaggcactcacacaacctggatgaccctcagcaataacagttctatcaagattggcatagaattct

SEQ ID NO: 147950 - DNA, 532 bp, Cannabis sativa
cccaatcgaacacctccttcacaattgccttggaaacaatacacccaaaaaagagatgatgatgactctcctcctcttcactaaaatataattttataaataaaaaatttcttttatcttattttacttttcaataaaataatataaaaaataaacataaaatatttaccaaaaaaatattattatattacaatataaaattacttataattttgaagaaattttaatatgtaattatctaactaattaaattacttaattcatttcaacaaaaataatatatttaattcaacatttaataataaaaaataatatatcctatacatgtatatcataaaataaaaacaaactaaataaatttataaaaaaaaaagtactaataaatataattaattatcgacaatataaataaaataaaagcagaaaagagctaaaaaaaattaaacttacaaagatgtataatatttaaacaaaaagttaaaatctatctatatatatctataattctgttgttaagcttgatgatgtggca

SEQ ID NO: 147951 - DNA, 786 bp, Cannabis sativa
cctcattgatcaagctttatggggcataagttttctttctttttgtttttgttggacatatttctttacttttcatgtctttttgtcattggctcttagataaacaaaaacggggagtaatatttgtttttaccaatttgttgtctgaactctggaccatttttctagggggatttgaagttggtacttgtgaacttttttagattaaaatttcttttgctaactttaatttgcaagtactttgtgttaaaaaatattttgttcatctaaagttccaaagggggagattgtaaagtcctttttggaaagttagttgacaaaatattttttatttaatggtaagatatttttgcatttatgaccgactgtcttaccttgtatatttggatttagttgatcttttcttggttaggaaagatgcttttaatgctaaactttccattatttggaaatttcttgtaagagaatcttttctcttatggaaagttggtttataaaggaacccttgattaaatgccttctcctcattaaattcgattgtatcttgatacaatcagaatatataatttgtttatgtttatgacaggaatcaagacttaatagaggatcggacccgattatagctagtttccttttttctggtctgatttgctgtgtcagcttccgattttgatgctgtagatcgtatttatcttaggaaagttttgtacagctacagattcgatcttgtggctgtccctagggtttctatgttctataaataggacctagagagcagccattcga

SEQ ID NO: 147952 - DNA, 526 bp, Cannabis sativa
  modified_base (36)..(40): a, c, t, g, unknown or other
gccccgttacccgaatcccgagtcaagatctagatnnnnntcacgggtctcggtctggttatggttcaggtccaggtccaatatctgagtttgggtttaggatcgagactggggtgcagttctatgtcccgacctggttctgtgtccctagtctagttccatttttgggtctgagttcatgttcgggttcgggtcccgagttcaggtttgggttgggatccgggtccgactcccaattcgggtctaggtgaaattttagttatgattccaagtccaagtcctagttccatgcccggtcaacttccggttttggttccaattttgggtcacaggttaagggttcgggtccagttttgggtttgggacagtgtttaggtctgggtgtgggttcgggtccttatcagtgtttcagtcctgggatgggtcccaaatccagacacttactatgggttttgtccaagccctgggtcaagattcggatcccaatatcgggtcccaatcttgttcaatttctggtgccgggtca

SEQ ID NO: 147953 - DNA, 784 bp, Cannabis sativa
tggtataatggaggctgcccttttttaaagaaaatcttaggttttgtacccttttcccaacataaaccctgcacatgtcataaatctagcctctccaactatttgctctagcagccactcctagaacgccatttcagctattttttgccacatcaattaacgaattgccacatcatatttttctacattagtttaacaatcagccctgctacttttgctgcagcaaagttcctgcaaaactacagcaaaacattgcactttctctattaagcccttttctttaccaaaacccaaataaaacttaataattcccactaacaactccaaattatctaaaagaacataaaaatacaaaataacatatattctcacaaaatagaatgaaaagaactaaatataagtaaaatacatacacaaattaagctaaaaaaacatgacaaataactctttattcaagagttatcactactctagctagtaagcccatgagttcactttttcgaggtttaatttaaggtttggttttgttggaagtaattttcattatacttttttttttttttgtttaactccattttaaaatattgaaatgatattaacttttccaccgtattgatagaatgattatttcattttaaaatagaaggaaagttccttccaatgtaagatgataaaaaaagttatttttttaccaatttcttttttgttagaaatattttaccaggatctagatttactacgaagtatgtttcattaacatcctaatatgaattctaaaccaatg

SEQ ID NO: 147954 - DNA, 769 bp, Cannabis sativa
  modified_base (35)..(41): a, c, t, g, unknown or other
aagaatgtacatgtttgagccatatcagaccaagnnnnnnngggtctactagtgatgaacttttgaaattccattgtgccacctaggccggctaaaagaaaaagacttgtaataaagttgtaaatattttttgggatcccaactgtttaaaagtttaaattattacaacttttattttcattctgtttaatataaaagttaaattttgcgctattttaattagtaatcccgtttaggggattaggatttcgaaaataacttgggtagcgtgcctaattatttagggcattacatatactatgaaatgagataattccactagttaataatgtgttgtagaatatatatatatatatatatatagaaagatagaaacaacaattagagagttagaatcataaataccgggataatatcccgaattgtttaaatatttttcgaggatgaaattttactaaggaggggatgattgtaatatactgataagcctaatggtaaataattaaggtttatatttatattatgagttaattaggtaataagtgggattatgatcctactaatttatttcaaaaaaaaaaaataatttggctataagtggatatataagcgtaatttgttaattacagagatttatttaaaatacgtagatataatatgagttatttgtgaaatattttcaggttcgacaaccttggagacccgattggaggctaaaaatgtcacaacagttttagttagatcccattatcaaggattttgtgattaa

SEQ ID NO: 147955 - DNA, 1050 bp, Cannabis sativa
tttgacttaattgtgcgagcaggtcatgtattttgctcagatatgatatcatcttttttctccaagcttcgtattctccggatacgtgatttaccaccagctgtgaatcactgcagatttcattgtgctcagctttcatctctcgggctaactttaggcaagcgattaaagcttcatactcggctttgttattagatgctttgaatccaaacttgacaacaacgtgcaagtgttgccccccaggcgggacaagggcaattcctgcatcagatagttgatttgtagccgacccgtctacgtgtagttttcaagtcagcttatcttcactgttatttggcggaggtgtgtgtatgggctcggggttgctttttggtacgctttcttctttgcctgtgcattctaccacaaagtctgctaaggtctggcctttaattgctattaggggttggaaaataatttcgtactcacccaactccaccacccacttgagtagccgtccaggggcgtccagcttttgtaatattttgtgtaatggttggtctgtgtacacccgaacaggatgagcttgaaaatagggccttaactttcttgttgctggaataaggcattaagcgagtttctctatcaatgggtatcggcgtttggcctcaatgagccttttactgatgtaatagacaaggtgttgtacgttgttttcttctctgattagcatggcgctcacagcgtgcttcgtgatagataagtatattccaaactcttctcggtccagaggttttgagagaacgggaagttttatgagttgtgcttttagctcttggaaagctttttcacattcctctgtccacttgaactgcttgtttcctcgtaggatattgaagaataagacacacttgtctgttgattttgagacaaatctactgagggcagcgatccgaccaatcaaacgttgcacttccttggttttagttggcgacttcatatccaggagggcttgaatcttctttagattggcttcaattcctcaggcgacttcatatgcatgctcgaggt

SEQ ID NO: 147956 - DNA, 519 bp, Cannabis sativa
aaaaatttataatccccaaaaggaccaagtgaataagttgatgttagtttggttttatggtactaaatcaggtatgcagctaaagaattcgtatgtctgattatcattgtaccacagcccaatggatctccagatgtatatacattaaataaaaacataaaatgaaaataaaagaatacatacttcttgatgactatcagggtatcctcaaaacttctcataagttgtatccttttggttgatcagaaactcacaccgtagtcttccaaatcgatccaccacacacaaagaataatgtgagctattaggataaattgtataatttgttcttgattaattctcaacacatgagcaagaattatttgagagaaaaataattttccttttctcctccgtatttcaaaaatagccttgaaaaatcatctcttgatttcttcaatcatgcttctatttatagtagttaattctccattaatttaactatatttaattatttaaataaatatctataaccgaatt

SEQ ID NO: 147957 - DNA, 550 bp, Cannabis sativa
tatgaaataaatacaattataaattataaaatataaaatataaaataaataaatgaatacattaattatagaagtataattagcaaatatctgtaaattccttattcatatggacaaggtataattttgtaaggatgaacaagagaattaagattatacaatatgaataaaactagtcggtagtgtattaaaagaaatgaatatttaatatagagttactaagtacgatttactatacactatactctagtgtatgtgattttgatttggattacatatgtggatatacatgtagtaaatgtgatgtgtataatttgattatacatgactggaccggcatgtaataatatcttctaaatgtcgtttatcatgaaagagttattcatatcacaacgatgatcactagtagatccgtctgaatcctgagtatacatgaactcctatttgtgtatattgagttctttgattcactcattaaagtttcttagagaagatagttcttacaacttctattttaagagctcaataacatgagtgacttggaacatgt

SEQ ID NO: 147958 - DNA, 525 bp, Cannabis sativa
aaatctctaacaataaaaaacttaccccttttcaatggaagaggagataaatcaagattttgagaatacaaggataagagattttatgtgaaagtcattcatacgtgagcaatggtaaatattatgtaatttactattttatatgacagcaatatatatgatatatatatatatatgagttatatatatgtgacatatatgtaattatgtgtttgtatcatattaatatatatagtagtatataatatgatatttgaatttatatcatattttattatatgtatatatataagatatataatatatatatatagcatgaatatgagttatgtgtattatatatatgatgagatataatataatatacaatatatatatatattgtgagattaaatatgaagaaataattatttctatgtatttatatgagacatgcatatataatatatattatgagcatataaaatatatcatgcatgtatattaaattgtatatatgttatatatatgagatatgtaacatat

SEQ ID NO: 147959 - DNA, 590 bp, Cannabis sativa
aaaggaaaggcgaaagctgagcaggagtgagcttgagctgggatgggattgtacatgtcatggcagcgcgacttgaagtgttcggtctcaagacatccggggtttccattttatagtcgctgtgcgacctgacatatgtattttggaatattttgtaaaaagtttagaaagggattccgacttttgtaaataattatgtaaagtttataaagtttcataattaaaataaaagttctaatttgacacgattctcaagaaagttctttgattagcaaagatagcactaattaaaaaatcattgtagcgcgcgtgccttagcgttagggcgttacattaataatcaaaggaatttgttggagaatcaagtcaggaagaggtgtgaggattaatgaagacaactggctctctcgacctcgcacctctgctctttgtatttctactggagtagccccgaatcagactgtaaatactctaaaaaataaagatggcacctagaacaaagttcttatagctaacacattctatgataatgatattcctttagttttagggttggtcccttatgcttccatggctgatgacgatttaat

SEQ ID NO: 147960 - DNA, 591 bp, Cannabis sativa
aattctagttaagatatattttaaatattttattttaaaataaaaatatcttaacctactttctagttatctgttacatgtttgttatgtttgtttattgattaacttgttaacaaatcaaatgatctgattttaatcatagtctaattgtcaataaatcttataaataatttgtaacaggtcgattttgcaatttctttcatcggtgtagatctagaaacatgatagggcccatctaaatcattggacctatgtgagcctatatgtttacttttgggcttagatgcatataggatgcccatttaagtttaattaattaaatggactagcttgtgaaaataaaatatcacataagatagttttatttaggcctaattagtattgggcttattcaatgaataataattatttatttaatggttaaatttctctcctttagaccttgtgtgagagttagggggccattagtagtgggtacgacatactgaattcaaccctccctcacacgaagcagtccaatagtccaattgtgaaggcccatttaccttatttaaataattgtattaggttaattatattagtctaacctaa

SEQ ID NO: 147961 - DNA, 516 bp, Cannabis sativa
tatatcaaatatatataaataatagataataaaaatacatatttcatttataaaattttatattcaaataaacataagcgatatatttttataaattatatataaatttttaataaacaaattatattaattcaattgaaacattatcataataaacatactagattaataataacattataaacatcaataatactaattaaatatttaacaaacatacacatatacactgtttataaacaaaatttgtatatatattttttttattttatattatattttagtaatatattactttagtaatacattaaatataaatattgacttatgtatttagatatttaagtatttattttttttcatttttacacttcaaaatattttttttacgaaaaatttagatagtaacccacatagtaaccaacagaacaacttaaatcgcaaccaaaatctatatatcaacccatatagaaactactggagcaacccaaaccgtaaattaaaaaaaagttaaaa

SEQ ID NO: 147962 - DNA, 611 bp, Cannabis sativa
  modified_base (144)..(144): a, c, t, g, unknown or other
accctgaagtgatggatcccaataccagtcgtaatcaaaatctgccatattattcaacagatttattacatcatagcctttcattaatagatgcgctctagttacctctgctccataatcaacccaacttcttatttcatcatnaagtctattataaaagagccacgtaaaacatacacgtgagaaagtgctttaacatctctctccaagctctttaaatctcttccaagcataatagaatgactcattgtgttgttgggcaaaattctcaaggtataatatctggatttatcttgtagtcaaactcatcagtaaaacattataaaacattactaaaataaaaaaaataaaaaaaataaaactaaattagtactaaaaaatattttgtaacgacaaaattaatactaaaattgagaagtactaaaatagaaaagaaaaacaaaattcgaataaaatttaatttttaataatattaactaacaatccttggcaacggcgccaaaaacctattctgcttaggattagaagaggaggtgagttttctgttgcgtcgactgatagtattttggccataactctcgatattgcttgaaattggacgattcaagatg

SEQ ID NO: 147963 - DNA, 815 bp, Cannabis sativa
ttattattttaaaaaaaggacattaactatctatagagttagaaatagggtcatttacttacatttctcaataaaatagtcattctaccaggattgggcctgagctaaagcgaactagtcccgggccttgggcccacccaacctaggagcccaaaaaaaatattttcattttaaaaatatatatttttttaataatttttaaaaatatcacatatattttaaataaaagacctaataatttttattatcctaaggttcactcaatctcagagtcggccttgcattctaccaaaatagtagatagatcattctattgaaatgacatttcaatatcttaatatgcaaccaaacaaaagaaatgaacgaagatggtttcatttccattctattccatttcattaccctattggagtattttttttttaagaaaaattaacaaaactcacgtggatgagagaaaaaataaaaaaaaaatattttaagatgaagtgtgtattttagcaattataaatattgtccatattatagcattttcaataattaaattttggagaatgcttggttatgtagattgtttattcgacaaaacataagaatattatactattaaagataaataaatgctatcataaaaaattatgttaatatcattacataatattgatgctatttttttttaaaaaaaaaattaaaaataaataaagttagttatagttaataaaaaaaaagtttatatatataaatattttctttttttgagtgtagcgtaatggtattttacaatcatttaatagcttaatagcttcaaggtccta

SEQ ID NO: 147964 - DNA, 561 bp, Cannabis sativa
ttgttactcgtgccggaaaagtcaccggagtttgctgtcggcaccggaaaattcgtcggagtagctgctggtgccggaaaagtcgccagtgttgctgtcggcgtcgaaaagttcgtcagaattagcattgtcactggaaaaatcgtaggaaaaataccaagaaactggtttcttgatgaagaatccggtttcttggtaatttttctgataattttaccagtgacaatgccaatttcgacgactattctggagtttgatgtcggtgccgacaaagtcgccggagtagttatcggtgtcaaaaaaattgctggagttattgccggcgtcaaaaaagtcgtcagaattggcattgtcactagcaaaatcactagaaaaatcaccaagaaagtgatttcttgaccaagaaagtggtttcttcatcaaggaactagtttctttacacaacaataataatgattatgaaaacaaaacaaaaatggtatacactgaaaataattgaatctagtttcatcaatcaaccatatagagaaaaaaaaacacaaaaaaatactcataaataaa

SEQ ID NO: 147965 - DNA, 982 bp, Cannabis sativa
  modified_base (425)..(430): a, c, t, g, unknown or other
ggccagtagtgtgtgggggaatcttacagggaaaccatgcatatgaatgcatgaagtaaaacccattaccaatcaaaaaatttagagaacttacaaaaatattgtaaaatgagaaaaagtataaaaatactgggatacagaaatttttatatttttactgtactaagtttacaaaaatactatgttaaagtttaaaaattacaaaaatattgtatttcagtaaaattaaaaaaataactcaatatcaactaaaacagctaaaaaataaccctaaaataacttaacaaataacataaaaataacaaaaaaataactacaaattaagcaacagaaaaataactaaattttgacctaattacaataaacaaaataatattaactccttaatatatttttgtattacaattttttttacttagttttgnnnnnntgatttatctttttgtactattacattattttttcatggaatttgttgttgtaactttattctttcaattttttttttatttagttttgataacttgatttatctttttgtactattacattatttttttcatggaatttgttgttgtaactttattctttcaattttgttttttcctcttttctgttttaagttagtgatagttaaaatgatagtttattttataaaagtaataaatagttatattaataatagaaataataaaaaattatgatttcaaaatagggtatataatataatgggtaatatataattgatatgtcaatatcaatactgcacatggtatcaattaaaaaaataaaaaatcttatcatttgtatttttaaaaaatgtgtcacaaaaataaactaaatatatgtatctacatctacaaagcaacatacatacatacaaaaaaaaaaaaaaaaattatcaagaacaactaaaaatatatatacaccataaaaaaataagggctttgtcatttttacacttcaattttttttttttttt

SEQ ID NO: 147966 - DNA, 530 bp, Cannabis sativa
ttagctatgagctaaactttttatggtttgaattgttgaagaaccctatgttttagtttagtattttttttatgcaaatatttagtacaaattctcatgtacatccaagtgtgctttttgttaatttcttggtattgattggccaccaataccttgatgttgagttatatttaattttggaaaggttaaatgtaatggacttaacttggatgacacgagttcttaatcttactagattagattagagataacataggaatatgttatatccttgtgtaacatttgagaactgtgcttggaaatgatattcttgagcttgatgggcctaggaatatgtttgattcggttcaaagaatgatttcataaaatttggaagagatttatgcactttattggagttcttgttgacctgagatttttgctaaagttttactgcagcaaaacgcacagtttctgctaaacatagggggattcaatagttcaaacctttcacattttaatagtttacaactcatttttattttcatctt

SEQ ID NO: 147967 - DNA, 525 bp, Cannabis sativa
aaacctgctattgcataaaaattgataatagggagataatcatattagaccataatcaatagaaacaattgaagtcgaagccctagttcttattaatcattaatttccttattagtttaattgcttattcttacactatttttattttctaataattttgatcttttcttaatttctactcaaccaaatagaagtaaaagtttaattttaacgtagttaactacaatccttgtgggatcgacctcactattggtgagtttactacttgcgtgtgcaaaatatcacaacacctaataagttattagaatttatttttcttcccctagtttaatttttgaacccattttataaaaagagaagctaaagggtctgaaaatacccgcctattgaaaatttaccttcagaggcggtttaggtataaaattggagtataccatttagaggcagtttggaatcaaacgacatagggtttgataggtaaaccctatgccgtcggttggtttatataataaccgacggcatagg

SEQ ID NO: 147968 - DNA, 730 bp, Cannabis sativa
agtctgacgtccccctttattctgatttcctcgaaaccttttactttgccctgaactccccaaagatgggaaagttctcttcttttgctcaaaagtcgaatcaccactctctttttcggggccagaaatagggagagtagtggtcccaccagtagcaggagtctcccgagtttcttgcaagaacttaactacaacttcagctcgaagagccttgtcaaccatttcagcataggttgtagtgtcatttgtagtgataaccagatcgttcttaatcttgggatttaatcttgccaagtacttctcctttttactcaaatccgttggtacaatctaataggctaatttagccaagagatcaaacttggttgtgtgttcagtcactgacataccctcgctttgtaccaactcaacaaactctttctgctttgcactacggaccgcctcattgtaatacttagctttaaacaaatcctagaattcttcccaggtcattctagcaacattctttgtgaggaataccatctcctaccacaccaagacatcctcctgaaattgaaacgtggcacatgccaccctgtcattcccaattactcccatgaaattcaatattctttcaatgacagtcagccactgttctcccttaagcacatcagggcctcccagaaacattggaggtgcttgcttcctgaatctctcatataaaggctccatacagttaccagcaacatgc

SEQ ID NO: 147969 - DNA, 525 bp, Cannabis sativa
ggatttgattgttctagctcatcattttgctcattttcctttctcattttatttactttcttgtttagtttttagcctagttcaaatcatcatcacttcttgtttaatttacctaaattgtttagtattgatttttgcatgactaatttctaatcaatccctgtggagacgatactcttttacttatcattgtattacttgtttgtgactacgtgcacttgcgtatacctaattttattcacaacaagtttttagcgccgttgccggggattaatttagtgaaattttatttgtggaacttagttactatcaattttgttttttttttgtttttatttgttttagttttattttccttgttctattttacgcgttgtttgtttgtcttggttttgcttgcaatgtacttgagatgttacattggcaagtactcacgagtttcgttcaacatgactcggagcctctacatagagcattatggagacataaggatttactagtgtggtttcctcaccatggtttatc

SEQ ID NO: 147970 - DNA, 1273 bp, Cannabis sativa
tagatcccatctaaatttatgcacaaatttccagctctaaaattaacacttaaagggaaccaacatttgatccgttagaaaagtcaagatttcataattatagatcatgtttccagtcatccacattattagattcccaaaatagaagttgtaagaatcatcttctcttagaaactttaacgagtgattcaaagaaattaataacatgaacatgagttcatgattactcaagatttaggccgatctattattgatcatcattatgatatgaattagatatttatagtaaatgacatgttagataaagataacttcattcatattggtcattatcatatataatttcgattatatacatcacattcactttgatatcgtactacatttgtaatctaaaccgagattacttgcaccgaagagcgcgcattaatgaattatactagcaactatcgattaaagattccataactttaatatgttgctaactgttttattcatagctaagtgatcttagttctctgtacaactacaagtcacaacctcatatataaatgaggaatgttctgatatttatatataaattatttaataataaatattaatagtttagcattcatgcgtatatcaaaatatttaactctttattaataatcaaaaatgtctttataagttttttagggcataaaccttaacaatctccatctttccctaaaagcaaactgggcatctcccttagtcccatattggttatataatccataaaaaaatttgctggtagcgtctttgttaatagatctgtcaggttatgttttgactcgatcttcaagaccgtcacattaactctctctactatatctcttagtagatggtacttcctctcaatgtgcttgcctctcttgtggctccttggttccttggagttggccactgctccactgttgtcatagtagagcatcagtagttattctacttctggaactacttccagagcaatgtaaatttttttcaaccaaaccgcttccttgactgctttgcaagctactatatatttggcttccatggttgaatctgcaatactagtttgcttaatgcttctctagactataactcatccaccaagagtaaatactgacccatatgtcgacttttgactatctttgtctgatttaaaatcaaaattagtatatccaataggattcaattctccactgaaatatacaagcatgagatctctcgttctccaaagatacttgagaatgtgctttacagctat

SEQ ID NO: 147971 - DNA, 647 bp, Cannabis sativa
  modified_base (465)..(467): a, c, t, g, unknown or other
gtgagttagtccattgcttgaccaagacctcgcaatgttctctagtctggaaaagctctatttcaagcatctcaactctttggagacctctatgttgggtagcaaaagacaaaagagatgcctgcgaggaattgaaccaaaaataatgtaagagaaagtataaaagaggaacgatgaaaagaaagaaggaaagtaaaagccaaccgattgcataagatcacagccctcttcaccaaactcttaaaactccctttgttgattaaatcccagtcacaaggtttgaaagtcttgtagtgccaccaattattggtagcatgcatcaagcaaagctgcgagccttactgtaatatatatttaaatagacatattttattaaacatgtaattattttggcaatgatgtaagattatgatcttacttagggtaattagtgaggatttattgaatgattataaagcgtaattnnntaattacggagattatattgggatatgtgggtatcgaggatattattttttgaaataaaaatattttatcaggctcggcgactgtggaatttaacattatggtaaaaaatatcacgacattaatggaagaattattttgagggtattccagactaggttagaatttttagaatgtcagtt

SEQ ID NO: 147972 - DNA, 1820 bp, Cannabis sativa
  modified_base (615)..(616): a, c, t, g, unknown or other
ataagaaaattaactaagaaaagtagtaaactaacaccgagcgcttagagcattttctctggatttttctatctgaaactctggaactatactgaattctaaaaacctaagcttctatttatagaagggtaaaaagactaatgcgcaattaaacttattacaaattgcatgtggatatttttacaatcaaaataacttaattcggatctaccacgtgtcaccctctcattggttgcatgtgaacacgtggtgagacgagagaacgccacgtggaaagtggctgaagccattttggctaatggagtgctgagagagagaagccccactctcggggctgggcagtgggccaaatgtatggtccacatgggccggtgcatgccacgcgcgcgtggaggaagcagaggggacaagggcgcctgacgcctgttcctcatggggcccgtgctgctgcgcgcgaatgacagctcgcctcgtggcgaggctgtcttttggtgaagaaaaatgggccagctgggctacgagctgggctcctttgttgggctgaattgcattctaaaaagaagaaattacacctactataggattttaaagattcttatgataaatatggcacanntaagtttaaccaatttatatggtatttttttttatttttagggctttttatggtatttgatatgtcatatatatgtaatttggttttaaaatctcatatttaatgtttttatttgtttaggaatgtttatttgtcactgatacgaaaaagtcacccaccagagtttgctgtgacagttgccggaaaagtcgtcggagtagcggtcggtgccggaaaagtcgtcgaagttgctgcaagcgccgaaaaatttatcggaattggtattgtcaccaaaaaatcactaaaaaaaataccaagaaacggatttcttcatgaggaaactactttcttggtgatttttccgttgacaataccaactctaacgacttttctggcgataacagctactccgacgactttttcggcaccgacagcaaatttcgttaaaatcaagaaaccaatttcttggtaatttttcaatgatttttctgacgacaatggcaattctgacaacttttctggcgttggtagcaactctgacgactaatacaccgatagctgctccggtgactttttccgtactgactaaaaactttgggaaattcgccggaattggcattgtcgctggaaaaattatcggaaaaatcaccaagaaactggtttcttttcttcatcaagaaacccatttcttggtaaatttttttgtgattttttcggcgataatgccaatttcgatgacttttttagcgccggtagcaactctaatgactttattgtttagcatttatatttcattatgatttttcatagtgtcgaatctggtttcatagggttcataagttcaaaacaggttttacaagttttaagggttctataatgaggttgctctattttatgatgttattgtagattttttatattaagtttctttttattattttgtttctaggtttgaaactggttttcacacttatattttgttttatattattactgagcattgtgtgttgttttgtttatatttatgagtatttttttgtgtttttttttctctaattggttgattgatgaaactggtttcaattattttcagtgtatatcctttttgttttgtttttataatccatattattgttgtgtaacgaaattagttccttgatgaagaaaccactttcttggtgaagaaaccggtttccactttcttggtgatttttctagtgatatt

SEQ ID NO: 147973 - DNA, 890 bp, Cannabis sativa
  modified_base (401)..(402): a, c, t, g, unknown or other
tgaattttgctcaagtgttgagcttgtttggattattgttaatctgattatagaatgcttattttgttgaagatttaggcctgagtgagctattgttattgtttaattgtgtggatgagcaagtttgagttcaagaactcaaagcttgctcaacaatggcacttttttattcttgatgcaattattgtgtttgagttgtaaaatacgtttaatatgttatatgttgatgctatcaaaagttttgtggtgattggggaagatttgagtaggttatggaggcttaaaagttaagattttttcgtgtttttttgcccagacaaccagaattccagttgattcagggttgttccaatcagaattctagttggactgtaaggctgaattttgttttggccataacnnttgactcgggactctgttttggacatttttttatattgttggaaagctcgttttgagctctatatgtttattggtattttgaatgccaattttatattatgtgaaagtggatttaggattaaccctatacttgtgaatcccgaaaaattctgactaggattatcggcacttggttaggaacacccggggatttggaatctccacgtatgcgggacatcaggtaagacagtagttgcacgtagagatatgctcggtggcgcttatattgaatattatatttatgataaattacaaaaccgagattagggttattaccctaaagtgcgcggtttattggcctagggttattaccctagtaattattaatgtgtaaatgctatgcaatgtgaaatatattgtaataaagaattatgcattcaaggcataatcaagttagactcggtaactataaccgagataaaccttactaaggtcttattgtaaataga

SEQ ID NO: 147974 - DNA, 653 bp, Cannabis sativa
  modified_base (398)..(404): a, c, t, g, unknown or other
actggcttaaagatagcagaggcaatgaaagtcaaaaatctcatctatcatagtgatttacagctgatcgtgaaccagatcctcggggaataccaggccaaatgcttaaaaatagtgacgtatatagagaaagtttagaagaacttggaaagattcgattactttaaaattgaacaaattctgagagataaaactccaacgccaacaccttagcaaaactggcctcgcagaatgacttggatgaattgaacttaactccggttgagatgctgagcgagccaagtatatgtgaaactgaagatgtcgagataatagatagctctccgacatggatgactcctattatcaattatttactcgacggataacttctaaatgacaaaaatgaggcacaaaannnnnnntattcagtgcctcgctacacaatgatcgaagccaaactatatagaagagggtactaaatgcctcttcttcggtgtgttcttctcgtagaagcaaatgaaatcattaaagaaattcaagaaggcttctgtggggataatgcgggctggcaaatctgtctaaaaagatcattagacaaggatattactggccaacgatcaagaaggacacacatgagtttgtcaagtaatgtgataagtgtcaaaggtttt

SEQ ID NO: 147975 - DNA, 714 bp, Cannabis sativa
gtaaggtttaagatcctgatacattttggtggtgccgggatgtagggaatatggagtggtatgagcctcctcgagaatttcatttctaagttccatactatctagaacacaaaccctggctttaaacaatatcatcccattgtcttacattgtaaaatctcttccctgatctttactaactctggatcagtcaactaagcgactttaattcgttctagcagatcagattgcagcgtcaagttgtgaagctttcctacaacaaacccaatgctagatcttaccatatcctctgctaactgaggtgaaatctgaatcatattagctaccagcgcgggacccttcctgctcagggcatcgaccactacattgtccttcccaggatgataaaggatcttacaatcgtaatccttaactaattccaaccaacgccttcgtcacatatttatatctttctgggtaaagaaatatttgagacttttatggtcagtataaatttcacatctctctccgtaggcgatatcgcggccaattctaagtcatgagtcagatatcgctgctcataatctttcaacagacgggaggcataggcgataacccgatcgacttgcatcatcacgcatcccaaacccagtctggatgcatcacaataaactacgaacttttctttgtcagaaggcaaagctagcactgtagttgtaatcaacctctgtttca

SEQ ID NO: 147976 - DNA, 540 bp, Cannabis sativa
atcaaattttagttcttgtatgaagattaagagactgactaaataattacatttttctttattttcaatttaatcctttttttttcctttttctttttcaaacttctaagttttatctatatattgtaaaacataattacaaagctctaattttataaaaatataaaatcctatttttttttctctttttcattttcttttcttttatctaggtgaaacagaaaattcattacatgcatttcttttaattatatatgcttaacaaaattattttttaataaatacaattttagttaaatataaaatgttgtttttataattattattattaggtaactatacaaaataaatttgtttttatattaaaatctaatttcattaaaattagattcatttaaaattttgttgtaattttttaataactaatatcaattcatatttagtcaaattaattcatatttattcatatatattgtttttattttaattatcttatacaaaataaaaaaaaatattacattcacacaactaatttctata

SEQ ID NO: 147977 - DNA, 900 bp, Cannabis sativa
aggtaccaatttttggaacttttttttttttttttatgattgtataacttgtttgtttgtttcgtgaaatttgttacattatggtattaccgtatgcttaccgtatttttttggtatagatttttttaggccactggttcagaccctcagcccagtgcaccatcttcatcaggcgttcatggtgccgagtacagtgatttagtggaaaggttggataggatcgaggctgaccagaagggtatgtacgcttgtcatgccaagctgaagatggcatatgagaccagcaatatagagttgaaggctggtcagaacctaattatggagcagctcagaaatatattgaccatgttgcatcgtccgccaacgacagcttcagcaccagaggccccagcagatccatctacctcactactagctgcatcacccccactacaagaggaggaggtctttccagacgggtatgatccttattagggagctccagctaatcctatcggtgtaagtgttatccgtttagatgacatcgagtcccagggtgaaatttcggcaatagaggcacaacctgcaggggttaagagtgggaagaggaagagaaatccccctgtatggtttcgtgactacacggagatgaagaagaaacagaggccttcttcgacgtttgatcccctggcgccaccggatgagcgattgttggatactttgagaaagtggtgttctggactcattcccaaccaccggcttcgggatttgaaaagtggtgattacggtccatcgttcttttggaaggtgttgacactacaggaatggcttacagatgacgtaagtaaactaatttataattttactttactttacaactaatctacaattaatatattttgttgtctaactgctttctct

SEQ ID NO: 147978 - DNA, 531 bp, Cannabis sativa
tctcagaagctctccttagggaagaaatccattggaggcaaaaatctagagttcaatggctaaaagaaggggacaagtgctctaagttttttatggcttcgacggttataaggcgaagaaggaactatatacaatgtatcaaagaaaattcggatggcgactggatacgagatcaggacaaaattgcacaatgctttcttaaccgatttaaggagatcttcacaaaagaccaccctagccccattcagttgagtccaggcctgtttcagaaagccttgacggatcaagacaactcatttttgaatgaaattccaagtgaagatgaagtgaagagagccatcagtgatatgggaaaggacaaagcccctggccccgacggctatcccccaagcttctatgtccatcactgggaaacagtgaacaaagatctcaccgagatggtggttcattttttcacccatcttgagctcccacactttattaatgacacttcactagtcctagtcccaaaaaaagactctccatccacaa

SEQ ID NO: 147979 - DNA, 599 bp, Cannabis sativa
gctgccattcctcttttaatttccttctttcgtcatacagagattgattccaagatggtgttccttctagtctgtctaacacctccagtcttccttccaacgcattttttgtggctttattttgtccaaaagtggatttactccacaccttcaccttcccttgaagtgttttcagttttttcataaactttgtgcctggccacccgtcattaatttcctccttccaccaactttcaaaacacttggaaaacgacttatgttctaaccaatgattaccaaacgtgaagggtccaagtccccactttggaggattttaatcgatcgcaacagggctatgatccgaaactaacattaccgacatttcttgtctgacaaatggaaaaatgacattccagttgtttgagaaaagaaatctatccaatctgctgcatataggggatgctctgaaatttgaccaagtaaagcttccgttctcaagcttgggatcgatttgctgtaattcccagatcaaaccatcaaaaagcttcatactccttgtacttgagctgctgttcaacttttcccccactcttctagtcacattgaagtctccccccaca

SEQ ID NO: 147980 - DNA, 942 bp, Cannabis sativa
  modified_base (754)..(757): a, c, t, g, unknown or other
caagtttaagcagctggagctgaaataagaagaaaataaacatggttagtagattcaaaattaatagcccaaggggataataattctctaaaacacataagtttataacaaagatagagataccatgtttctttgccaaaaacttaagacacgagggtttccaatggccattttcattgcaatagaagcactttcctttttgctttgcctttgaatcaatagcctttttattcttattagctgtgttaatagctttaagaggcttcttgctattcttccacttcttctttttgctgggtttcgaagtagagacaatgtttgccttaactttggccgtaccattagcagtgccagaactaggagctttagttcctcctttctgtggatctccaatcaaatttttaatgtctgaaggttgttgattaactcgtggaagtcgaaagtcaacttgttcgtgacatagtttgaggtgaagggaaaaaaagatggagtcaaactatttaagatcaaactcacttgagtttcttgatctataataactccatgattctcagcttcctggaaataacttgccatctaaagcaggtgatcacgcacgttctgatgaggtttcatctgtgcattgataaaattcttagtcacctcaaaccgagcttgattcgacgccatcccaaaaaatttagttaattggttcatgatatatgcagctgtgagagtattggcaaaccttgttttcaaggtgtcgaccatgctnnnnagtataaagtatcgagctttgttgttagcattatgccaacgctcgaacttttccttgactgccttggtcgcattctcacctggatgctcagaagcctcttcagtcaacacaaatagggcattttcacctatgagagcaatattaatattctttttccatttgacaaaattagctccagagagctt

SEQ ID NO: 147981 - DNA, 603 bp, Cannabis sativa
aaaccataacattcaacagtatgtaatataatcaatcatatgcatagaaataggtatgctcatatatttgcattgcctaatcaggcaagcccatatcataatgtaatatcatatacaatgtcataaccataacatgtaaataatataaccagtcatatgcatagaaatatatataatcatatatttgcattgcctaatcaggcaagcccatgtcataatgtaatatcatatataatatcattgcaccacctaatcaggtgagcctgtgccacaacttggcaccaatatattgcatcgtctaatcagacgagcccgtacatacgcccgatacgtcgccaggaagaaacccaacaatgggttcaatctatgccataaccaggcaatttcatatcactgacgcccgtacctacgcctaatatgtcgtcaggaatattgcatcacctaatcaggtgagctcgtaccgattcttgttattcatcatatgtcactgatgcccatacctacgcccggtacaccgccaagaaaattgcatcacctaattaggtgagctcgtacctacgctcggtactcatcatatatcactgacgcccgcacttatgccca

SEQ ID NO: 147982 - DNA, 551 bp, Cannabis sativa
cagcttcattctcaaatttccttttcttgcccttatccttagaggtagtggccaagtgagcactttcagttttgtcctttttcaacgtttcttcctcttgcgcacaatgaaaaataagctcgttgagtgtctatttctccttttgacagttgtaactaattttgaattggttaaactgtggaggaagcattaacaaaaccatgtgtacaagtacagtatctgaaagctcaatcttaagtgtccttaatcttgagacaatatgatgtatttccataatgtactctcttacattaaagaaccaagaagtgttgcatttcaaccttatcgtttttagcaaaacgttcttcaatttcttcaaagaaattcttcgccatagtaatcccttcggattctgtgccccaaaaggcttctggaatgctgtgtttcataatcattagactcatgtgatttgaaagatcccacctctaaaattcccttttatcatcatgggaacttttcttagtgagaggtgcaggttgtgttgggttttatgcattaaataaaactcattt

SEQ ID NO: 147983 - DNA, 664 bp, Cannabis sativa
aaatttaaaaataggcctttttttatataaaaattaaagataaatattaattaaatttttgacacaatatcaattttaattattttatgtaataaataaattttggcacataagctaactcgataaagtaatatttaattaattattacgaacatctctattgaagtgttatatattttgtcatatttttttttttaaaaaaaataatatgttaaaaattatataacttttttacatatttataatttttttaaaaaatacataataaatatacattagtaaatatcttaaaaataaaagaactacagtataatttttttaaaaacattaatattatttagttatttattattatctttatagttttttcttggttatgactttgacatgaaaacatatataactttttaaaatataaaaatgaaggtggaaaggttcgaacctacaatctctccattcgtacaacacctcaattaccagctgtgccataagattttcattcaacttatagaattaaacatttatatattctaagtttttatatatgtatatatattatttaaattttttcggggcctcaaaaattatggggcctgggatgtacgccccggctgccccaccctctggccggccctggtactaaatcatgctccttgaactttca

SEQ ID NO: 147984 - DNA, 563 bp, Cannabis sativa
ggtctttgtctaggttgggtctgagtcctaagttccaatgccgatctgagtgtggattaagttctgggtctaagtccttggttctgatcccggtcaacgttcgagtttgggtctagtttcgggtctagcgttgggtctgcttctaggtttgggtttgagttcgagtctgagtctttgtccgggtttgtgtcttgtttaaaccccgatctgggtctaggttcgggtctaggtccaagttggggtgccgagtgcgggtccaagtttgggtctgggtcagatctcggtcaagcatttcgatcccattctaggtcttggtccgagtccaagttcgtgtccggatccctatctaggtgcaagtctgtgctttggatcaggtcccagatttaggtccaggtctgggtctcggttccggtctaggtacacaaccgtgtccgggcgtgagttctagtctcactttgattctgatgctacgtctgtgttcggttctaggtttgggtccgggtccttgtcacggtcctgtcttattctagggtccttgttcggcgattcttgttcaggttcta

SEQ ID NO: 147985 - DNA, 781 bp, Cannabis sativa
tcactattgtattttccaaatctatatcttaatcttagatttcatctcgaattttaaatatttttttaatattgttaagatattagagaaacttcattagtttattcttttattattaactaatatgttttgaaaaagtgattatttttttaaaaatattttaattgaaaaaaagaaaaaacataaaaaatgtgatattttaattatgagaaaagcaaaataattttaaagaaattttagagtactatgtcaccgttttagttataagtttttacatatatccatatgtaattaaattattatgtatatagtaatataattgttaataatgtatatatataatattataaattcctcattttaattatataagttgtttataatttctagatgtaaaaattgtattaattatatttgacattaaaaaatatttttgtgatatatttatatgctctagacaaaagaaaaagagaatgtgaaaacttaaaatcctagtttacatttactatagtataccttcactatataaactcaatcatcaatacacatctatatatatcgcacttggaaaagactaaacataacattctgtaaatatattttcagtgataattaattttttaaaatattttttcctagaagagtcaactctttgactacattgcaaaaagtcagtgtaagacctaatgtattaaagcaatttgaaaatgatattaggaaatagcaataattgaaagaaatgaaatgaaatgaaagggtgtaccttattttcagtgaacgt

SEQ ID NO: 147986 - DNA, 563 bp, Cannabis sativa
catcacaataaaccacaaacatttccttatttgaaggaagagttagcaccggagcggtaatcaagcgctgttttaactccagaaaacttttttcacactcatcagtccaaacaaacttcaggttctttcgagtcagctccgttaagggtacaataatctttgaaaaaccctcaacgaaccgacggtaatacccaggtaaacccagaaaacttctaacctcagtagccaattttggtgctggccaatcccgaacagcttcaatcttggccgaatccaccatgatcccatctttatccactatgtgccccaaaaatgagacacgagataaccaaaattcacacttcttgaatttagcatagagtttatgatctcgtaaccattgtaaaactgcttttagatgcaactcatgctcttcctctgacttagagtacaccaaaatgtcatctacaaacacaattacgcatctatccaggtagtccttaaacatccaattcattaaatccatgaatcccgcgggggcattagtgagtccaaaagacatcacaagaaattcatagtgtcca

SEQ ID NO: 147987 - DNA, 596 bp, Cannabis sativa
  modified_base (496)..(509): a, c, t, g, unknown or other
acattaacaattactagggtaataaccctaggccattaaaccgctcattttagggtaataaccctaatcccaatttctaattactcacaaatataatattaagcataagcaccaccacacataactctacgtgctacctactgtcttatctgatgtcctgcgaacgtggagattccaaatccccgagtgcttctgaccaagtgccggtaatcctagtcataatttctggaattcacaaaatagggttaatccctaaatccattttcacaaaattataaaattggcattcaaatttagataatcacatagagctcggaacgagctttccaacgatatgcggaactcccgaaacggagtccgaatcacaaagttacgagcattcgaatatcgcgttcgaatttgcccataaacaaggggggccgcggcactccccacacggggccgcagcacctgggttgcaaacccaggcctccaactgttggaaatattttaccannnnnnnnnnnnnntaccaagtatgttttattaacaacctaatatgaattctaaaataatgaaataaacacataagagtttaagaaaaccttacaagatcg

SEQ ID NO: 147988 - DNA, 597 bp, Cannabis sativa
ttttatttagggcataaaatcccagcaaactaccacttgcactaacataaaactagtagtgcattttaatcaatctatagtcttgatatccagatcaagtgtagtgtatttggctaaagccaaattacaggaaatgtaagtctgtggcaagctactcctttttccaccattacttcctttgtgttcattaaacattatgcaacatcactttcaatatgcattactcatctagggatactgaattctatattgtttattaagtgcatctgaatatataaaagacaaatctctaatcctatccaaatggaatagagataaaacaattaagaactttcttcagtttgaataactttccagtgcttttcaaaagcaacaaagttatttagcttcactgatggagcttaaattattataaatgggtttttacatccttctagaataattcctccacccttagagtaaccaccattttcaataagtactgagttggtgtagataacaggattctaatatacacccctatcatctaacatataggtcactttcatcattctttcttgattatctcctaatgttccttgtttgattacatcttag

SEQ ID NO: 147989 - DNA, 657 bp, Cannabis sativa
  modified_base (60)..(61): a, c, t, g, unknown or other
atcacagttgtctcacacctgttctggcctataaaagccagccttcttacttcatttggnnactttcagcatttcaccaaattttcttaagagtttttccagagagaaaagaagctttaaacaccattgatttcctgctctcatttcttcgacgttgccagtcttcgttttaccagcgatcaacaccaacccccagccttcaaacttcatgtaagtccttcgtataccgtatacttgctcactgttcgtttatatagaacgtttttatgatttctgggttggatgtttgaacttctgggaatggttttgttcgagtttctgaatgatgtgctaaattcctcctttttgcttttagattacttcttttcactgcgttttcgttgaggaaccatcctcatcccacgtaatgacaactttagggcttagagtaccttgccttttcggcattacccctcattttttttttctctgttcctctttttatttgtaatgtcagtacctttgggattctcgcacccgacccttttcaaggaaaacttcttggggctttcctatttggcaagtgttgccaatagtgaattttctatttttgactttagagttaaagtacttagtcaccttcttttgataagctgccattcgtatttgagactcgtc

SEQ ID NO: 147990 - DNA, 681 bp, Cannabis sativa
  modified_base (200)..(205): a, c, t, g, unknown or other
  modified_base (289)..(295): a, c, t, g, unknown or other
  modified_base (459)..(464): a, c, t, g, unknown or other
  modified_base (608)..(613): a, c, t, g, unknown or other
aaataagacatagtgtaattttagaattataattgattaattaaaatcaatttactgagtctgtaagcagtattatctcaactagtaaggggaccataggcctatagaaccgagctttctgtaagtagatctataatttacaaagtaaattctctaacttattgatttcgccttcgggcactatagatttggaattgaannnnnntctcaattatatagaacgctctatttgtatcacgatatatatatgttatgataatctattgttacaatcctaatagtcaaagannnnnnntagatgatctacatcgaaaagggataaatttagcgttctgcctttcaatatattttatccttaaaacaattagctaactataaatgatattttagaaaactaatataatttttgaaatgaagcgtcaatcatttatttttatttagccaagctcaaaggaaatnnnnnnttcacttctaaatacttataaaagttatagatttcataataatgatcagcactcccactcaagtgaactacaatgtttccaagatgtaaatatctgcgagaactattggttagcatccataacaacttaaagaacataaataannnnnntaagctgaacctaaccatatcaagattaagatccatagacctaagatctgttggatatattttaccag

SEQ ID NO: 147991 - DNA, 859 bp, Cannabis sativa
agggaaggttttccttttgcttacaataactataattggtaagaacatacattacatatttagaatacatgaaatgggggattgggacagcttgtcatatctctttgatacaatcccatgattgtcgggatttcctttgtgcttgagcttcacgatatcaactttgaaatagttaagtcttgatacacggctcgaagaggtaacttcactctttgctcgaatcatctgccccttgctctgctcggtcaagcagactttgtgcgtgcaaatgtgttgtttgaagtttgttcagaatatttctccagccaagtgtaaagaataacagacatgtgtcattagtacatactaccacatcatagtgcaaaaaatgggataatagaatgaaaattagtaacttactaaatagttgtaactaactatttactagctactaaaaaaataaaaacacataaataaaatttaaaatagaaaaaaaaaattgataaaaaatataaatttctaaacttatttgtttctaaactacttttttagaaattaatttttaaacttttattttaatactctcctatctcatttcattcataatatttaagaaaactattagtttgaaatatttaatacatacatatataatacataaaatactctcctatatcacattctcattcacaatacacattcaatacaacacacaatacatacatatatattactaaagtttaaaattttaccttattatcgcaatccgaccaccaatgccgaccaaaatttggtcaccacgcacaaccacaataacacaatcttatgaatatagaaaaaccctaaaaagatatataaaataaaaaaataaagcaatgta

SEQ ID NO: 147992 - DNA, 629 bp, Cannabis sativa
agggttgctaaaaataaatcaccaacatctgtttatgctactggtgtgtattctaatagtaaccattggagcaaaccgattggtaataagatcaaggttaatgtcaacggtgctatttttgaagctcagcaaaggtttggttttggttgcgtggcccgttattaaaatgatcatcttattgaagcagtttcagattctagagatggtgctgtgttgcctgaaattgttgaagtagttggcataaaggaagcgttgagttggataaagaagaaaggttgggatgatgtgattattgagacagattcgttagttgtggttcaagcaatcaatagctctgtccatatggcgtctcaatttggtttgttggtggaggattgtcgcttgattgtatctaatttaaagaatattttaatttcttttatttatcgatctgctaataaggttgaccactgtcttgcccgagggcctgttatttgtcaggttgtttgtttaatgaggtgaatgctcctgttgctttgaaaaatattatcatagctgaagctgttttttaatgaaatctatttaaaaaaaaaattaatatttataaaatttattaagtaatcatcaataaataatacttatttagaagt

SEQ ID NO: 147993 - DNA, 658 bp, Cannabis sativa
ttatatttgagacatctacttctggtgactttttcagtaactttttccggcgacggtgacttttccgacaacgatgacttttttgacgacttttttagtgatttttccggtggcggtggttttttcctgcgacttttccggcgccaataggtttttcggcgacttctcttgcgtcgatgacttttcctgcaaaacttattattgtttacaaatatgggatttccatctttttttacaaaaatatgtcataaaaaaacccatataaatgtgtaaaaacaaaaaaacccataaccccttagctttatttatttatgccataaaaaagtcaactcttaaaattttcccatacatagtgtaacttctactactgtatttggtattgacttgtattaatagattatgtaaagttaaaatatattttcagtaaacttgaccccaacaccgactacgggtcgggttcgggtcgggatcttgaatccctggtccgaatccctagtcacgtgtccgggtttgggtcccgagtctctgtagcgatctaggtacaagtctgtctcacggtctcagtctgagtccaggtcaggtccgggtccaggtctgggtctgtgttcggatccgggtccctgtccgggttcaaattgttggtttttatgccctaaat

SEQ ID NO: 147994 - DNA, 731 bp, Cannabis sativa
caaaattcttttacatgctccccaatgttttgtcgtgggagccttgaggaattgactcaatttgttcacagcaaatgcaatgtccggcctggtcattgtgagatattggagagccccaattacactcctatattgtttagcatcttcaagaatctgtccagaagtgagtgacagtttggtattagcacacataggtgtagattaaggctttgcttctatcatgtttgtcttgttgagtaaatcccgtatgtatttttgctgagtaagatgataggttgtgccatttctgaaagcctcaaaccccaggaaataattgaccgatcttagcttcttgagatcgaattgtttgtgcagattgtctatgatgctttgaacttgtttgaaatcatgaccagcaattaagatatcatctacatataccagtagcatgatgagtttcccatttttgttgctatagaacaagctattatcggctttggagtgctgaaatccttgctgcagtaggaactgtttaagctgttcaaaccatgttcttggagcctgttttaatccatagatggctttattgagtttgcaaacataatctgggtgttcttcatctacaaacccttgtggttgattcatgtagatcatcttcggtgatttctccatttagaaacgcattgtttatatctacttgctgaatatcccagttgtaatgagcagctagagtaaacaagattcgaatggtg

SEQ ID NO: 147995 - DNA, 1035 bp, Cannabis sativa
tttgttaatacgagatttagaaaatatataactaattatattttaaatgttatttttatttataattggtccaaatcgaaactttatttttctataataaattagagattattcttgaatagagtattcttagatgaaggttttactgtgtaagattattcttcatttaatgagtcaagatattgtaaatatgactcttctctattgtataagatgtattggttacttatttaaaataaacttagatactagaaaacttttaaatatgaaatattataatatttattatattaatccacaaaattagttagtatactagttttgttcaaatttaacatttaattaattctttgttaataattgataaaaagaaaaaaaaaatattacttttatcttattcatctttgtttatttcgaaaaaagaaatatgtttctcacaattcaaaatatagtttaaaattgcttaaaaaatgtaacgtcaagatatcttattcagcaaaaaaaaaaaaaagtcaagatatcttaaataacaaactaaagaatatagcctaaaaattttaaaaataaaatcatagtcttaaagttaactaattaaaataaacaaccaaatgtgtatgtgaaaaaaattatcttgaaataatttttttttaataaaaaataactaattgatatattatttacataaaaagtaactaaaaagttacttttttttaaaaaaaaaacttacaagataatgaaaattttggaagtaatttttccatttttggtaattattttagatttcgtacttatgctgacgtgacagtatttatacaaatatcttttttgaaagtatttttgtaaataaaacatattttaggtataaaattaacaaaatcttaaaaaaaaagtacactactttattctattacacataaaaaatggaaaatttgttaaaatatacttaaaaatttaaactattcttttaatataccacctttaaataaatactttaaatattctccaaacactctaaaactccaaaattacccttac

SEQ ID NO: 147996 - DNA, 1026 bp, Cannabis sativa
ttaatttataaggctcaaaataagaatgtgtatatatttgcacataaaaaatatttaaattatatttctttaataaaaatatttaagtgagatatacatgtaaatttactacacctaaatagtgtaaaatataacttctttatataatactagttggaacaacacgtgctacgcacgtataatttttttgaaagtaaatatagaacttttattaattttctaagtcaaaagacaagatttgtaaagaccgcttagctttaatttggaattttcaaataattagggttaattatgaaaataatttataaattctaaattattaatttatgatgatttatttgaattcacaatgcattttatatgtcatatatagaaatttcataattttgtattttcggtgcccggcaacattggaacgcggtgtatggcttagtaaaatcacatcctagtattttaagtatagcgggacaatagtttagacattgggaatgtagagattggtcgggattttagaatttcccaaaataccccttagtatccttttatgttgtgttagtgtgagaggggtaaaatagtcattttgccccatttttattttgtccattagtggacttggttttatttaatagtttgattttaggaattatatgatgttagtaatatgttagtaaagcatcatctattcttttcatttttttaaaaaaaatagaaacttggaaaattcaagagaaaagcatttctctctcaaactcactctctctttttcggccccccttagagcagctagggttggggtgtaattttctgaatttcaagcaagattcttcaaggattaggtgttcttgagttctaggtaattcttgactttattcttttatgtttttttgagttttaagaacttgaattatgcatgttttgagttgttgattactgtggttgctgctgatgtttggtatgcaattctgtagttaaaatatggttagaaatattgatttgagcaggttttgatagctagttagttggatg

SEQ ID NO: 147997 - DNA, 625 bp, Cannabis sativa
ttcaaaattcaaattgagtcgaatttactagcatattgttaatttaccatcgagtgcgtacaaaaggtttggtcaagcccaaaaccccggatagacagaaaagcacacttgcaaaaaacataaagtgaccaagagtcataagtttgcttggtaacttgggggcacctatacctgtacaaagtatttggtaaaaataaaacaaacacagttgcatgatgattataaatagagaatgaaattcattaaagataacaaaaacatgcaaagtcgggattaaaagctacccggtcagctagttgtttgaaaaataaaaaataattccaagtttaaagaccgcttggtcggtcactttgtcttaaaaaaggccttacggccgaacatatatataaaaaaagcagatagaaagggaaagcattcaaacggctggagtccaagctctttgtacgggtcttctgggttagtcggagctggagggtcgtttgtctgagtggaaggcacgtcaacatttcggctagaggtggaagtggtcgcttcggattacccgtaggccacctgagaagcgcagtaatcgagaaacatgtctttggaattgcccaagtaatcaaagtttgcctggggattagcc

SEQ ID NO: 147998 - DNA, 689 bp, Cannabis sativa
  modified_base (628)..(628): a, c, t, g, unknown or other
atttggctcggaagcaatgctaccggttgaagtgaacatatcgactcatagatgagagttttataatcaagaagaaaactaagaacttttaaagttatctctggattttcttgatgaaaaacgaactgagttgcaagtcactaatacagtgtatcaacaccgagttacaagatatttcagcaaaaaagtcaagaaaagactattcaatgttggagacttggtgctaaggcgggtgtttgtaaacatgagaggcgcgtctgcaggagtgttaaactcgaactgggagagtccatatgtaatcgaagtcgtagtaggaatcaaagcttacaaattggctcagctaaatggttcgctaataaagaactactggaacgtggaacatttgcgaccctattaccagtaaatatgatgtaactcacattgttgatgtaatattttaacttcagttatgaataaagagaattatttcttttatttaagtaattacaaagctttactctttaaaattacttaaggggcatttgtgtatgattaaccggaattcatttggaaatacatgatataatgcaaacccacaactttatttttttttaaatgtttttgatcaaacctttctgacaagaagggnatcaaaccatcataactttttgatttaaacctgtcttaagagaaaggaaaatcaaaagtta

SEQ ID NO: 147999 - DNA, 541 bp, Cannabis sativa
tgatgctaacccgccacaggctgctcaagctgcccaagctgcccaggattgttaaaacaggtttgcagaaatgcaagccaggattaatgaacaagatgaagagatctggcgtttgagacagcagggtgctcgtgcaatccctgctccagaaataccagtagctcttacccctgctgtgcaggtaggacctgtagctgcagtgaaccgaatggaacccctgtatgaaaggttccataagcaggcgcctccagttttcttgggaggtcccgatgtcatgaaagccgagaaatggctaacagtaaaaactagaatcttgaattttatgggcatcaccggtaatgatagggtggcctgtgccacctttcaatttcaagaagacgctctggtatggtgggacatggtgtccctgactcaggatgttactacgatgacttgggaaaagttttaagaactgttcaatgcaaagtattacaatgaggcagttagaagcgtaaaaagaaaagaattcactcagctgactcagaaagaaaacatgagtgtt

SEQ ID NO: 148000 - DNA, 1135 bp, Cannabis sativa
  modified_base (549)..(549): a, c, t, g, unknown or other
ctgcagagaaccttttgatgataccatggttcgcacagaaatcagtaaaggattggctgtcaaactgcttgccattatctgagactatcttgcacagtagtctgaactggcatatgatgttcttcactataaagtcgtgaactttctttgatgtagtggttgcaagtgattcagcttcagtccacttagtaagtaatcaaccgctaccactacgtactgcaccccacctttacctttaggtacttgcccgatcaggtcaattccccaaatggcaaagggccacagactttgcatctgtgtcaacttgttgggcggagctcttggtatcttcaaaaatctctggcatttgtcgcacttcttaacacaggctgtcgaatcttcaatcatcgttggcccgaagtaaccttgccttagaattttcttggataagctctgtccagcggcgtgatttccacagaatccatcgtgaacttcagataggagtcgtgcagcttcgtcttgagtgacacatctgagcaatggcatcgagaatcctcttctctacatgantccctctactatgatataccgtgctgccttccttctcatttttcgagcttcatttcgattatctgggagttccccagagttgaggtaggctgctattggcatcatccagtttggggatctattaatcatttcgatttcttccgtgccagtgatgcttggctcttcgaggaactagataggaaccaagtttgccttgtcacttacattgttgcttgccaatcgggccaacgcgtctgcagttgtattttcttctcttggaatttatctaagaccgtagcttttgaattgtgcgaccagatcgtgtattttggtcagatatgcttttttttttccccgagcctcgtattctccgaatacatgatttaccactagctatgagtcattgcagatttcaatgtgttcagccttcatctcccgggctagttttagcccagcgattaaagctttgtactcggcttctttgttagtgccttgaatttgaacttgactgcagtgtgcaggtgttgcccccaggcgtgacaagggcaatccctacaccagatagttgatcagtagccgacctttccacatgtagtttccaggtcgg

SEQ ID NO: 148001 - DNA, 560 bp, Cannabis sativa
ttaataataaaatatttaaaatggcataatggtaaaaataattaaaagcataacatttattgtgatgcaaattttacattatactatattgtgatctaaatttgaataactttttgttatgttacatatttgcatcacaatttggcatactattggagtaaacttttaacaaaatgtgctatattttgcatttgcatcacttatttacatttccattgaagatgctcttatagtgatgcaaattttgcatcatcttttagcacacccttaaagttcatttttttgttaagatcatgttcaatggaagatctaaaatttgtgttaaatttgtcataaaaattgagtttgtgtgtatacatatttagcttactattcttaattgtgctccaatccataagatgtaaaataaagaaaaaataattaattatattgatagtcttttaatattttattgagaactacatactaaaaatattggtttttattcttttattattattattattttttttttttgacaaagtgattaaaatcacttatgaatttacgacgcctacgtc

SEQ ID NO: 148002 - DNA, 831 bp, Cannabis sativa
ctgctccaactagcaatgtggggaacaaactacaacatagattgttcgtgacatttttggcttgcatgatagtattgaaattattcaaatgcgagaccggatctgtgatcccatcatatgacgagacgtgagggtttttaaatccctgggagaaaggagtattcatgatgtctggatggaatggctcgagttcctcattcgagtcatatccaaactgctttctttgctccccaacttgatacctcctaaacttatcctccaagtcatctattcgcaattggatatgatcttgcttctttggtggacttggcgaagatcaggttttttctagttcaagtgatcgcgaagatccagttggttatagatgctagcgaaccttgtcctactcataaactttgtcctactcatggacctcgtcttgcttatggacctcgtcaagcttatggacctcatccttgagtaactctcagttttacttgtgcttgtgctttctcgatcattattgcgacaagtactttctcctcctcgtgttgatcgactatgggttctcgtgcaccctgaggtaacactcgcctcttcacgtcctgtccttctcctttgggtatggttcgttgtatgccccctgttggggtttgtacgctctccttccctgttggttcgagaaggacgttggcaaagcctcgttggtgacccacgtgtcccaggttgagtcccaggatttccctcgttcccacgagggatttcttgttccctagttattggttgccttctgttctcatttatgtgagaaggttctggttgatcatcttgttgttcgttctcagggggacc

SEQ ID NO: 148003 - DNA, 533 bp, Cannabis sativa
attgatagcaattttaattaaagaaattctaaaatgcatccctctaaaactggtacactgatgcactcttatctgtttcgatattcgagagatttttttagtttaattttttttcatggtcgtgtacattacatctatttaagacatcttgtaaaatttttaaaaattcagaaaaatataatacgctgaaaataaggttaaaaaaattgatagcaattttaatcaagaaaattctaaaatgcatctctttaaacctggtgcactgatgcactcttatctgtttcgatattcgagagatttttttagtttaattttttttcatgaccgtgtacattacatttatttaatacatcttgtaaaattttaagaaattcaggaaaatataacacgccgaaagtaaggttatgaaaaaatttatagcaattttaattagggaaattctaaaatgcatccctctaaaatcagtgcactgatgcactcttatctgttctgatattcgagagattttgttagtttaatttttttcatggtcg

SEQ ID NO: 148004 - DNA, 849 bp, Cannabis sativa
  modified_base (782)..(784): a, c, t, g, unknown or other
gattgcattgaatttgagttttatttagggcataaaacccaacacttattgccttaaaccctaacttatctatttaccccatataaatattcattacttaaatagcatttaaagcatggcatcacaaaacacataaatactatggatgcttgcatactgcctaaaatggaaaacggtaaacggattatcacacaaacagtaaagaatttactctcaatacttactaaaccatgagtcgagcttgtctttgacgatgaatgtacatgttcggccggtctataggaagtttaaaaccttgacgctctgataccaaattgtaacgccctaaactaattaggcacgctacccaagatacttatgaaaccctaatcccctaaataagattactattgaaattagcacggaatttaaacgttaatcacaaacggagtaaaaataaaacttgtaataatttaaactttacgatctaaaagttacagaaattgggatcccaaaaaaacatttacaaaatattattacaagtcctttttctttcagtcagcctaagcggaaaaatagagtctcaaaaacacaacactcgtagaccccaactcgcttggtctgatatggcccagacatgtacattgatcgttcagctcatgcactcatggctgatcaacaacattcttacactttcttgcaaaatagagcacccgtgagccaagcccagaaagacaatataaaatatatcaataatatgctcatcatataacataagcagtaattgttgggttttatgcccnnnataaaactcatttcaatataaccagatttacttattaatatagataagaaataacatttaatgtt

SEQ ID NO: 148005 - DNA, 760 bp, Cannabis sativa
tgaatattattaattttaaaaataatgatattaaaaaaaactaaaataaaattaacatacgtaacttggcacgtaacatctatctagtatacataaatatatataactataaaggtgaatactattttttatcttatattataaaagttgccgttgagattcttttataaataacaaaataaattttgtatttttaaaaataataaaaaataatatactaagtttaatttttgataatttttttaatatagcaaatttaaagataatttctaatagtaacagatgtagaaaatataacaaattttatcattacacatttattattaagtttattttttaaaaaaaaaaaaaataaataaactatattttgtaccatttcaaagatatgtgatttaatttgttatataacaaaatagaggtctaattggtaatttttgtaaaattttaagtccaaaatagtattataggtgcttctagaatgtacttgttaacgtagatttttgttaactaaattaatagccttttcgcaataaattcactatagaaataaatgagtaataaataataaaataacaccagatattttgcgtgattttgtagttaaaatctacacgagttcttattattaggaatattttttgggttacagaatacaatatcagtatttgaataataatattttctctcttaaatttgctgctcctttcccatgaattttgcccttatttataggaacataggttggcatttattctttttg

SEQ ID NO: 148006 - DNA, 871 bp, Cannabis sativa
tacctccaaccaaacgccacctacaagtagtaaaataaattatttatttatatcatacaccataaatatttttttttagtaatgtgagacttttaaaatgtgacaaaagagtcatatcattacaaagtcttaaaataaattaaaaaaacacaaaatttaagaaaataaatataatagtataagaagttcattgagatagctactgttgtatccaaaatagggtattgtaatatttatacttgcaagtgcatgaatcgtttcggaatataatgttcatgtaagtacgaagttgaacccataagagacaatgtatgtataccgagaggtattcaggttgttcctgggagacaaccgtaataagtcatgactataaactaaaaccgttgttaggtttcaacctgttggcgatgcctgattaggcatgggcggcagtgatatgtgagtgccaagctatggtacgagctcgtttgattaggcgatgcgatatgttggtgttgggttttggcacgggctcatctgattaggtgatatgattatgcaatatatgggtgccaggttttggcatggctcacctaattaggtgatgcgtttatgcaatatatgttggtgccatgttttggtacaggctcacctaattaggttatgcgattatgcgatatatgggtgccagattatgacacaggttcacctgattaggtgatgcagttatgcgatatataggtgccaagttttggcacgggttcacctgattaagtgatgcggttatgcaatatatgggttgttaggaaaatatgagatatcaatagaagaataacaataagatgaataaaaagaccaagaaaattacaactctatgcaacaaaattacaag

SEQ ID NO: 148007 - DNA, 1218 bp, Cannabis sativa
ctgccgctcagactgttgatcctcgagcgcctttagaccaaaacgatccgtaccaagagcctgggactcctggtgtcttaattttttttctttttttatatatatgtctattcgaccaataggccttcttttgagacaaaatgaccgaccaagcagtttttaaacttggaatatgctttcatttttaagacaattggctgaccgggtagcctatatttccaggtttaccgtgctttgttatctttttctaatgaatattgttccttgttatgataattgtttgcacaactatgtttgttttgttttttttttcgtgcttgttatttatttttaccaatgctctatacgggtatagttgcccccaagtgactgagcaaacttttgactcttggtcacttgcatttcaaaagtatgatttttgtctgttcagttctttgggtttgagcagacctttgtacgcacttaatggtaaatttataacttgctaatagaattgacacaatttgagtttaaatagacatctttattcatttattggtcggaacatttttgttaccgtagtaacttacataaaagttattatattgatctaaatcgatctttagcttaatttaaacaaaacaaattacaataaaaagaaattgtacttttagaggtggtcatccgacctgagtactttgtcatttcacccgaacctttgggcatgatctgcccagaaggccatttacttaaagagtaaatgttctttagattttgtacttagaatggtcatccgacctggtacttttattggtagtattttcttaaatgttcctcattccaataccttggtactagaacgagtttcatgttttcgtcatactgtcccagtttgtatgctcttgattctaaaacttcgaccacctgatatggtccttcctagtttggtccgagcacacctaccgtgctttttttggtgttcagaaatactcttctgaggaccatatctcccacaaaaaattttcgtgcctttacttgcttattgaaatactaagccactttttgttgatgggccaccaactttaggtttgatgcagctcgtttttcttagatatcgtaaagtgattctgctaggagtgcatggttatcctcttgatcataggttaatcttcagtgggacggaggttctaattctacgggcagcatagcttcataaccatatgccatggcaaatggagt

SEQ ID NO: 148008 - DNA, 665 bp, Cannabis sativa
gtaagtgatgtaattttgatgaaaatgataataatgaggttcattgattaatgagttcataattaactaactaacataactaacattctatattttaagagaagcaatcttatggaaacaaaattttcaaaatagatcttttcaaaattaatagtgttcataaacaattgcatcaatgaaatagatgtttaagagcaattacatcaatcaaaaatgaaaaaaaaaaaaaaaaactcaaaatgattaggaagtttttctttttcataattaaaccatatgagaaaataatttaagcataagaaatgagatttgcatatgttttcaagctttcaaaacagaaataaacggcgtctgatgaatgatataagttgtgataataataataatgaatctgaactaatgattttataagtgacatacactttgaactatataaacataactagtgggaattatagaaagagaataaagtgtttggttgattaaaaatggacaagtatatatgtcttatactaagatatacatattactacagaaaaaaatatagtggagttttgctagtgacctcgttactaggcctatgttattatgttattagacctaaaaagaataatattaattcaaataataatttaaagtcaatgtaacaccctaactagactagg

SEQ ID NO: 148009 - DNA, 561 bp, Cannabis sativa
  modified_base (356)..(372): a, c, t, g, unknown or other
  modified_base (460)..(464): a, c, t, g, unknown or other
caagtaaattttctaacttattaaattctcctgactccactatagatttagaattgaactcttaattacatagaacgctctattaccaaaaaaaatagattcgctttgaattacttattgtttcaatctaaatagtcaaagatcctctatagatgatatacatcgagtagggacaaatttactgttctacgcttcaatatattttatccttaaaatacttagctaattgtaaatgatattttagtaaactaatataattacttaaataagatctcaatcatttctcgcattaagccaagtttgaaggatttcatcgtttcacttttagaagttataaaagctatagattctatatnnnnnnnnnnnnnnnnnactcaattatactaccatgttcttaagatgtaagtattgggccgatccaattggttaactttcaacaactcaaagaacacaaataatnnnnntaagccagaacctaaccatctcaggatttagatctattgacctaagatcaactaagtgatattgacttagaaaaatataacagtaagtttatgatat

SEQ ID NO: 148010 - DNA, 579 bp, Cannabis sativa
  modified_base (530)..(553): a, c, t, g, unknown or other
attttatttttaatataaatagaaagtcacccatgaatttctcataaaccaagaattttgttatatagacacactttatatagaatagatataaaggagagaagtataacgcggtggcatgacgccctaaaatcatttcacatacctccatctattctccccttaattctctctgtttttttaattttttattaagtttataaatattattaaattaattaattatatttaattatatactctagactatgtaagtatttacacatatataattaatattataaatatttaattattataaatatctaattattatttaatattataaatatctaataaatatttaaggtatttaattaatattaattaattttatatctaatagatatttaataatattagattttaaattagcgattctatgtataataatacatatacatatatatagacaagcgaaaagttacgtgcgaggcacgtatactaaattttagtttttaatttgttatgttatttgaaagtgatacaannnnnnnnnnnnnnnnnnnnnnnnttagttattaggtgagattattatta

SEQ ID NO: 148011 - DNA, 535 bp, Cannabis sativa
cgaacctccaagattttcagaagagggtccaaaagtacatcaacatagaggaggcccaaatagtggcttatggaggagactacccaaccgaagtgacaggatatgtacccggagttcaactctcgggaaccatacctcaggctactccaccgatgagcggtatacagttctctgctactccaagatacaatcaaagccaggcctttgctcccgcatcttcgcactacgagaacccctcgagggtaagaggacaagtctcgtctcactccactcctgttgcaggtaaaccgaaccttctcaaggctcccggagcaagaggtcctcaaaaggcagcagccagacggaggataagcaccaaaaaaggaggtatactccccaatacacctagtacacggagctgacggactcacaagaacgtgtgtatttcgccacgcggcagaatacacactaccatatagagatagttcccgaagggatcccaacaaaagatgcgagtaccacaacgacattggacacaacaccaatgaatgcaaaa

SEQ ID NO: 148012 - DNA, 586 bp, Cannabis sativa
aaaaaaaaaacatttgtatcaagtacactacatatcacaatatatgagaggtgcaaaattgcaatcattcatttattccacagctatacaacattttaaacatttgggaaattcgtagcaaaaattcttaaaaggttcattttgttgtagattagtttttaattttaaaaaataacagcaattgtctttaaagtcacattttttaaaagtccattaatcttaaatttaattactctgttaacttattaaaaaagtgccacgtgttgaaaccttatttgtccaaataataattttaatttaaaattaaaaaacaaaacaaaaaatatattttaaaatcataaaaattattataattatctttttctccttcaacacccaacccccactctctctgatcactataaaaaatcttagttttagtcctaacaaaatttgtaactacaagttaaaaagttgtcactaattataaattattattcttatgttgtaattaaaaagtactaggctaaaggtattagtcaataaaattataatttattgtgaataaatgtatttttagtcacaatacttgttgtgactaaaacta

SEQ ID NO: 148013 - DNA, 693 bp, Cannabis sativa
cgaaactaaacccgaactcaaacccagataaaaacctgtgactcggactcgaacctggacccagacccaaccccctaacccacacccagagctcgatccggacctagactgagattcagaactgaacccaaactcggaccaagactccaaccccgacctaacatcgaacccaaacttgaactcgaaatcgcaattggaactggaaccggactaagaataggacaccgaccacgacaaggacccaaacctgaacccaaacccaaatgaaaacatagacagagacccaaactcgaaccgcaacgaggacccaaaccgaaacctagactgggacccaaacccagaccagaactgggagctggacccagaatcaagatagggacttcggcaacggaactaggaccgggacccaagacccgatacaagactcggacatgaacctaggtaccagctcgtgactcggaacccaaaatggaaccagatcgggacccgagatcaggatctgaatttgaactagaggcttggaccgaacccgtagtcggtgtctggatttgagacccacccccagacctgaatctagagcaggaccctgatccgaacccagaccaggaccgaacctagtccctgacccaaacttggaaccgaacccgtaccctatgacccgaaattggaaccgaaaccggacgtagatcggga

SEQ ID NO: 148014 - DNA, 534 bp, Cannabis sativa
gagttcccattccaatgacatttcctgttaaaccattaccaaacgtgacctcaccacattgcattggtctgatattcactaaaaaaatccttgtcacctgtgatatgtccggaacaaccactgtcaaaataccacggagaaccacttttatcaaaaaaaaccagctagacatttttctttttcaatctatttttgtttcaaagcactatgtttcttttgaaaaatttttaaattaccaaaataatttattttgtacaaattttgcatggtgaaacatttatgttgaatatgccccttaataccacaaaatgacagattggaacaaatattcttacctgagatcttatcctttttgaacttattggagactttgcttctgcaaaagatatattagtagcagcatatcttaaatttgcagcagcaggtaaattcgctggaacactagatttaaaaaaaaaatccagaactttcggtaccaattgatccaagaccagcaaagcctctttgacctgcattctgaacttcctcaaaaat

SEQ ID NO: 148015 - DNA, 622 bp, Cannabis sativa
  modified_base (56)..(57): a, c, t, g, unknown or other
ttcagtgattgttatgtactaaaccatgctctccagactttgatatctactaaatnntgcccctcgaactttgatatgtactaaatcataccctttgaactttcatcaatgttaatgttagattttttgtttactaaaattggacaaaagtccttaaattcaactatctcaatagttcatggggcatttttaactaccttaaaagttcaggagcatgatttggtacatgtataagtttgggggaaaaaaataatcctaattagcctttttaaatgacatggaccttcaataatagagcaacatctagcataaaaataaaaataaaacctgttatattttgaaatttattattttaatattatcaatttattatttaattaattatttcttaattaaatgcattttaataataaaatttgtgctgaaataattttctgtaactacaaaaggtaattatgtaacttcagaataaactaaaaaaataaatagtgcagaaacgtaaaagcatataaggttattgtacgcagttttaacaattcttgtagattgttactagttcacgaggctacgcccagagataagatttattagatagatctcaaatatacaaaataattgactt

SEQ ID NO: 148016 - DNA, 612 bp, Cannabis sativa
tggaggggttcgcaatagttagcttctcagaaaggtcaataacctccccggccggtgccttttccttggaaggggtcgcctcaccggccctagatttcttagccagaggagatgagcttgagtttcctccaactctcttcttcaaagcattaagcatcttctgagacatgtttgtacgaaacaaaaacaacatggttagaggaaaaagagcatcagaagcataaagcatgatagtcaaaaagtttaaaaacaagacggaataccatgcgaaacaattgtccgagcaagacttgagagtccatcatcacctgacaagtcccttatctccgccatgacagctttctcttttcctagtacgggagaagatggccgagcaggtgaactaggctccctaattcgaatggcatgttcaacgggtctgggctgggccagaagtttcttcctccttttgagcggagtcacctgttgttcctcagcctcatcttcaggattcaagggctcgtcagtgtactatttggctcttgcacctcccttcaacttagcttcacacttaagttgaatgagttcatcctcctgatgagctctctcagcccgtccagcaccagatttcct

SEQ ID NO: 148017 - DNA, 595 bp, Cannabis sativa
tattcgtattattcatccccaccggcatttgctctgttgcaaagaaatgtttaactgtatggaccacatcattgcatacaatggaccaatatttctgaaaaaaatttggattcatcccgtcaggaccggggacttatctggatgcatttgaaagactgcctctttaacttcttgatctaatataggccgaagtaaagcctcattatgttcatctcggacattaggcacaacacagtccaacacctcctcccagctagtaggttcgaccgtaaagaggtccttatagtactcaaccatgacattctcaagcccattatcccattgtctgaagttaccctcgtctttcaacatagcaatgtgattatttcgttttcgcctagaagctttagaatggaagaacttactattttgatcacccgctggaagccataactgtttagatctttgtcaccaaaaaacctccctttggttaagaacagcaaaaagctcctttttaggctcgtaaaataatctcttcccatcctcatctcgtcgcttgttatattgcttcaacaaccgattgcattgcttaatgcgagaagaaaacttgccaaac

SEQ ID NO: 148018 - DNA, 689 bp, Cannabis sativa
tatttcttagtgggatatatattgttaaaaataaaataccgagattaggcggggttatagaatttgaccattttacccctagtcttaaaaatgcttaagttgtaagttaaggggaattttagtctttttgttaaatggagagttaggtggctgcctagaaatgtgacacctagcaactaaatattcagcaaggttaattcaattaaccttagttttattttagggaaaatatagagaaattaagaaaaagtcaagagaaactctttctcttcgagcagcaccaaaccaagcaggaaccaactgtttttagttgttttctggaaattcagtagagattcaagggttcttgaagctaaggtaagccctagtaacaccctcctttagtttttgaattttatggttggttgagtatgtgattttgttaattggtggttgttagggttagaaatacttagggtttggtttttatgatcattttaggttgattaaaggttctagtagctggttttaccactttgtgttgaatttatgcaagtttgagatttgaactcaaagctttgatctgtaatggcatgttgagtttcattaagtttttctgtgaactactggttgggatttattgtgtataccctaattaggtactctgaaaggtttggttgcatttagtggagttttgagcaagaaatggg

SEQ ID NO: 148019 - DNA, 594 bp, Cannabis sativa
actttatattataataaactctccaaaaatatttattagaaaaaataaacatgacacaataaacaaattatataatatgagaaaatgataataagtttttttttttgcacatattttgtaattaattgaaataatgtatacaaaaaagtaaaatgcccaaatttatatttatataaatatatgatataaattgaaaaaagatatcataaattgattattgttatgagtctctgcccaagccccaatgtaagtattttgttaaagttattgaattttttcaaggtcacgataaactaaatatatatttatatatactcatctgactaaaacaatttcaagaatcttttttctttttctttttatctatatatctatacattatatatgtatgtatatatttttatatgtttattattgaattcatatatatacatatattgtatgcttttattgtttatctatgatatgatagagaaaattcgtataaattatctatatccagaagattgtgtatcctcgataaaatattgcatatatcctgaagattatgcgtccttaataaaatcttgcaaatatcttgaagattatgcaaac

SEQ ID NO: 148020 - DNA, 526 bp, Cannabis sativa
agttcctggtaaaataacttccaacacataatacttcagggagttccttcggtcagtttcctttagcatcttcaagtcttttcttttgggtgtctttgagtgtcttgttgactgtttcgacttgaccatttccttaaggatgtgccactacagagaaactttttataatcccctggtttgcacagaaattagtgaaggactgactgtcaaattgcttgccattgtccgagactatcttacatggtaatctgaatcgacaaattatgttcttcataatgaagtcttgcacttttttggacgtgatggttgctagttgctcggcttccgtccatttggtaaaatagtcaactgcaaccactgagtagtctaggggtgtacgtcggtcggtttggtcgggttatatcatattttcattaacccaatattaatatcgggttgtaaatatttaatcgtaacccgcccaatgaaaatttagaaaaatttcaacccgcccaatgattttgtcggtttggtcgggttaacccgt

SEQ ID NO: 148021 - DNA, 525 bp, Cannabis sativa
agccatattgagggagcactgcctgggcgattagatggggccattgtcagccagcatgtggaggtggtggccgactagaatgtggattctatggccagccagcttgcttaggacatggtcgaccaaccttctaaaggcctgattgatgttgtggttggatcctatctgcattcgattggctttgcccccagcgtaattactgtagagcctttgtgcacttttgtcattagctatacaacttctttcttggaaatgctccttagtggtgttggtgtaccacttctgtgtgttatgttgtgcacgattggacaccttctagtcgttatcccagtccttgctctctagcaaggtctttgtttggaggtaagctgcgataggtgtcatccatgttggagtgtcatctagcatgtcgacctcctctaggacaataatgttgggttcttctaaaaactggatgggcactgatgtcgcccaattagttacactgcggtcgcggtagtaaacgggctatatgtcgtatccaca

SEQ ID NO: 148022 - DNA, 542 bp, Cannabis sativa
catatctctcatattttaaaaatagtaattgagataattcagtgtagacttttcttcagtaatataactttctggtaatctcaaatttacaaagttataattcttctctggtagagcttttctttacaaccgaagctggcatatccttgcaaccaatcactctccccacacaggctttagtagcaaccacatcttctaacgttatatcttcaaaaagctccaacatttccatctccatattgctatctctttccagcagtttatctcttgcttcatctctcaaatccatgcaaatctcttttcctttttcccccattctcaagacactctcttcgaacaaagataagcagtttgggcaaaaaaccaacacacaaaaactagcagggaacaagactgaaaatcacataaagtgaaaaggcttacaataggaactaggggtgagcaaaaaatccaagaaaccgaccaaaccgagtaaaccgaccgtccgaacaccgaaaaaaccgacaccgaaaaaaccaaaaaccgaaaaaaccgccttcggt

SEQ ID NO: 148023 - DNA, 618 bp, Cannabis sativa
ggggctaaaactcaagagaaaactcaaaaaactgccaccatagtcactaatcagtaccaggtgctgatgactcaagaacaaaatggagaagaaacaactaatgtagcaaagatacagagtatcataggaggggaggggggaggacctcctactcctaatggataggatcttaagttggaatgtccgagggatcaactctcaacaaaaacaaagagaagtaaagcaatttattgctcatcataatgttgggttagttggtctcctcgagacaagggttaaggcctccaaattgggggccttataccaacaaatgtttcaagggtggtgcttcacaacaaatattgcatggcacaaaggaggaagaataattgttgcttggaatcctcttcaattccaagtaagtatcatgaaatgttcaagtcaagtaatacatttaggaatttgtacagttggaaataacttacaattccaattatcttttgtctatggcttcaatgatgagatgggaaggaaagcgttgtggcgtgagctaaaagaactaaacacaaaagaaccatgggtggtgcttggtgactttaatgcaactttacaaatggatgaaagaataggagacaaagt

SEQ ID NO: 148024 - DNA, 953 bp, Cannabis sativa
tcttcaattacgtaacacttatatctgcagttttgcttttatttgaattttgaagttaacatgatatataatgtatatactgatgaaatgcatgaatgaaaccgagttttgatcaaccaagtgggatttgggaaatatattagtaatattactatgattttatttatgagatatttagaagatatagatgaaatatgatatctttcgaaaattggaactttgttcatatgaaaaatacctttgtgaatttagggctttatgatgtcacatatgaaaagggaaattcataaacaatatgcttaaatgttcttgacctcacttttagccaacgatagtgaatctaattttgtaagcgacaagttgtttataacgaaaggaatataataaaacaatataaagacacaggaattttatagaggttcagtcccgagcagttcggtaatagcctaatcctcgttacttatattgacttaagaacaaggagaaatgttcattttcttatagctcttacaacagtgtctctgaatatgaattcttagacaaaatctctcaactaaaatgttttcgactctttgcccagtgaatatgcatcactatttataaggctatgagcttagagagaaagtattttccttctcgttacaattaaaataagcagaaagattgcatagtaaatacagaatacactgatcgtgggattcagacagcttgcgatatctctgtaatctgatccccaagttatagggatttctttgatgactcacgatgtggaagctgaattccttaagtgtttgtcgttctccgcgggttgcttattgcttcgtcttgagcatgcacgtgaggtatcttgttcggcctgtatcttgtgaggagatacctggagtcggttccacgtgtcaccatcgcatgatgccacatcagagtgcaaaaattgggataacatttacccccca

SEQ ID NO: 148025 - DNA, 651 bp, Cannabis sativa
aatagtgtttgttttattttttacataatgctttgtacaggtataggtgcccccatgtgaccgagcagacttatgaatcttggtcactttatatatttttttacaaatacactttcttatctgttcggggttttgggtttgattaaaccttttgtacacacatgatggtaaattactaacatgctaatggatttgactaaatttaaattttgaaataagcatctttattcatttattgatcggaaatatgcttgctaccatagtaacttacatcaaagctattatgctgatctgatctgatctatagcttaacatgaaataaaaaaaattgcataaattaaaaatcgtactttcaatggtggtcatctgacctgagtacttgaaaattttatccaaacctttgggcgtgatctgcccagaaggccattcacttaagagcaaatgttcttttgtttcatacttaatatggtcatccaacttggtacttctaatggtagtattttcttaaatattccccattccaataccttagtactagaacgatgtgcattttttcatcatacttacttaatttgtatgcccctgattcttgaacttcgaccacctgatatggtccttcccagttatgcccgagcacacgtgtcgtactga

SEQ ID NO: 148026 - DNA, 994 bp, Cannabis sativa
tggtcggaccatggggtccgatggtcctaaataactgcaacatagacgatcataaaaaataaattaaaaaattctgaatgtcgaaacaaatagttggtctactaaaattctcttcaaagagtctaatgcggaaaacttcaaataccatatgtacaaaaataattttatccaattcttccaaattcaaaaaatttcaaatgtagatttggactatagtattcaatctcatgaatcaaacatgacataattaatatagaggtgtaaatattattacacatattaaaaaataaaaatataatttaaaaaaaaaaagataacctaataaaatagagtggaaaaataaatttcattactaatatatatgttgggtccgccccttttgttgggctgggaccattaagggcttaagaaggcccatcatttgcttgttcaattaaaagaaaaaaaaaaagaggaagcaagtgttgtagtgcttcgtaagcatcaagccaaagagaaaagaaagaaaaaagaaagggaaagaagagaaagaaagctagagagagaaaggggttttgccattttgcattgaagatcaagtggtagattctcatccattttagctcaaattttgggtggtgaatccttgcaagatgctctaccaatctaccggttccgatttggcgattgtcctctctaaggtgctcttctacaatacccacttagtgagacccaaacttttctatttgtgtatccatcttttgagatgatgatgaaagttgtattggtgatccaagattgtttaatcttgatgttgttgtgaggctctagtttactagagaagaactttgtaatctcattattaaactttggtgatagtggatgatttgagcggactaaggtcccgtgatttttcccgcaatgggtttccacgtaaaaatcttggtgtctcacttttattcttgatttgtgtattttatattgcttgtggtgctttggttgatatttaataatt

SEQ ID NO: 148027 - DNA, 705 bp, Cannabis sativa
atagacgttgagatacaatgttttatccactaaaaacggtagtcggaggtataaccaccataaccactacctctaccttaagtttaccctaaaaaatgaggaaaaatgtgatatcttcaggtatatagttttatgtatgaaaaatagaagatttagaaacaaaaatgagctaaaatggtaaaaaatggtgaaatgggggtgattttctatggtgattggcagagagggtttgggggtttctgggttggctgatcgaatgagaaagatgaaagactgggctagggttataaacctttttggcgtcagttattttaaaataaccgacgccatagggagcgtacactctatgcgtcggttatttccaaataattgacgccataagtggcgtaaaatttctttctaaaaatttccaaccttatggcgtcgattatttattattatgctgaaaaaagcgcatctaaaggcttgttttgtagtagtttttacactcttaatattagtaataatagtagatgttactcatagtaacaagtaactctcccaaatgtgttacaaaataatgacaactaatatgtattatcatatgttatatattaatttgttgcacatatttagtctatatattatggggtgcactcttaatgggtattacccatgaatgggtaaaattagaaaattttgagtttttatacttaatttttctat

SEQ ID NO: 148028 - DNA, 603 bp, Cannabis sativa
acggaacatgataatgatggggcccatgatccaacaagatacgtgccaattgtcgagttggagaatcaccgtctcaggcgccgcctggaggaggcgaaccgacaaaatgctgagttggaacgggaggcagctgcggccaaggcggcacaggagaacaacgtgcaaaattaacctgatcttggagtgagaagaccacgaggcagacctcattgctcatgaactaggaggcaggagacggctcaaaagaatccttaaaatgctcaggaagaacaatatggggaaaccaagggtccccctgagaattaacaaccaaatgatcagccagagccttctcacagaaatgagaatagaaggcgactagaaaccagggaacaggaaatccctcatgggaacgagggaaatcctgggtcaccaacgaggcatcgccaacatccttctcgaaccaacagggaaggggcacatacaaacctctgcggggggcaggcaacgaccaatactgaagggagaaggacgtgacatgaagaggcgagcattacctcgggacgcacgatgtaaagcccgcttagttaatttggaaattagcagttgtttatgattaattat

SEQ ID NO: 148029 - DNA, 813 bp, Cannabis sativa
tatttttgaaaattgaaaacaacattttgatgttttttgttttttagttttttaaaactcaatttttaaaaaacagtttttgaaattttttgtcaaacgactcctaatagttgttaaactgtaaagtcaaacagcctgtgttttctgaaaactgttttcaaaaaataaggccaaacaagccaaattattttcaaaaaataattttctgtttttaaaaataaaaaataattttttagttatgatgtcaaacatgcacttaggatatattttacctaatattttttagttatgatgtcaaacatgcacttaggatatattatacctaatattagtatataaaatgtttaatggtataattaattgttattattattattattaaaatcaaagattagaaaaaaaaaataaaaaaattaaatacataattatatatttaaaacaaaacaatcaagaatcatgtatataactctaaaagaaaaaagaaaattaatttggaacgaattaataaactacaataatagctttcaaaaaaataaaaccacataatcatatcacaaattcgaaacaaataatatctattttatataaaatgtgactatataaaagaaattattgggtgattttttttaaataaaaaaaataataaattattagatgttgccacgtaaagggtcagcatccatgtagttagttaaacctaaatataattaatctacataaagggttgcaattaataataaatttgttcatattgtttatttttttattaaaaaattatttttaaattttgatatttagaattagttaaatttt

SEQ ID NO: 148030 - DNA, 537 bp, Cannabis sativa
tatatataaatatatatattagggcggacgtacggtatggcattggcccctagatatattttatacgattaagtttgtatatgttatttgatttttttttcttttggtagcttatatatgtgattcaatttgttttgataattaagtacatggacatctagtttgataaagtcaaactaaaattatatatacgatatgttttagatttacttttatatatttaattttataaaaaaaagaaaaattttcttttttttttttcaagatatttactttttctctaataatattaatttattttgtgagatatgctattttagatttttccagttatgtataaaatgataattttttctcttactctttcattttttatagctactacaagtacaaagtgatcttttttcaactgccaatatagtaaagattatacattctccaaaaaaataaaatgaatttttaggtaattatttgttaatatttattgaatgagaaatcgccaaaaaatttagtataaattcacttattaatgacttt

SEQ ID NO: 148031 - DNA, 629 bp, Cannabis sativa
tggaaattgcacgtaggcgggttggctacaaatgaactttctggtgcaggaattgcccttgtcacacctgggtagcaacatatgcacggagctgtcaaatttgggtttaaagcctccaataatgaagcagagtatgaagccctcattactggcttaaaactttctcgggagctgcatgctaattatatcgaggtcctgtagttattcacaattggtagtgaatcatgtttcatgagagtacgaggcccagggagagaagttgatggcttatctaagcaagatacaagacttgctggcacaattcaaggcttacaccctcaggcaaattctaagagaagaaaacacaactgctgacgctttaccctgacttgcgagtagcatagtaacagaaaggccaatctagtccctattcaattcttagaagagcccagcatcaactgtgcagaagaaattgaaatgatagagacaacaccaaactggacaacacccatagcaccctacctaaatactggagaacttctaaatgaaagaagcgaagctcaaaaagtgatgaggaaagatgcacggtatatcatagtagaaggtgttatgtatagaagaggtttctccatgccattacttagatgtgt

SEQ ID NO: 148032 - DNA, 538 bp, Cannabis sativa
attttcattgtattatttcaggttatattttttgtcagtttattcagtttggtttgggcggtttattcgggttaggcggtttgtaaattttgttgaacacctctaggttacagcactgctacgacaaatttaagaggagtgctactaccgtctaacctcctattataattttttagtcaatttttgtgcccgaaaatacatgtcaaaatattttttttttcaaatttattttcatgacggtgttcgttatgcttacaccatcatctcggtaaatttttgaatttttttgaatagttatagtacaaaaaatacgtttgtaactttttgaacactcgtggtaataaaccaatatcacgaactctgtttttggtactgtaaactattcaaaatttttaaaaaatttacagggattatattgtaaccagggccgaccctaagaatatatgagagaaaaatgttatgagatttgaacccatgaccttgtataatatgtcatacacctcaaccaactaagatatgaatatttattgtttataat

SEQ ID NO: 148033 - DNA, 505 bp, Cannabis sativa
caaagctctctaaaatcactaaaactcctcgattcaatttcaaaataccaatccccagctgctgcccaaggaaatcgagagagagagagggttgaagaaagagagatgaacactttttctctaaactttctttgtttcttctaacttaagtaaatagagattttcttcttttcttttcttttaaaacactatcctatagtcagccttaattaattcaaataagaaaaaataaatcttgccaaaagaccttcttgcccctcaagccaattaaataattacaaactcccaagggtaaattggtcatttaccaaaccccaaaaattctaacacctctaatatctaacaatgataccccgataataaaattttaaacatataaaatgtgactctctaaaggcccaacgtcgttttccatagcttccgaacaacaacacagagattgagaaattaagtaatttacataaaacaacataataaatatatatatgaacttaattatatttcc

SEQ ID NO: 148034 - DNA, 655 bp, Cannabis sativa
tttccctctaactgcgttgttttatatgtgaggagatgtcttagaagatgattcaagccttgaagaaaagagtaggggacagctcgggctcgtctcctctagccaagaggtctaagggtggtgagactccgtctaaggagaaggcgctagtggacgaggtcattgatcttttcaaggagcgacctgcggtggaactcccaactcagaaggtctcaaagtccaagagttccagaggagagaactcggacggacctgaataagttagggctggatccgaacaaattagggccgaatctaaataagttaaggccccttcgacaaccctggcgctgtgcacggaggctaggagaggcaaagacatgcttcaacactatttgacccagtcacttcctgaagtgaacgaccagctgttcggagtggaaaacgagttatccttggaactggtcttaggaggagttttgaaggaagttactcaggtaaaattccttctttttatttcattctcttttggatagctcgggttttaacacatttgtcgtgcaagttgatgtgaaaatggcttatgcttactcttgagccaaatcagttactgtcaagaaccttgccaccaccaacacgatgcagagggatctggacttggccaagaaggaaactg

SEQ ID NO: 148035 - DNA, 566 bp, Cannabis sativa
agcccaaattaacttagggcctgccatgatgcagtgaatgagggaaagcttgtgcctgaagaaataatatttgctctcttgtctaagagacttgaagaaggctattgcataggtgaatctgggttcattcttgatggaattcctcgaacaagaatccaagctgtaagctccaagaaattgggattttataattatcttgtttgtgtttgtatataatgtttaattgtttgcctctgttaatttttgctgcaaacactgatttgtaaattgagttgcttttcatttcccataggagatttttgatcaaattgcggatattgatttagctgtgaatttcaagaggacaaaagagcacttggagaataatttaaaaaatgtcaaaaatacatgggaaagaacaacaatgccaattttaaaaatctaaacttgtacactcaaaattgataactagtctccccttctactgattttaaaatactctggaaagagaagttcattaactatgcaaaagctccatatttatatatatatttatatatacgaacaaattacttttatatgaattt

SEQ ID NO: 148036 - DNA, 501 bp, Cannabis sativa
  modified_base (469)..(475): a, c, t, g, unknown or other
ttaatctgtaaagataatatggcttgaaaaaaatgggaaaattcatttttatttcatttaatatgtatagaatattttttttcttttttgaatactatgaatttattctaattaatttttgttttttaaaattatttttgtaagagaattattagtttggtcaatactatatttacatgtgtcactttattgatcaacttattacataacgataaattgagtgttaagtttagaaatttaaagatatcaataggaactataatgatgacatcaattttatatgactggaatataaaaataatgcaatatgaaaaaatttgattcataatctcaaacctgtctcttcttttacgtaatctcacacctgttttttttttttttgttcaattcataatattttattcataataattttttttttattataaaaaacatatttttcctatattcttgttaggttttatgcccnnnnnnnaactccatttcaatgtaatctatttt

SEQ ID NO: 148037 - DNA, 697 bp, Cannabis sativa
atccaataaacaattggattggatcgaatgggtccaaatccattggatgtgattcaatgaacacccctaatcgctgtcatcacaaaagaaatattatgtgataggtatatagattttctttttcaaatatttacataataaataaataaataaatacatttggtttagatagatattttataaataaatagttctttaattaaaaataaacaaaatagtaaaaaaaaatttctctaataatctatttaggtttagataaatagatttttaatgcaactttcattttaataatatgtgcaataatttttaattattacttttaatatcaaaactttataaggagataaggagatcgtctattattttttattttttaaaattaaaatttagtggtttaaataataaatttagtgtatttaaataacaaaattattaaaggaagtttaaattgatttggactaatatattgagccaattcaaacaattgaagatggtactgggaaggaataagtctgcatccacctctaccttggttcccatagaacctcttactgtgacccgagccacctaatgccagaagagtcttcctcttttgattaatattggaatcaccactgtaataccctagaattaagaaatggattagcaaaactctaattagataattatgaataagtgaggaattatattattatat

SEQ ID NO: 148038 - DNA, 796 bp, Cannabis sativa
tatcatctatagtataataatacaaataaaagttgtaacatatgaggagttataaatctgaaaatagattgtaacttaaggatcccaattgataatatgtaattaattaagttattacatatgaaagttatggaatcaataggataagtttctagctgttagaaactattaaaatactgaattacatcatttaaatttgtattgagacattgggaaaaggttagactcggagaggagttacaaaaattcaataatgagtttttaggaaacggttattttatggttgttaatgtgttgttttatggttgttttatgaacaccttgaaccagttttttaaaacgtccataaatgtacatgaattgattgagcatgttttcagctctcttgtccaacgtttttatcccattaaataccaattaaagtgctggtaacatttatgtggtgaaaagactttgattttcatatgtgatcctcaaaatactataaatagaggtcttgggttctttttgtaagacaacaaatttttatcaagatagcacattgctagaaacactttaggcttgataaatccagaaatctatttccattcttttcttttccctaagtgcttgtggtaggagaaaataagcttttggacgaaggtgtaagaccttgttcaagtttggtgattcccctattatacacttgtgtggtatgtgatattgagattactctcacatctcttatatatatttatgctatttatatattgtgttttatgtgtagcttattgctttgagttgtaatccctctctt

SEQ ID NO: 148039 - DNA, 1353 bp, Cannabis sativa
ctttctaagtgacaccatcctattgtcattaagataagaaagtgtttgtggattcacctgggacattatcgctagccttggcatgatcgacctcacattcactttaggcgaggtgccattatctgctactgttatgcaagacttcttagtcattgacctgcccttggcttacaacatattgttgggtcatccagcactgatgggactaggggcagtcagttcgatcaagcacctatccttgaaatttcaaacgccagatggcgtgggagtggtgcatggcgaccaaatgttggctcgcgattgctatcgcatagagttacagcatagaaaggtcgatcatcagttgatgatgatctggcaggagataacgagaaggaatacgaagatcttgatccccgagtttaagatgaaagaaacctgctaaaacaaatcaaagaattggaagaggttaatctcgacccaggaaatcccacaaaatgtgtatacattgggaagaacctggacgagcagctcaaattacagctaataaacttttggaaggcgaaccaggatcaatttgtctagagccatggagatatgatagggatcaaccctaatattatctgccatcacaaaaattgttatccaagctacccagattagagacaaaaaaagaggcccttggattccgagaggcaagtggcactaaaacaggaggttgacaagtgattagccaacgactttatacgcgagttgttttatccctcatggatagccaatcctgttctcatcccgaagcccaatggaactggaaaacttgtattgacttctctaatctgaataaggcatgctcaaaagacttttttccacttcccaagatcgaccaattagtggatgaaactactgggcacgagcttatgtcatttatggacgcatattctggatataactagatagaaatgtatgtcccagatcaagaacattcaagcttcgtaaccaacatgggactctgttgttataaagtcatgccgttccggcagaagaatgctggggcaacgtatcagtgactagtaaacgaaatattttcaaaccaaatagggtgcaacatggaggtttacgtcgacgatatgttggtgaaatcgataatgagtaaggaccatacctcagacctcgcagaatgttttaaaatgttaaaaaagtacagcatgaagctaaacccaaaaagatgttccttaggtgtctcctcggggaagtttttgggattcatagttaatgcggggggtattgagacaaatcctaaaaaaatcaaggcattaatagacatgccatcatcgacaaatcctaaggagctacaggccctgacaggaagaatgg

SEQ ID NO: 148040 - DNA, 930 bp, Cannabis sativa
aatcaggatagggacctgggaacggaactatgaccgtgacctaggaccgagctcgtgacctggcacccgaaatggaactagactgggacccgagatcgggatctaaatatggacctagggcttggacctaacctgtagttagtgtctggatttgggaaccagcgccggacccgaacctagatcaagacccgaacccagacctggacccgatcccagtaccagatccaaacctggaccttaacttgtaccctgtgactcgaaattggaaccaaaatcagaagtagattgggacccaagaacgggaccgaaaccaagacattgacctggacctagaaccgttaccagacttggacgtagacctgaaactataaccggaccaggacccagactccaacccagacctagacctgaaccgggaaccagacttggatcccaacccagatctggactcggtgtcgacactggaccggaactcagaaccaaacatcaaaccagactcgggacacagaaacggggccgggacctagaaccgcaccccagtctcagtcccgaacccaaactcggacctgggaccggggacctgaaccagaaccagaccgggacacgtgacagggatccagatttgggactcagaacaggacccaaacccggacctggacccaaaccgggaccctgacccagactcgggacccaaaataggaacctaaacaagaactgccagactaggaccctcgaacaagactaggatagtgaccaagacctggactcaaacctagaaccgaactcgaacatagccccagaaccaaactgagaccgaaactcaggcccagacactattgtgtacccagaccaggaccgagagctggacccaaacctagacttgggacttgatcctagacccagacttaaagctagatagggatttggata

SEQ ID NO: 148041 - DNA, 629 bp, Cannabis sativa
  modified_base (240)..(249): a, c, t, g, unknown or other
atcatgtgttttagagaatgacaaatccttttcgattgttgattctatatctactaaccatgtttgttcttcattccagctgcttgaaacttgggattatttaaatcaaggggagttaaagttgaaagttggaaatggcgaattagtatcggtctaggctaagggaaaaagctcgcctcaagtttcaaaagaaatttttagtttcgaaaatgttttgtttattccaaattttagtagaannnnnnnnnntgtttcatgtttacagacacagttttatcaattgaatttttcgagttctatttgcactatttctcgtaatggatttcaattatgtgttgcttacatggaacacgggcttcatgttttgagactgcaaatacaaattacttttaacaacgaacttttcaatgttgctaaacctagaaaccataaaagaaaagagatcgataataatgatgaatcatatctgtggcatttacgactaggtaatataggctatgacagacttcataggttaaccaaagatggtccactaaaaaatgtcatcatgggtgaattaccaatttgtgaatcttgcctagaaggaaaaatgactaagcgttctttctctgcaaagggagagtgtgcca

SEQ ID NO: 148042 - DNA, 1041 bp, Cannabis sativa
  modified_base (126)..(135): a, c, t, g, unknown or other
ttaatagacaactgacttgtcaccactgacggactagcatcagcgtcagcctgagtcataataaaaagttacctcaggttttgtgtagtattcttcttaggttcctctttcttggcctgaggacannnnnnnnnnaagtggcccaccatgccacactggaagcatatcttggcccaacattcaccctgatggtgcttcttgcatttaggacacccgggataagacctgaatgaggacccgcagccctgacggccatctctatttccccagaactttctattaccccctgatgctccgaaagcctcaaccttccgtttgtgatcagggttgccactgtcggtcccctcatgacattaccactagtaggagggtttgattctgtgacgacatccttcgcagtctactcttttcctacatgttgctcagcctcctcagcaattaaggctagctctaccaatttcttgtacaaagtgtcatgtgaagtgataattttcaagtcccgatagattgtggcatttagtcctcgaacatatttctgtttcctggtgaaatctgtgggcaccagatcaccaacaaacttggacagccgatcaaactccagagtgtattaggccacagacatcttcccctgagtaagtttcacaaagtcttccatgtgggaagtcctcacagcgatgttataaaaattctcttcaaatagattcttaaattcttcccaagtcattacactgacgtctctggtctgccccacaatatcccaccaggcgcgggcatgatcttgcaacatgaaagctgcacaattcactctctcagttcccgtcactcccatattatcgaggatacaggtgattgtgctcatccactgctcgactttaattatatcggtacctcccagaaaagtcagaggttgcagcttcacaaaccgctcaaacacaaaatctctatgtggcattataaacccctggttacctaccactggcacaggtgctggtggttacacttgctcaataggggcagccagtgctggttgccttaatcgac

SEQ ID NO: 148043 - DNA, 541 bp, Cannabis sativa
tttgggcttcctttcttctacggccaggataacttcctcttgctcgtgctgcgctgttcgggcatacctctaccgagcttttcaataatctccagcaatatgcgggcctccaacgatgacttgcagatgtccatctaccggtggaggtagtaaatcttggatattgtcgttcctctaattgttaggctatttttagcctatgtttttggttactttttatagttgttttccttcgatattattatatttagaatagaattatacttgttttctttagtttcaggtttcacacttggaatatatcaattgatcaaatttcggaaaacaacaatctatagaatagagaaaattctgctagaaaataaagctgaaacttcaagcttaaattttactatgttctgatcagattttggaaaaaatcaaaaaacaaaacttttagatttcttattcttctttccaacgcatcttgaattaactcatttggagttcgtatgtaaaagttatacacattttactaaaagatgctgaagctgtcaaattt

SEQ ID NO: 148044 - DNA, 537 bp, Cannabis sativa
cacaagcaaaactggccagcaactatacttactgctaaggctggtatgtggattgatattgtccgcagaaagaccaagatggatattcctaggttcattgccaaattcagtccacctagcattaattgatttccaagcgggtgagtcagctagatatctcatcttaccttctactttctatcgctggcatgccaaatcaaatttttttgcatgattggcattttgaaagaactaaacaaacgaggtattgggggaaagtaccataatacttttgcagggataccaacctttacctcgttggaattctttttcttttgccacctagactcaccataagtggacacgatattgcatccacaaacatcttatgatataggatgcaatcgttaggacatgcatgtattttttcatattgcatgcctaaggaagaaagtgtcttcttcacctcatctaaagacgaaggcaccacatttccttccggtaataactctactaagaaagctagtaaatccgtaaaactcttatcattccacccgt

SEQ ID NO: 148045 - DNA, 522 bp, Cannabis sativa
tattacaaccatcccctccttaaaaaaatttcgtcctcgaaatttatttaaacaattcaggatattaaccccatatttatgattctaactctcaaattgctgcttctatctcgctgtttttctatagcaccttcttaattagtgggattgtctcatttcatagtacttcctttttctagcccaaaacctagacaggatgtttttcccatataataatttgtctgaagttcaacatcgtcacagttctaaatatgggtcgagtttgatacatattttctcaacatggagacatgaaacacattatatactccggacaacgcatgagttaaggctagctaataggctacctatcctatttaatccagtggacatgtatctaatatttttctcgtaccacacttattaaggtaccaaacaagtggcacatttaattatcacttttaaataaaaacctcatcagggaagagattattctaagataatctaacctttatcaaatatgctcatagtatgtttctaata

SEQ ID NO: 148046 - DNA, 981 bp, Cannabis sativa
ttggtgtatattaaatttttgaacatatattaaatttttgaacacaagctattaaatttttgaacacaagcttattaaaatttttgaacacaagcttattaaaattaaaaaaaacaagcttattaaaattaaaaaaaaaaaaaaaataggcacactttatatttatacccattataccattctctctacttttctcttctaacttcaccatctatactgatggtggtccgatgggagtctgatggtggcccgatgccacccattttcttatatttttgtacttaagaaaattagcatcatgcaaccattagaccactatcggactaccattagactatattctatatttatagatgttaagctctattcattatgcttgtcaagaaaggcatcaggccaccatcagactaccattgtactatatcatcgggctactattagacctttgtcttcaacctttactcattttaacaataggaaggcatcataccaccatcggaccaccatcacgcctgacaaaaaaaatcagttttttgcctaaaactcagatctggccattttcgaccctaaatctaacatctactcatagataacaaacattaatcatataatttattcctttgacaacattgtcgatggtgaagacgtggttgatggaaaagtcgttgggtccgcagtggtcattgggtttgtggtcgtggtggtcgtagagagaagggaccaatgttgtgggtggtgagttgtggatttgagtccttggagtgagttcagagagcaagagagataagggaagaagcgagagggttagatatttgaaatgggaagggtagaatagggttttataaaatgttagcctatccactaatatggattaacttaggtttagaaaaaaacaatcaatctaatcaatgcatattagggctgagcataaaatctagaaaaccaaaaaaactgtttaaactgacctaccgaacactgtta

SEQ ID NO: 148047 - DNA, 1134 bp, Cannabis sativa
gagttttttcgtccctcttttgagattgtttgccactatttataagtacatagtggacagttaattacagagttgaccagaatatgtttacagccattattcttaaaatcgtgggatctgattatatatcacgaaatgtaaatgcggtgtatgattttgaaaatcgtagacctgtgattttctcgctttcactgggtcaaaaaatatcgtatattaaacacgtctttaattgttgaatctggagatgtctcgatagaaacttgattgtagtgatcccaatagcgagttgagaccattcttctttccgaggtcgacaatgtatgtcttacgtcgatcgtcggtataaagaaatcttctgacttgccaggattatgagccttgctcctgttagttggatgaagctatagcaagtctcctcatagcgagatggcatctttcatacttgttcttcgagtcgatccgaattttacacttagtttgcttattccaagctaaggtatgtgtccctttttttcggtgcctcgctattcacctttagcgacatatggtttctcgttaatacactaagtgctggtttgtacattgattcctcacctaagaccttacagccagcgggttacaaatatactctgatacatacgtaattaatgagttattccataaaaagatattgcaccgattcacattccctttatcttgacacatgtcctccagtcaaatttttggtataataaatgccccttaaaaagttcttttttagtaaaaagagatttttaataattacagagggcatttttgtgaggatcttttcttggagaaatgcaccctttaattctggcagttgtacggttttgagagtgattatgaatcatctcttcatattttgcacaacttctagccgttagatttctcaatctttggctttcttgtcaatgaacttcgtgtataaaagggcgactcaagcttgtcatttttcataaacctctggcttcattagtgaaatccattttcataatggattattttcgttctatcaaaatatctcttatgagttcagaagtttatccttccagactcataatacccagatgcaccaaccattttctatttgttcctacagatttcaagcctcaa

SEQ ID NO: 148048 - DNA, 747 bp, Cannabis sativa
  modified_base (187)..(189): a, c, t, g, unknown or other
ttcttcagctgaggacagtctttcttaagatgtcccaccgaaccacactgaaaacaggctctccggttacaagtcccggggtgatgttgcttgcaacgcgggcattcaggataggagtaaatctgacgtcctcctttgatttggtttcctcgaaacctttttctttgccctgaacttcccgaagatnnnaaagttcttttcttctgctcaaaagtagaatcaccactctcttttctagagccagatatagggagagtaatggtcccaccgacactaggaggctcttgggtttcttgcaaaaacttaactgctccttcagctcgaagagtgttatcaaccatttctgcgtatgatgtggtatcattcgttgtaataaccagatcatgcctgatcttggcattcagtctagccaaatacttctctttcttgctgaaatctgttggtacgattccagaggctaacttagccaaacgatcaaacttagttgtgtattcagtcactgacataccctcaccttgtaccaactcaacgaattccttccgctttgcactgcggactacctcattataatatttggcattgaataaatcctggaattcctcccaggtcattctggtaacatccctggtgagggatatcatctcccaccaaataaaagcatcctcttgaaattgaaacgtggcacatgccaccctatcattcccaatcacacccataaagttcagtattctttcaataacggtcaac

SEQ ID NO: 148049 - DNA, 1810 bp, Cannabis sativa
tgccttaaaaacaatattttcatgccactcagggggggtactaaggcataccacacggacaaatgtaaaacaggccagaagtaaaagcaaaatcaagtagaaaaattatctaagcaaaatatatatatttaaatgaaaacataaaagatgtcctgacccaaaagcaggtcctaaaaaaatattaagggcataaggacgggccttagaaactgtctccccttagaagataattaaattgtatgaaagaaaaagaaaaataattatagtggtgaaatggttgaactggtcggcctaatcaatgcggggagcgagacgaggaccccggcgttcttcaagcaaagcgtcaagccttttcttcttcttccagaaacaaacgagggcttcctcaggtttgggataaaagtcaagcttgatactctggccattcgactattaggccatgtagatgccatcatcaaagcgcttgacacagtgcttgcagacgacgggggttaggagctcatcccttttagcctttttcaaggcttggtctttaaagtccctgagctccttcatctccacggtcaggtcggccgtcgactgcaagtccacttggtgcagatcgtccaaggattttaacttagcggccatttcgtccataacctccatagcttcctgcagctcgcgcttagccttggctgtagcctcaccctccgccgtcagctcctcccgctgattcgcctctgcctgagcctccctctggtgggcctcctcccagtgcttcgccaccgcctgggaatctctttgctggtcctcctcccggaatgccctcctctcctcctcccggaatgccctcctctcagctgacaagtcccgcaaaatcttcgcagcctcgtccatgctcccaaattaagacatgacgaacccgtgatcaatcatggtcttggagaggcggtcggtctctgcggtgatctgaaaaaggaaaacaagaatgaaatcagatgccttaagaaaaaatacaagctaaaagaaaggaatgaatcgcaaaaactcaccgcagccatggcagcactgatgtcctgaacctggtaaaaagagttcagtgaggcacaagctgcgtatctcttgggtgggaattgagtcagatgatagacaaactggctggtcatctcggaggcgaaagggccgagggtaggaccgacaaagcggttgaaacagtccgtcaggggatccatgttcaggtcccagggattcctgaaggcgtcctcccgcaaggtgttctgttgctcctcctggaggaccttcttcaaggcctccacctcagtaaatccccgactaaacttgtccagggcgtagttatgtttggcgatccggagcaattgcctctcttcgtctgcggggaccagagtgagaacaataccatgcggcacagtgtctttctcggcttcagaaggaatcctggagtcggtgctaacagccggagtatcccttgtcctgggcctcttagaagactcgacctcaatcatcttaccctttttcttatgctcaagggaagccgcaatttcgccctcctcctcctcaacttcctcttcttcgtctaccaagactattgtgcccgagggggtacttgacgatgacctcccaggggtcaccagttgcgatgaggccagaggaagagaagcgtccgggctataggcctcagcgagggtggacaagagatcatccattggctttgctgctgcaacaaagaaataaaaaaagtgttagaatcaccataagaaggcatgcgcccaacaacaaagcgataaagctagtcctaccccgactctct

SEQ ID NO: 148050 - DNA, 635 bp, Cannabis sativa
aggacttagcctgcgaacccacaaggcatgtaggttagacagtggtcaaaatattttccaagaccgcatttagggtttcaaaatatccattaatgaaatatgcaatatatcttaaacagttcgcaaaaagtaaagcttacagaaccatgagttgagcttgacactagccttgattgtacatatcttgacggtctacagtgaacaacctggtggctctgataccaaactgtaacacccgtatttaaaatctactaaatttaaaagataacttttatagtattataaactttataatcataagggtcgagatcccgaatttcaaaatacaatttaaagtatttttactaatacaaattctactagtatatatacatatatatattttttacaaacaccaggcaactaaactatttcaaaatattgaaagaccgagaccctccaggttgcactgccgcgatatgtacaatcactaccaagctccatctcactgttcctccagcttagcttttcctttacctacacaaggtagtaaactgatgagtcaacaaactcagtaagatatgcaaaaaatatataaaatcaatgctaatctggctttatgcttaagccgccctgagctcaacaacgagctcacc

SEQ ID NO: 148051 - DNA, 1480 bp, Cannabis sativa
tatgagatcaaaagtttgggtggtgacattggagtgccgccttcctcggaaactaatgagcgcactacgccttttaaaaagaggaaatttgagagctctgcttctcttagctcgagacctcacaaattagtgagaacttatcatggtgtagttagagactttgcttgggacactaagaagaggatccatgagacacgagcggaggttgacgatctatctgaggagccttcggaggagccctcaggtgagagctccaactgcaactttggagtcaaccgagaccacctgattggctcttttgtgattgaagagtctggatctagcttatctgtccacccatctaaccttgtggaggagaatgtcaaatctcctccacaagcgccatgagaggtgttgcctggaactgtagagggttggggcagacctctacagttcaggagctgaagtccctgctcagatcgcgctcttcggattttgtgttcttgtctgagcttaaggtggatgccaatcccctggtacgtattctaaaagcttttcacttttactttcatatatctgtgccgcctattggtaatgctgggggaatcattcttgcatggaagactggcttttgttttgaatgtatcgcttggtctcaaaaccatatttcgggcattgtctactcggaccccccaacccacccttggcttctctcgtgtgtgtgtatggcccgccctacaaccatgcaaagaagttattttggactgagatcatgactttaggggatagatttggaggtccgtggttgatttttggggatactaattttgtccttaatccctctgagcgggagggatcgtcgagtagagacccctttatccctttcatatctaacctggtggagtcccgtggtctaatcaacatgagcattcaagaggacatgatgacgtgggacaaccaccgctcgggagacagctacgtgaagtcggccctggataaaggcattatgaatgaagcctggcttcacctgtttcccaaagctattcactattcaatccagacgagtacttctgatcatagaccattgtctcttgatacggttgggactgtgtccaagttcaaaaagtgcttcaagtttgaggaaaattggacgagggatggtagaagtaagcttgttgttgccaacgcctgggattcggtgcaccatctttgggaccccgcccgagtttttaaaaagattggtgctactagagtggcgctccttcagtggaagagaacgcagtttggtaaaattgatgaggttataaaagatttggagataaaacttgatagagttcagaagttgcctgctggctctagagactggagcttagagtgtgacatccgacggaacctgaatgaagcaaggaccaggaaagctgtttactggaaacaaagggcgagaattgagtggctgaaggatggagataaatgctctaaattcttctttctatctgctgct

SEQ ID NO: 148052 - DNA, 1819 bp, Cannabis sativa
atggtgtgcatgaagagttgggcgatcaggcattcgcatgtgggcatgttgtcgaggacgccaacagatgaagtgggggagagaccctcatggttcactcagcagactaggtatttattacaagcatttagatgagtatcatggggatggattttgttcaggatgtaaagtcaagaagactcgggacacaggttgtgccagttatctagggtgaaagtcagtaaggctcaggtactaagataacaccatgacaatgttggcctaaggtgaaagtcagtaggactaaggtactaaggcaacattgaaatgccatggggcgaagagtccttatgaccgaggcattagttcaacaccttcatcaaagtgacatttggaatcgagggactgtatgcgagtatgcggttagcttgcgagctataccttgagacgtattcctctaagagagaagtttttcccaatttgaagtgggggagcccactaattcatgtgtttgaagaatcagggtacttgtttagtttttgtgtgtgaattcaaagggatacactacaacagatgggttgttcagtgcgaagacttgcatgattgctgtaagctgtagatagacaatatgaaggcgcgtaggcagagatcaagattgagctagtttgcggcatgtatgggcgtgctttgtgtttatgggaacactactgttatatgggacactgtaagccgaatggttcagagagcatatgccgttgggagatagcaaattgggatgacttcaagttttaagagtttgtgttatcaagtttgtcaaaatttagcgagtcatcagaggatgcagggatggttttgggagatggacttgtgacacagtgttaaagagccgacacgagcaggagccagaggacgaattcgtggttttgggtgattggtagatcattgaccacatgaaagaagcttagaggagcacgtatgcagtgggtcagaggggccttttgcatgaagtcgtgggtgtgcggtagggctggagggccaatatgttgagtacttcacgaagagattttgtgaaggaatgcacttgatgctgcattgggtgcagttggcttgcgagcctcgtctaggtggaacacatcaaattttaccctacgataggagtgtcttgctcgattgccattaggaggatggtgtgccatggagttggcgtgtgaagttttcgaagggacttgtccagagggacttggcttcagtggaagcgtgttctgtaggtgtcgttgggtaccaagtgtgggcgagggagatcgtcaccaagagggtggttctacgtagatatagggacaagtgcagacctaggattcagatgaagctttgagtaagcttaggagttgagattaggaagatttgcctacgatccgtcgatgagggcattgacatgttgaagtgggggagaatgtaacgtgcgtgccaagagggcacattacaagctaggtgatgactacaagttggccaagtggtggtcaagtggtggcgcatgttgttgtgcatgttggtggcatgctgatgcttagtttgtacgatagtggcattttcgcaaatatcttcaatattgtccggattgggacagaactttgtattcgctatttatttgagtctacaaatacaatggtgcaatcagatttaagaaactcggtgatttggtatatggtgatgaccatatgtctacagagaaaaaatcatatatgtttctgattgaaggctaaaagcttagaatgctttttaagggggggagaacctggtgtcagctctccaccacccactggcaccttggtgctaagtgagc

SEQ ID NO: 148053 - DNA, 548 bp, Cannabis sativa
tccctgagaaccaatagtaagaggctaagtgtacaaacttaaccagactcctaatgttgagtgagagccatctaagatgtaatcaaacaaggaaaattaggagataatcaggaaagaattatgaaagtgacctatatgttagatgatataggtatatattagaatccttttatctacaccaactcagaatattcgatatggtggttactctgggggtggagaaattattctagaagaatgtaaaaacccatctataataatttagtccactagtgaagctaaataacatagttgctttcgaaaagcaccagaaatgttattcaaactgaagaaagttcttaactggttttatctctattccttttggatagaattagagacatgtcttctgtatatttagatgcacttaatgaatagtaaaaaaattcagtatccctaaaggagtaatacatatagtaaaaatgatgttgcataatattttatgaacacataggaagtaatggtggagaaagcagttgcttactacagacttacagttcctgtaattt

SEQ ID NO: 148054 - DNA, 629 bp, Cannabis sativa
gactgactaacccattagtttatgaagcttctcatttatcctctaacttgacttggagtttcatctgtttaatttgggtatgggaaataattttacacacttttattttgggtaagctcaatctatctctctatgtaagttatagcatttcacatgtatattataatttctttttcttatattatcaatttgattttacataaaaatgagtaggtttaaattatgatttgctaattttatttttctaggttttatattccttaatcattttcttattatttattatgtcatgtttttgttgcttctttgttgagtattattttgggagctttcatttgatgccatttatgtataactcttcattttgtttttatctccaagtggacttaagtgtagaggtggctacaaattctaaaagcttgagtgtttgaattgtcattggtgtgttattttatttttcttgctatccatatatagatgactctctcttcttaatgattagatataatgaactttagtgttgcttttggggatgaaatcatagtggagttggttgtatatgaagtctaccttatttgcttcattggatgttgataccataataaaagttcatgctcatatagttaagg

SEQ ID NO: 148055 - DNA, 838 bp, Cannabis sativa
  modified_base (421)..(436): a, c, t, g, unknown or other
tcggtccacgtttgttggcatgcgagtggttccacgtacagtgggtagttgttggagaacaatgtgaaatgtaggctttgcttgtacttgaatgatggatttcttttaatgagccttcaaaacatctatcttcaaatgctttaaattaatgggctttttaaaatatttaggtggagacccatgacccaacatataaacatacacatatcatatatatatatgggctatttaaaaaaatatgggaaaaaaagataaacttacaaaaatactggaatttaggttaactttttacaaaaatactgttacagagaaatcttttcaaatatactgtgtttttataaaataccagtaaaatacaaagcagaacaactcaaaacaacaataaaacatcagtacaacaccagtagaacaccagtgaaannnnnnnnnnnnnnnntgcagtatgaaacttataaaaaatacagtaaaaaagtaaaaaataccgtctggcactatttttgtaaaaaattagcaaaagttagtatactatgcaaatttgatatatatatggcataaaaacttaattatactaaatatggcattcttctaaaataaaactttaaaatatggggaaaaaacaaggaggaatgccatacaaaaactttaaattgtgtttctcttttttttatttatttatttttttcttttctttcaaaaaataaaataaaacactgtaataaagaaaaaaattatctcacttgaaattttttttatagaaactcaaataatattaaaataattttattaagacattaaattaattaactaattaattctatataattaaaaattaattttt

SEQ ID NO: 148056 - DNA, 753 bp, Cannabis sativa
  modified_base (296)..(298): a, c, t, g, unknown or other
tgaaagtatatttaagtttgcttaaggcagattataactacaattgcgaggcagaattgacaaccgctcaaaaataataaagtttggtagattactaacaagttaaacaagaagattacgagcaatggagaaacccaaaagtgatgtatattcgattaaaatatagttgtttacattgtgaataaaaacacatgcaaatactattgtattaagttcaaatgaaaacagtataagacatttaagataagaaaaacctaagacttgttacaaacttgtctttacaaaaatgccactannngcaaaccattaagtcattctcctaagaagaggatgagagaggaagaccagctacacatagacgagaaagattggctgcacgaagagagccttgatctctgcacagaccctattctcctcatcatcagatcccatttcctaaagtcgagatctacttcccagccttaggaaatttctcaacactggagagaggctgacgcaaagatctcctggcacagcttaaggtcttgggttggctagatcctctgatagaaaccacaccaacttccttcccatatccacctgaaaccataccaatcttcctctggaattcttcatcagcctgaggaggatcttcgagattgcacacaagatctataccctctgggatcacttgtgaggatcggccatggcaggctacggggttcccctggtttggattggtcggaagcccctcagccctggaatccatcattt

SEQ ID NO: 148057 - DNA, 505 bp, Cannabis sativa
ataattgcttgttgtggtgtttgataagtatcccacttttgacatacaaagagggaaaatattgtggttaattgcaataggttttcccaacaccatcttatatctcaatgtagaaagtacattatatatgggaaaattttaaaagtttacttttttatagcataaataaataaagctatggggatatggatttttttgtatttttacatttatatggttttttttgtgtcatatttttgtaaaaaaagatagaaatcctatatttgtaaacaataataagctttgccagagaagtcgccgaaaaagtcaccggcgccggagaagtcgtcgaaaactatcggtgctagaaaagtcgctggaaaaatcaccgctactggaaaagtcaccggaaaagtcatcgttgtcggaaaattcactgtcgcgcggaaaaagttactgaaaaagtcaccaaaagtagatgtctcaaatataaacaaaaatagaaccggttataattgaaatataa

SEQ ID NO: 148058 - DNA, 605 bp, Cannabis sativa
cttgtaatttctttcactttttttttcacataaaaaaaaataattacacaaaggctccctaataagatttgtctataaaaaattattccttaaagtagcatctaatcaaaccctagtaccatgtccaaaataattataaccatttctaagaatcaatgaaaattcaaaggttgtttctcaaatctcaccactcacaaaaatatgaatactcaaacttggtaaattttctaagcaaatatgtgctaacaaccatcttaccacaaagtttggcatgtgcattttataactgttaaaaattctaagtaacaaagatagcaaaaattggcttgaaaataatattttacaagaataattgagtaattttttaaaattttgaccatgaaaatattaatatgacaagaattaataagcatgcttgaatatgctcaccacccccaactaaaatcagacaatatcctcattggtcaaaaatatatacatgaaaagagagtacttagagagtgagctaatgcaaaatgacttgatattgattcttagaaaaacaaaactaaaggaagaaataaacaatcaaaacaaaagttaaaacataccgaaaataaaagaaa

SEQ ID NO: 148059 - DNA, 657 bp, Cannabis sativa
attataatcactaaattaatataaattactactagacttaaaagagagtgagagtataataaacaactcactcacaatagactatagtaggtactttttaataaaatataatgtgagggtattttttattaatgaatgcaaaaaaaaaaggtattgctcgacttatcctaataaaaattatgttatgatgttaatttatttttggaatggaaatgagaatgaattgtgtattgacaaaaattaaaattcaactattttaccttgatttttctattttatgagaatttttaaaaatgtggttttttctgaaaaataatgtataaacatatggctttaccatattattgatttttaaaaattaaaggtttgagaaaattatacaagttatggtattttaaagttaattatacaaaattatgcctaatattctttttatacaaaattatgcctaatattctaattatacattaaaattaaaatctaagagccatatgtattagaaaattttaataataaaacccctaaaagtattagcaaattgaaatttccaaaaaagatgtaatttttcataggggtaagttgaaaaatgcctcttttattcatcaattaatcaaatttacctctaattttatgtttatttgaaacatacctcttttt

SEQ ID NO: 148060 - DNA, 677 bp, Cannabis sativa
  modified_base (628)..(651): a, c, t, g, unknown or other
acaatactactcatcacatatataaaaatatatttagggttattatactattttagattctgtgttttctaaaaattattgattggactatatatatattttgtaaaataaaaaatttgaccttgtattttctaaaatagtactcttagctcaatttcgatatttttttaatacaattaatttaaaaataatttctagcacgaacaaatacaaaaatatatctaattttttcataactagatagattaagttattattaatatttattttgatcaaaaattaatttaggatactattttgtatattttaaaaaatacaaggtttaatttattatttaacaaaacaaaaagtttaattaatatcttttgcaaaacgtaagattcaaaatagtaattatttatctgtataatatctttatatattaaaagtgtctatctaacagtatttcttggtttaattttgttaaatttaacgattaggtttgatctccggttaacaaataaacccaataattaaacccccaaaattaaacaatcttttaaatattaataatctatttttaaattaaaaaaaatcatcatagccacacatatctctctaacaaatctatcttgggagaatattaatnnnnnnnnnnnnnnnnnnnnnnnnaaagaaaaatctttatatattaaagt

SEQ ID NO: 148061 - DNA, 515 bp, Cannabis sativa
ttgggccttgtgtgagagttgggtcctggtctaagtcccagatctggattcctgtcacgtgtcccggtcttgttcttgttcatatgttgggtcctaggtccaagtttgggttcaggactgagacttgggtacggttctaggtccgaaccctagttctgtgtcccgagtctggttccatgtttaggtctgagttcgggtccaggttcagaattgagtcgaggtctgggttgcgatttgggtctgggtcgcagttcgggtctaggtctgggttggagtacaggtcctagtccagttacggttccaggtctaggtccacgtccaactacggttccaggtccaggtcaaagtccttgttccggtcctattactaggtctcggtctacttctggtttcggttccaattttgtgtcacaaggtttgggtccacgtttgggtctaggaccgggtttgggtctgggtctaggaccgggtcctggtctgggtcccagatctagacaccaactacgggttcggtc

SEQ ID NO: 148062 - DNA, 969 bp, Cannabis sativa
  modified_base (218)..(222): a, c, t, g, unknown or other
tctcagatagaagctgatattcaaatgatgttgactgctgaagttcatcttgtcacgaagaactgcgattatcaaatggagcattatatctttagtcacaggaacgatgagatttacatgatcaatctcgaaaagacatgggaaaagcttcagctcgctgccagggttattgctgctatgttcccatcgagatgtcccagaacgatacgctttacaannnnnttaatacacgtatgcattgacccggtaaaagcggaccaatcacagctatgtgattttcaaataataaccgcatacgtgaaagattatcaaatcccacaattttagtggattattgttgtaggatatcagtctgatttgtaattaactgccctcctatgtaattataaataggagcaggatacactaaaaaatggacgaaaaaatccttaagagaaaaaaccctagaattgtatcagagatatcgaataagatagaatcgtgtgctacgcataattttaactgcaaaactatgtaataaagctttgtgttctttattttttctttactgctattattttctgtgcaaatccatcacgatttaggctttaatatagttaacaaaaatctgcgttaacaattatattttctgaaattgttgaaaaattacataaatataactgaaaatcataaaaaaaaaaacatacataatttagtaattatcttattaactttaaaagtaaaatgtagaaaaatagagtacgaatttaaaccggtattaaaaaatgagagcctgaataagcacaactcgaaattgagtgcaacacaaatctaaacataaaacaccatacaatccatattttaaaaacaaataataatatatgagttgggctaatctaacacacctttatttagggcattttacaaaaatactgcatttggggtaattgttttcaattttactgccacacggcagaattaacatttata

SEQ ID NO: 148063 - DNA, 515 bp, Cannabis sativa
tactgaactgctcggggctgaacctctttaaaattcttgtgtctttatttgctttactatatttcaatcatattaaacaccttgtcactcacaaaattagactcactgtcgttggctaaaagcgaggtcaacatcttggtgctttcattgagagtagaatcaaggatcgctctttattgcaaatttaatcacaagtacgatagtggtacagactcgtaggggcgtggttgatccagcaaatccacaggcggtcgatcctacactacagaatctaggaaacacaagggttctgcaagctgtaaatcccaaacaaccatcaactgtgggtcacggtgtgacgaaacctgtggatgagattgcgcctggtgtacaagagactaggaataacagttcagcacccaaccagggcgttcatagcacaactgttacacccgccaccaatgttcaaacaaccattggagatgacactgtgatccagaacctccgtgctgctcttggactcatgtagggtcata

SEQ ID NO: 148064 - DNA, 536 bp, Cannabis sativa
  modified_base (459)..(463): a, c, t, g, unknown or other
gactcaagacaatataaaatacaaataaacagagtaagagtcgaacaagctcttctctacaaaacaaagactctcttttctaaagatatgagtaaaaataaaaatttaaaagaggtactaaacctagctgcaataaagtgtatttataatcaacatacaccttattgacagcttacacacggtctgaacaagaccccagcccactaaaaaattccctaaaataaatcttctgttagcccaagaatttccatttctgtacttatagaattgtgggcagtaagtacaactttccttttatagaaaaggaaagtttagctctggttttctcttcaagaaatctgatcttaaaaaatgagaaactcacacaagatcagaatatactagctggttagatacgaataaattgtataatcaaaacttaccatttttacctcagtttccataaataggaaagctagnnnnntttccttccaagtttagatacacaaaatatggacaccaaatttatatacaccagtcgaaaatatacaataaat

SEQ ID NO: 148065 - DNA, 776 bp, Cannabis sativa
agaaatgttagtcctgaaaagcctgcgaatacatacctaattattaataaagaattgcacattttgatatatgtatgaatgttaaattattaatatttattattgaataatatatgtaaatatcaggaaatttgttattcatatatgaagttgtgacttgtagttgtatagagagaactaagatcacttacctataaataaaacagtcagcaacatattaaaattatgaatctttaatcaatggttgctagtaccgctcattgatgcccattcttcaatacaagtaatatcaattcagattattgatgtagtataacatctatgtgaaggtgttgtatattaattgaaattatatatgacaatgacctatatgaataaagttgtctttatcaaacatgtcatttactataaaaacttaattcgtatcttaatgataatcaatggtaaatcgacctaaatcctgagtaatcatgaactcgtgttcttgttactagtttctttgattcattcgttaaagtttctcaaagaagatgattcttacaacttctattttgggaatctaataatgtgaatgactggaaatatgatctacaattatggaatcctaactttcttaacagatagaatgttagttccatttttgtgttaattctagaattgaaaagttgctcgcaaatttagatgggctctgaattatactttcactagtgaattaatggtattaaaggataaagaagtaattagaagtgtaaaatggtaatttgaccaaaactaat

SEQ ID NO: 148066 - DNA, 693 bp, Cannabis sativa
ttggttaataccttgattgggtgagcttggaagtaaggtctcaactttcttgaggccattaggagggaaaagactagtttttcaatcaccgagtatcgcatctccgctcctgtcatgcgcttgctgacatagtacaggggatgctgaattttttcctcttctcgtactagggccgcgctaaccgaattctcggaaacagccaagtataggaacaaatcatctctgagaacgggcttcgataggattggtggcttagccatgcggtctttcagttttttgaatgcctcctcgcactgtcagaccattcgaatttctgacatttcttcaaggtgttgaagaagggaatgcatttgtttgtggaccgggagataaaacggctcagggcagcaacctttccggttaaactctagacatctttgtgcttcttaggggaaggcatgctaaggagagcttggatttttttctggatttgcctcaattccccgctgactgacaatgaagcccagaaactttcccgacttaactctgaaagtgcacttctttgggttgagtttaattccgtatcttcggaccacttcgaagcattcttctaggtcgtctgcggggctatcacacgcctttgatttgactagcatgtcgtccacgtatagctccatattttgccccagaaggcccttgaacatccgattcacc

SEQ ID NO: 148067 - DNA, 724 bp, Cannabis sativa
cttattagacatggtcagatcaatgaagcgttactcatcactgccactaaacttttagcgacacgcacttctagcagctacctacattcagggctggccctgaaattttgtgggccatatggaaaaaaaaaattcgggtcctcatttagaaaaaaatgtggtatttttcaaaattgataaaaaaaatgtataattttaaaatgggacaaatgttttttgggcccctgagctaggtaagccctaggcacaggcctagcccgcctatgctcagggctggccctgcctacattttgaatataatatcctcaaaaaggataagcaatactccaatagaattatatagggttgttcaaaagagtttataaattgcccaacccgaataaactgcccaaacgaaactgaataaaacgataaaagacacaactcgtataactttacaaaaaattcaaactgcccaatgaatatattgggcaggttgaatattattctaacccgcccaaataactcggatgaactgaataaatcaatttacatatttattactaaacttatctataatataatatataaattacgtttaataattaaactattttatatttaaagtttgtattttataatatttgatttaaaatttagaatttagttaataatattaattgtatttgaatattaaagttgaaatttagaatttacatataagtatatttttttattctaattt

SEQ ID NO: 148068 - DNA, 522 bp, Cannabis sativa
tagaaatcttcaattttaagtcccgttgtagattgattaataagacccaaactgactttggatgtcatctgtttgttttggaaaaaatgtagcaaaatagtaatttgatttactcattagacaaacttatttactatatcaattcgacttagatatattcaaatttttttagagaaaattttattaaatagttttactgaatatactaatttataattctagaagaaaaaaaaaagaatatactatttcataatattaaaaaatatatatgtactaacctatataaaacatttaaaagatatattatatgggggtgttcattgtgcggatagtgcggattatagctattttttcaaactaaattgtatatgttatttttgtaatttcttaaactacaatcgcatatcttaaaactacaaaaatcatatcgcgaaaatacattgtggtacggtgtggcttgaacgatttacactattatcattatcaaacattataatgaaaatttaaaaatcaatctaataa

SEQ ID NO: 148069 - DNA, 779 bp, Cannabis sativa
tcacatcttaagtattttgagatgcagatggatctgcagggagtacggggtgatgtgcggtgtagggtattccctactacacttacagaagccacacaacagtggtacttcaagctatcacctgggaggtttaaattcatggaaagacttttccttagaattccacgcacagttctcctcttctcgttaactcccctcacatctagagaagacttggtcgaggtgtaaaacagataccaggagagcccctcagagcctacataagcaggttcatgatagaggctacgaaggttgcaagattaactaaagagggaaggttggccaccagactgggaggcattgagatactgagagaattgtgaaaggacattaaaagatgtagccccgtggggtctatgatggagtttttggaccgagcaaatgggtttataaagctcgaggagcctattcggcgagtggacgtcgtcaaacctaagtagggccagccacatatttcctccgtaggagcacctgttcacagtacgcaacaccctagtagctcaactacgagcagaaaaaggtctaataacaatggcatgcaaggcaacaggaaaaagggaaagttcataggcaattccgaacacaccccagagaaaatgcctccaagttcactgccttcttgtcctaactgacgacctagagatgatctacataacaactcagtatatagtcccgtacaaaaaacctactcccatgaagaaggacgtaagtaaaagagacacatgttgggttttatgccc

SEQ ID NO: 148070 - DNA, 511 bp, Cannabis sativa
gttttccaaacatcatcgtgttagctcgagtcttcgagtcaataaatgtgctagtattccttttgagttagttcattctgatgtttgggatccttttcctattttgtctcaacctggattcaggtattttgttacttttatggatgactattctcatgtaacttggttatatttaataataaaacattttgagttgttttctgtattttgtgctttttgtgttaagattcaaaatcaagttaatgtgtctgttcgtactttgcaaagtgataatgccaaagaatacacatatgctcaattttaatcttacacgacctctaatggcatgcttcatgaaacttcttgtgttgatattgtaccttaaaatagtgtagcagaacgtaaaaatagacatcttcttgaaactacacatgccttgtttcaaatgaaagttcataaacctttttgggtcgatgcagtttccacatcatgatttcttattaatcgcatgccatcctctgtacttaatggt

SEQ ID NO: 148071 - DNA, 2005 bp, Cannabis sativa
  modified_base (38)..(54): a, c, t, g, unknown or other
  modified_base (203)..(224): a, c, t, g, unknown or other
  modified_base (1872)..(1881): a, c, t, g, unknown or other
  modified_base (1907)..(1908): a, c, t, g, unknown or other
gccgttaaaaattcccctgaactatcgagattgttagnnnnnnnnnnnnnnnnntaatttcattcaattttactgttccagtgattgtttatatacaaaactatgctcccaagactttgatatctactaaatcatgccccttcaaactttgatttgtactaaatcatgtctctgaacttttatccatgttagatttttttacnnnnnnnnnnnnnnnnnnnnnnaatctaacaatctcaatagttcgggggttttttaacagccaaaaaagttcaaggagcatgttttggtacatgtcaaagttttgtgaagatgaagagatggagcaccaactcacggttggatacacaccatgtaatatcccagaaacttaattatgaataattaggatttattatattatggattaattaagtagtaataagtaggattatgatcctgccaacttaatttagcataaattataaattttagtataagtggataaatatgcgtcatttattaattacggatatttaattaaaatatgtatatataatgtaaattatttgtgaaataaaaatatttttaactccgacgatcctggagacccaattgaaggtcaaagatgtcacaatagttttagttagtaatatttatgagattattgagataagtcgattttatgaatatcgaaatattttagagtactcggagttgaccaaataccttaaaattaaagatttcttaatagttaaaatatgataagtaataataaaaattttattaatattattaatattaataaaatttttttaaaaaaaaaaacttatcaattaagttatatatatatattaagtttattacataaagaaaataacaaaacgaaactctttcctttgtgcgacaaaaacttctccccacttaattttttttttcaatttttaatctgaagcctagtttttcaagctctgatagtagcatgataatatatcatcgaagagagaaagcttaaggtaaggattggtttcgttttaagttgaaaacgattagttttatatagtgactttgtgatttaaaataattatggagattctaactttatagaattgttcttgggtagctatgggactagcttcgatgttaacttgttaaatttgaggtgattctaagttagaaattgagtttggaattttttaaagcttaagttcgagctttaatggcgtttttcgtttaggggctcatttttaatttcggttatgttgggactgtagtatatatggtatatatgtgtcctgtgaagtttggaataatttagataggttttgatagtgttttggagagtgtaaaatttgagattttcgtgctagaaaatggtctgccgttttcgaaaattcctgagagatcagaaattatatttttgtcataacttttcactcaggtctccattttggacgttctatatacaattattattgttctgtaatgaaaagattacatgattaggcaatgtgatatatggatactaagagaggcattcgagttgttcatttgagacaaccgtaataagtcatgacaataaactaaaattgttgttaggtttcttcctgtcagcgatgcttgattaggcacaggcggtagtgacatgtgagtgtcaggctatggtacgggctcgtcagattaggcgatatgatatgttggtgccaggttttggcacaagctcacctgattaggtgatgcatttatgcaatatatgggtgccatgttttggcacgggctcacctgattaggtgatgtgtgttgagttttgtgccctaaataaaacacatttcaataaaatcagatttattaattaataaaagatcagtaatcgttttatgttgcatggttcannnnnnnnnnttcatgattatgtttaatgtataaannctattaagtctagaacatatataccttttcatggttatagtatcgttagcacagtggaatattaacatgaatatatgttcaaaagtttaattcccat

SEQ ID NO: 148072 - DNA, 740 bp, Cannabis sativa
  modified_base (321)..(326): a, c, t, g, unknown or other
taagaataatattatatttaattagttaatatagttttatcaaacaaaactaaatatttaaatactattcaattacacaattcatacttgttataattattgaaaataataatttccacaaattactattttttccttaagaattatttctcataaaaattagttctcacccaaatttactcatcaaatatatcttcccctgtactgtgttatatagaggtgacttagggaccatggacctatattttaaagctccaataaacacttgattattatcaatctcattaataaaataatccagtttattaattctattattannnnnntataaatatgaaattgcactatttgataatataaaattatatttacagaattcttactagtagttattgatataatcaatataagtagttcgccctctaattattagttcataattatagttgatcaaaattattgttttacccttctaattatctcttgattctttatatactattaattcaatgtgaacagctaatctataacgtattatagatttgaatccaattgttagcactcttagaattaacacaataatggaactaatattcgatccgttaagaaagattagattctattctattattgtataacatgttccctactactcatgttattaagctccccaaataaatgttgtaagaatcatcttctttgagaaattttaacgggtgaatcaaagaactcaatgaaca

SEQ ID NO: 148073 - DNA, 644 bp, Cannabis sativa
ttacagaagttatcaaaaagaatgttgcttttgaatggggtgaagcacaagaggaggcatttcaactgcttaaacacaagcttactcacgccccaatactttctttacctaatttttctaacacatttgaaattgaatgtgatgcttctggtataggtattggcactgttcttatgcaggaagggagaccccttgcatactttagtcaaaagctaggtggggctgcacttaattaccccacctatgataaagagttgtatgccttggtgcgagctttaaaaacacggcaacaatatttgtggcctaaagactttgtgattcacacagatcatgaatcccttaaacatttgaagggggaaacacaagctcaacaggagacatgcacgatggttgagtacattgaaacatttccatatgtcattcggtataaacaaggtaaggagaatgtggttgctgatgccctttctcgcaggtatgccttaatatctactcttgatgctaaattacttggttttgaacatattaagaaaaatttatcccaatgaccatgattttggggagatttatggagcttgtgaaaaatctggtgaaggtaagttttataggcatgagggtttcttgtttagggagcataggttgtgtgt

SEQ ID NO: 148074 - DNA, 760 bp, Cannabis sativa
ctaaaaatagcctaacaagcactcgaccaagcataaaaccctttctgtgggttagttgcccggtgattcgaagaggggacgtaaccctcatatgtgcctcacttattttgcacggagggcacacccatctggcccctaaggaacttttgcctcctttggctcgttgacatagtcttccccctcaaccaagacgtcaccctctgcggatactggttcgccaatctcattataccctccaaaatttggaggttcgaccactccatcctcatcaacttcgaaaggactataaggatggacatcatcctgcccttttatctcttggacctcaatgtcccccccgtgatcctcctccacggcaggcagatcctgctcggtacttggcaacgtggcatgctgggccacatgaggatcagacgcattgattttatgcatagtctgctttgtgcggcccatcatccttctcttggacggatactgatgtgtgtgtggtaaaacagtaacgacagggacaactattgggatgccgaagttactagaatttggacagccaataggaagggtatgagcaacacctggccgatcattatacgtccagttggacggaagataaagtctccaacccttcttcagctcccaaacgaagcggtcgtacccttctcatctgatctgcttggagtaagagtggtgttgcacttcaggtttggagtaggagaacgatcactactcacttcccaacctttaaagctcgagttagaaagtc

SEQ ID NO: 148075 - DNA, 767 bp, Cannabis sativa
ttcttctttcttctcatctattctatattatgttatattattttataacattagtaaaattatattaaaattttaaatttacacttaaaaaatttgtgacacagatacttaaaatattaatttaaataaaataattttcataataataataagtatcgtagttactaaaatagaataatttaactcaatgctaacttaaaaaaaacgaaagtgtgatcagaaaaaaatatatatttttaattaatttattatcatatatattaaatattaaagtaatttatataaattacccaaaagtaaaaatataatttatatagactgaatcaaaaagactcaagaagtaaagttctttgaaaggccggcctgccatttttttcttaagtcaaactcacttaaattattacatattaaatatatgtgtgcaattgtattgtattttttttaactcttgactaattttttgttggcaaaatataaattgctaattaatatcgtgtattttaatcttatattattttatatattttttaaaatcataaaataaccatcattaaaatttattatagtcactttaacaaaattttaaatatatatatttaaaaaattaataaacaccgttcataatcaataaccataaataattaaactgtatatatataaagtaatgtaacaatagattttatagaatgatttttaatttttaatttcaatcaataaatctttattagaaaaaaaaattatggaaaatttacaaaaattaagagatc

SEQ ID NO: 148076 - DNA, 517 bp, Cannabis sativa
  modified_base (389)..(392): a, c, t, g, unknown or other
aaacatgaaaactacatgttaacataaatcacttctaatctattattgataacaaataagattagattgtaatgggttttatttagggcataaaatcccaacaacatgaacatcaggatttgctgtctgtgggtcttgagagagacctgaagatgcagatggtgccgactgggattcttttcgtgttaatcatggcattggatcaaacacgatatccacttgctctcaataaaagcaccaaactattgacctcaaaaagtggtcaactgacagtggagtcgtatgaatttgatgtttgctaagtgttataatattagaatgaggaagtaaagaagacaaagaatttttatagaggttcgactcccttagatagcgggtaatgacctacnnnncttttagttgtattgatactgagggacagtactattcaaatcactataggtgggatctaatatagctcccttaaggatacaaagtagaaatcaaggttggtaaatctcaagtgttaagaatgctt

SEQ ID NO: 148077 - DNA, 781 bp, Cannabis sativa
tatacattttcatacgtatatacttatatacattcagttcattcacgttcatatatatatatatttattcatgtgtttatatatatacgtatacgattgagttttcggttatatatagttttatatatatcgtttatatatatatatacattttaatatatttatttatattcatattcatcattttatattatagtttacataaatgctaaatacatatatatacatatatacatttcaattatatatatattatatacggtataatatatatttttcagtatatatatgtatatatgtttatatatgcattgtatatgtattaatacattcatatattaatatagattgttctaaccatgaaaatccactttgaaaaaaaacaaagaaatctcaaaattatttttcaacaaattttgttgatttttaaagtctttgttttatgtattttcgatgcataaaatctatatgaatatcttaatttttgcatttagattcatttggaattgatttgggcctttttggtcgtcggaattgtctttttcgatcgggtttgggtcgggtccgtcggacccgcgtggctgaaaaacgggtcaaaaagacccagtctggctgaagaagacgacgccaaacgacatgtcgtttgtgaaaaacgacgtgtcgcttgcaagtttcttttgtaattgttgttgtgtgaaaacgacatgtcgtttttcgtcttgtgaggcagccattcaggagtgtaaacgacgtgtagtttttacatacattttcagccacc

SEQ ID NO: 148078 - DNA, 541 bp, Cannabis sativa
ttatttataactaattttttttatcaacttgaatttgaatatttttgaaattcaaaattaagttgaggaattctaggaattagttattgagagattcatggattattatattaagttgacagttagttaaattttgaatcaacttaaaatggaatatttttcaaattaggtggttatagcttaatttgttatttaattaaatttttatttgaaaataatttaagttgaaaatttagttattttagagcaacttgaattagatattttcaatttttttttattatattttaatttatttatttatttttcgaattttatatatttatatataattttcgaaaattaaatattgaaaaatttaattaaagtttgaaataattttcaattaattttagatcaagtttaatttataattttcattattaaaatataattaaaataaatgatttaataaaaatacactttttttaataatgagttttaatcaagagacgttcgatctccattggttgttctacatagttcttgttttagtgagtaa

SEQ ID NO: 148079 - DNA, 1100 bp, Cannabis sativa
aagtagtcaaagttggcctgaggattagccttccaaaattcaaagaagagcccaagactggctgtctccaaggcattgaccttttctttcaaccttgccacctcagccaaaagctcctcctccttggcttccttctcctccttcatccaatgaagaactgcttgaagagaagtcctctcatcctgaagactgttaacttcgacagataaggtctcgatggtatcctcaaaacggttagctacctcgagatccttagtcagctcagttatcttcttctgggaggcaaacagcttcttgttggcttcacccaactccaatcgaacagctccgacttttgccctggcgtctttagcatccttcccgaccaagcccgcctccgccctcatggtgtcgaacagagccatgttcctggaagcaacagacttagcctgggagtaagtgtaggccaacttcagactagcctgcacagaggaaaaactttagcatttgagctaagtatggaagattaaagggaagtatcaaaaaaatacttatcctggtgaactccttcaagactccgcccaccagcatatccaaagaagagtcattgtcaacaccagctagttgctcactgatcttaggaaccagccggttcatgtaatgggccagcatctccttgcccttcttggcctctagaagcaccggcaaaggtggagtaggtgcccggacccattcaggatcaatcctgaccagtacagacccaaccttcggtggtccagacctgtcaatgctccctccctgagactccttggacttagcagctttgggggtagaggggtttgtggtagttagctcctcagaaagatcaatgacctccccagcaggcctcttttgcattagaagaggacccctcactgcccttagacctcttagccgaaggagaggcgctagagcttccgcccattctcttctttagagcctcaaacatctgccaagacatgtctgtacagaacgaaaaacaacatggttagaaaatagacatcagaaatataagacatgaaagttaagaagctcaaaaacaagacaaagcaatatgcaaggtgactgcccaaacaagattc

SEQ ID NO: 148080 - DNA, 796 bp, Cannabis sativa
tattgattacttaatcttaagtattttacattaatgtttttacattaatgttaattacattaatgttaatactgttaatactagaatgctatgttgatgacttagtctagaaagaacttatagtttcaaacttagataaaacgtcacaacaaaaggtccctaagcacctatagtaagagtttaagtgtacacttgtgtatgaatttaaccagactcctactgttgagtgggagccacctaagatgtaatcaaacaaggaacattaggagacaattaagaaaaaatctcttaaagtgacctatatgttagatgataggggtgtatattagagtccttatatctacaccagctcagaacttaatatctgagatggtggttactttgggggttgaagaattattctagaaggatgtaaaaacccatttataataacttaagttccaccagtgaagctaaaaaactttgttgctttcgaaaagcacaggaaagttatttaaaatgaagaaagttcttaactgtttttatctctattctatttttgataagaatagagatgtgtcttatatacatttagatgcacttattatgtagtaaagaattcaatattcctaaaggagtaatacatatagaaaaatgatgttgcataatattttatgaacacagaaggaagtaatggtgggtaaagcagttgcttaccacagacttacagttcctgtaattttgggtttagtcaaatacactatgcttgatctggatatcaagacaatagattgattaaagtgcacttcttgtttat

SEQ ID NO: 148081 - DNA, 811 bp, Cannabis sativa
cataaaccaagaatttcagttatataagcacactttatatagaatagatatatataaggattgtctactgtgcggccgattctttctaccctacagtataaggaatttttttccaccaattatattttgagttttactctaatacaatgcactttattgtaagaaattattttatttattttattatattaataaatttttatttactattcttttaaagttcttttttaataaatatattgttagactagagaagatgaaaaaaatacaattcttaaatgtgtgcctgcttgtataatattttttttttcatattttgtttttaattttaaacatttaaatctaaaaaaaatatgttattaattttttttagaaattaaaaaaaagattattttatacacccaaaaataacaaaaaacttacatttttatggatctacaattatttttacatttttacgaattttaattttcttttttaaatagggagagttattttcacattattacaacaagaaaacaacgtgaaaataatgtttctttctaaaaaaaacaaagaaaaatctgtaaaaaaataaaattcataaaatgttaatatataaatatataaaaatctgatcttaagtgtattgtgtaaatttttcaaataaaaaatgtgtttataacttttatttttacgttttagtttttaaataagtgaaaatagtgaaaacaatgtgatagaaaatgaaagagaaagtgatgagataaatgaaatgaattttgataaaagaaagtatacaaaataaattgtgattaaaaaaattatttaa

SEQ ID NO: 148082 - DNA, 564 bp, Cannabis sativa
aaaaaagttgatataggcgtgtaggagtatttttgtaataaattgtgtaaaatggatttttcatgtaaaaatttctaataataatcataatattcttgtactggtttttataattatattgtaaactatttcttttatgaaattttactaactcaatgacacgtgttaaaaatgtaaggtcaattattaaattaatgtaaagtcaactttaatcaaccacacgaagttatgattttaaatggtcttttacttttatttgatttttttaattattttaaatgatttttaaatatgctaacaggcacatgctgcctaatactttgtgaggtatagtgtaatgttggtggtataggtgaaatttaatatcattttaaatttatttagagaattatttcatatactatttgttttaactttttttaaatttaccgtttgggtttctaaagtgagtacaacactagttgtaataggaatttctatacgattttttttgttaaaatttaggttgcagtgctagttgcaataggagtttttatgtagaatttcgtaaaaatgaaaaaaaaa

SEQ ID NO: 148083 - DNA, 578 bp, Cannabis sativa
  modified_base (342)..(343): a, c, t, g, unknown or other
attttgcaaagtgaaacatttaggtctgatatgtccttttctaccacaaaaatgacaagtaggaatgaatttttttacctcagatcttactttttttgcaaatcctgaagattttgtgtcagtagaaacagcttctgcaccgacaggttttgaatctgttgcagcagacttcaaatttgcagcatcaggaaaattcgttggaacactagatcttacaaatttcgtgattccagaacttcccataccatttgatccaataccatcaaaacctctttgacctacattctgagctttttcaaaaatacaagattcgggattaagcatttgaacatttttcttaannttttcaagttccttctttaaaagagtaattttttcatctttaacacaaaaatccgtctcatattcttttatttgtaactcaaaaatctcaatctgatgaaacaattttttattcattttaatcaacactctgtttttcagaagtaacttaaatccacttttcatacatgactttgtatgattcagcaagagattcttcacagatttcagattcatcagaatcaaattcttcttat

SEQ ID NO: 148084 - DNA, 563 bp, Cannabis sativa
ttcaaactactaaactattgacaaatttaaagtgtcatttattttttacagttaactaccaatatagactgcttatgtgtatattttcttcaacacgttgcacttttacattagtacacctaagattattatttaaatattagttcaaaattatttcaaaatttataatattttttatttttaaatattttatctaattttagaataataatattaggtgtagtattataaacacgtcatatgtacaagagtgtacacataagcactctatgtagcagttaattagatgaccccttaaatttactaatagtttagtagtttggaagatttaccaccaaaatttgagcttaaaagggttaagtgcaagtaaaacgataattggaagtaggggtgtacatcgatcggtttggtcggtttataccacagtttatttaacccattgtaaagatcgggttacaaaaatttgagcgcaacccgctgttgtcgagtgaatttcgcaacaccaaaatgtattatttaattaatataaaagagagttttcagggaaatgacaagtgcgagta

SEQ ID NO: 148085 - DNA, 710 bp, Cannabis sativa
ttaagaagtggttgtcttggaatgcaaggtccaataagctagctcaacttgtaaagtggataggtaaagcaaagatgagtaaatttaggaagcaagtgcttgctgcagcagttgcttctctagtttaacaacatttgggaaaccccaattaatgtcaattggaatgggggcaggtaaataccatcagattactagaagacctcaaatggaagctcaaaattagaatctttatattcttaccaaaaaaaattacatgtatagatagagattggtttattacattgtaaggatgtacatacatagagaaaattgtatagttaaactagaggctccgatgtgggagtgctcttagtgtgtaaaaattgatttgagcaatataacttcctgatttataaaaaaataaatatattaacatattcatatattcatatgataatatatgatattttggtagagattttgtacatgttaatatatatgatatatttatgtatattatattattatatatagttagatataatattataattgcgattataacatattattatatgcatatatgtgagatatatatatcatataacatgtgatatatgtgagttatatgtacattatatgatgagcataagatatatttatatatatttgtgagaatagatatgtaaaaataataattttaatatatatatatatttaattgtgaaatt

SEQ ID NO: 148086 - DNA, 780 bp, Cannabis sativa
  modified_base (738)..(738): a, c, t, g, unknown or other
acaacttgtaactaaagactatgttttagtcacaagtaactttttgttgcgattaaaagtcacatttagtcccaaaaaatttattttgttactaaaagtaacagttttttgtagcgttgatatgtgtacacaaaaaaaaaaaaaaaataaacaaaaaccatatctaaatctttaatatatagagataaagatgatgaagttttgaaagagtaatttgagctagatattttggacattaataatgaaatcagaggcaagagcttcttgctgttgcgatattttgtagcacatatattttctatattattaaggactttaaaagactagtgatacatgatattttttagtaatattatgatatttatgccttttgtctataatatttgtcctataccaccaatcaattattactcatttgtatactgctactaatagaaaaggaacaaccaatttacatcagtctaatcttgcctttcttcttagaataatagaatgtactcgaaactatttatacaaataatgcaactttgaaaaagcaagaggctcactatatataacaataaagagatcctctccctaaaaaagtaataaaactataaagagatctctaagaatttcaaatggtaatcgaaacttaaatatgaatttttatgcttcaaagttacaccttatataaaaaatatcttattttttagggaaaaaaacaggaatattctaaaaagggaaaaatattacaanaatactgtgggccggcccaatgaacatttgtacaacccaaaa

SEQ ID NO: 148087 - DNA, 718 bp, Cannabis sativa
aatattatagtgaagaacctaatactaaattaaagaaaaaaaaactaattgagaaaaaaaattagaataattaattttttgaaaaaaaatatccaaactatttaaaaagacttgttaacatatataattattttatatacttaacgtgtatttttctttttaatgaaaaaattaaaataattaattttttttgaattgtatataaatatttataaattattaaaaaaaaaagagaagattaaggataaaattgtattttaaatcattttaccctaataaaaaattaaaaagtgagattaattaaggagaaaataattaaaagtatttagagtaattttaaaatgtcacatcatcgcttcatatctcttctttatatagatactaggaaacaggccgcgcttcgcgtgcggcgattaatggtaatatttactgttatagctaatttgcacattgtgtattggaggacaaatacaaaaaataggccaaatttaatccaaaatatacaccatctattggagatggtcttgtcttagatgtcaaaatagataagaggtctaccgaaataccctttaagtgcatggtagacttacccaataatctcttactaacttattatttgtttctaacaaaaactaattagaaaaacctaaatttttagaacatcataaaataattgaagtttgaaatattacaagcacaaaataggaaaaaaaaaaaa

SEQ ID NO: 148088 - DNA, 510 bp, Cannabis sativa
  modified_base (100)..(109): a, c, t, g, unknown or other
  modified_base (150)..(176): a, c, t, g, unknown or other
tgttagtgcatgaaaactactttatctctcaacgtgtcgtataaaaaagtgatccacaacggtcttggcttcatccatgtgaaatttcatgatttttcgnnnnnnnnnnggtgagattttaacagaacactaatgagtgtaagagtaagnnnnnnnnnnnnnnnnnnnnnnnnnnnaaagaagaatattttaaattttttaattacggggccaatttaaccaaatttaacgcgaatccaatcttcatgttcaagtctttgtagtatgaattcatcgtgactagtggcgaaaaatattctaagatgagtttgtgctacatttgacaaaggggtaccactatcagaaatgtaagatttttactatttcgattaaaataattgttagtgcatgaaaactacttcatctctcaaagtgtctaatagaaaagtgaagcacaacggtcttagcttcatccatgtgaaatttcacgattttttcgagatgtgtagcgtgagattttaataaaacact

SEQ ID NO: 148089 - DNA, 519 bp, Cannabis sativa
ctcctgccagtcctttctctcgaccagccaatgcaagctcaacacttgtgcgctcctcctttaatccgaatttcagcagcaaatgcatgtgcgccaagtgtcgtctcctccttcaatctcccatttttcaaattattttaaaatgcaatttcaaaataatttataattttatatttcttggctctctttactatttcttccaactaataaattgcaccttgtatattttaccattttaccctcacctacctcatttatgccaagaaatctctagaaaaaaatattaaaataattattaattattttaattcacctattttggctataaatagggaagagatgagaccttttgagacacaacctctcaccccttgggggcagcccctttcattctctctttagtgtaatttttattgtagaaaaactataacaaaatttctcttcacttttcttctcatatttctttatgagaatgattagcataatggcctaatcttccttggaaggttagggatgatt

SEQ ID NO: 148090 - DNA, 506 bp, Cannabis sativa
  modified_base (421)..(452): a, c, t, g, unknown or other
aaaaaatatctgaccttagatttaaaataagataaaataatcaaattttaaagaaaataagaaaagaggtaagcaaaaacttaatttttatctattttcaaaattaaatttcactaatatataaaattaatctaaaaaaataaattaatttatttctgataattagatttgaaatatgaaaattaaaaatcaaaatacaaaactatacaaaaaatcgaaagttaattccatgaaatagcatgaaaaatcgaagaaaacggaaaaattgatgaatagtacgaatggtatgcatagcataccattccgcgcgtgcatctaaggggctggccgagtttccacggtgatgggaggctgcaagcagccattccgcacgcgtgggaagagtgcttatcaccctgatttttccgattttcaaaaattnnnnnnnnnnnnnnnnnnnnnnnnnnnnnnnntctgtaaaaaagtaaattgcttacaattttccaaaatattcaataaaaataatt

SEQ ID NO: 148091 - DNA, 548 bp, Cannabis sativa
  modified_base (501)..(502): a, c, t, g, unknown or other
atgtgtttaagtttcattgttttagaaatttatatttaggatgttaaaaatatacttgttagtaaatttaggtcctggtaaaatatattccaacaactgaatttagagcaatggaaatgatttagtaaggccagtatagtctaattaaaaatatcgacatatgtagatatttttagcaatgagacgagcacagattagttgtaatctttacattaaagaattatggttaactttattcatattatatttcatattttattaaatatttaatacttattaatttttattctttattttgtaggtgttctattagaggtatggaagtcacaactctcaagtttgaggttttttttcctaatattaaggttttattgtctagttcttctaggatatctatgcatgcctttaaaatagacaatgaacttcttagataaaagaaaatcctccattttttgagtaacgtagttacctttgttatttttgttgagttttgtgccctanntaaaacccatttcaatataataaaatttacttattaataaagatca

SEQ ID NO: 148092 - DNA, 1031 bp, Cannabis sativa
  modified_base (431)..(446): a, c, t, g, unknown or other
gggaatgtgtgccctactgaaaaaatatagaaagacatgtagctcggttctagggatcaccgcacaaaaacactataaataccccccaaacacattaagacggcggtcgagaatttagggtttcataagaacaaaagagggaaaaactatcaagaacattctttgtaataaatactctcataaataaaaaacactcatggactaaggctcattaatgccccaaccacgtaaaaatctcatgcattaaacttcctaaagatttcttatatattacttaatgggttgccgaaaacctcggtcaacataaatcattacaatggctctgaggccagttattggaaatattttaccaggatctagatttgctaccaagtatgtttcattaacatcctaatatgagttctaaaacaatgaaataaacacgtataaannnnnnnnnnnnnnnnattgggtgcagcggaatataaggactccttccgtttagatctctagcccttgattcctttatgtagtagagcattatcaagatctaaacctggatctctccttcttgagtctgattctccttcttgtggattggattcttcacaaccttccacactatgattgagatatgacttgatgtgtgtcagtactcactctatcactaaaggctgaataatatgaagaagaatgtagaggaagagggtggcggctagggtataggtagaaggcttagaaagtttctctgaaagaatgagatgcatcaatctttttcctgaagccatcactacctatttataggtaaccacgtaggtttaggttagaattaattagcgttaaaataatagaaaaataaattgtaaattccttactgtggccgaccataggatgttattgggccccactttgcaattttggcattttatcatttttccataacaatttctcaaaaacgccaattttccaatttaaccatttaaacgccatttccaattatttaataactaaaaattaattattaaataatatcgtcatttaatatatttatt

SEQ ID NO: 148093 - DNA, 1844 bp, Cannabis sativa
  modified_base (445)..(450): a, c, t, g, unknown or other
taaaaatcacgtaatacgcctcagatagttagggtgttacaggcatattcacagctgtgtgaaattcaaataaaaattgaatttacttaacgtgatatgtaatcagatcccatgatttgaggggatagtcgttgtacagattacagtcaattttgtaataaactacctactatgtgattataaatagtggcatgtaagaccaaaaagggggacgaaaaaatgatatatgaaaaaggcctttagaaaactattagaaatctaataaaattgactcatgggctatgcagaattttaactgtaaaaccacgtaaaagatcgtgtgtgttcatacttttatttttatagcttttattttttctgtgtgagattgtcactattacgctgaaatttggttaaagaaaaatctacgttaacaatattaaaattatcttatatgataaattannnnnntaataaatttgaaattaacctagtgttaacgcaaattttcgctaattaaattaaagcctatttcatgatggatttgcacagaaataataattgtaaaaggaaaagaaataacaccaagctttttgacgtggttttacagttaaaattctgcacagtccacgagtctatcttattagatttctgatacaaaacttgggctttttttctaaaggattttccgtcccttttcagtgtaccctgctcctatttatagttacataggagagcagttaataattacaatcagattaatttttcacaacaattatccccctgaaattgagagatttgattacatcccacgtaaattaattgcacttattattcgaaaatacacaactgtgatttatctccttttaccgggtcaatgttgacgtggatttaaacacgctccaaagtgtatctcgtagagttatcttgctgggatagctacaatagccgcgatagcgagctgaagctttttccatgtctttccaaggttgataatgtaaataccgttgtttctactattgaggacataacgctccatctgacaatcgcagttcttggtgacaaggtgaacttcagcagtcaacatcattttgaatgtaagcttctatctgagagagctgactcgacggagcaatgaatctcattgaaagatgtttgaagttgattagtgacggtaccatgagtatgcctccctatagtgagatggatgcctcgttattcgttgttcaagttcattcagttgttatgcttagtttgtataatgtacattatacgctaagtgttttaacagtcaacatgtctcgtttatatctcttcatacgctcctaatgatcgtgtctccatatacgaaatggtttctcgcaaatatgtgaattaattgttggtacatccgtgtctcgcttaagactttactgtcaacgagttatagattacactatcagttccgcatttaatgagttattctatttcaatatcttccaatataataattattatattcgttgattcgtattcttccaggttgacatgtgtcctcctttgaagtgccagccgaatttcgggtataacaccaagatatttttatagacattctaaccataatattttaaaattcaaaagtaggttattttgtgaaatattaattttgtttataaattataagttaaaaaaattatattttatatcatttcacttattacaaatttataaatagtatttaaaatattaaaataacctagatatttttgtagatatttgaaaaatgcttaattcctgatattttcacatatgatttggaaaattattatttatttattattttattcttaaaataataatttcctaaccatatttattttaaaatt

SEQ ID NO: 148094 - DNA, 566 bp, Cannabis sativa
  modified_base (503)..(518): a, c, t, g, unknown or other
aggttttataaaacttgttttaataataaacaatataaaacacacacatgtaacacattggatagttagatattggatttatttaaattaaattaattaaataattaattaattttgaaaatatttacatattaaaatattattttcaaaaatttcaaattaaattgaataattaatttcaaaaattaaatctgttaaatttgaaaaattaggttttcagctaacataaatatctattttaaaaaaatgctaataacttttcaaatttcatgttattaaaataaaattaaatattcaataaaataatgataaataaatatcatttttctaatttttacaatttaatttaaataaaataacaaaaatttaaaagttaactaatatcttatttcaatttaaaatttcacgattaaaataatcttattttaaatttcaaaccaggtcattttttttaagaaaataaataattttaaatattagatatctgaccttaaatttaaaannnnnnnnnnnnnnnnaaattttaaaaataagataacaaactaagcaaaaagatagatttttac

SEQ ID NO: 148095 - DNA, 632 bp, Cannabis sativa
atttaaacaatctattttgatcacatacaaagtactttaggaatttccattgctcatatatccctttgatattaagtagttaatagtctattatatgctcgagcagttcattatctgccatgcttttaatttacgagcaattttcaattttgcctcgcaataacagttataatctatttcaagcaaacttgaatatacttttaatgattttatcactttgtatattttttattgcttatatgaatagttagatcgtctattcatatactaggtttaagtacttttttgaaggcaccttgatgtctcgtttaatacttttctatacaatgcgagccgttagtattcagcttcgtattgtgagttatgagttatatctcatttgtaacttttgattttcctttctcatcagacaggttttgaatcaaaaagttatttataatagtttgatcctcatttctcgttagaaaggtttgatcaataattatttttttttaaaattttttaaagtgtgggtttgcactatatcatgtaaattcagataaatttcggttgatcatacacatatgcccctcaagtaatttcaaagagtaacactttgtaattacttgaaaaaaatgattaactttattcat

SEQ ID NO: 148096 - DNA, 584 bp, Cannabis sativa
tataatcgcaaacatgtcgccaaacacacatacacgtcgataaaaccatgaaacctacgtactaaatgtaatatatcgcgaattatgtcgccagtatatcgctaacacgtcgtaaaaatacagttcataaaatcatcaacttttgtagacgatgttgcgttatgtcgtgaacatagtcgcgatacatcgaaaattttgcaaaaaaaccagaaaacataccaaaacaataaaattcaaacgaaatcaaaaaaattgaacataaactaactacattactttacaatgaaccacaaacaattaaaaagtaatgaaacaacaaaaaagtttagccaaataccttttttttattgttttggatttgggttttgtttaggggtgtcgcgaattggggtttgtcgatatcgtctccggtggtcgcgaagtcgtttgctggtcgtcttaagtttcacgatttcttcttcgaagagttcgcgatgtcgtctgagagggtttcgcaatttcgcaaattgctcaggacgtgttggggtcgggtggtgagggggtggtccgtgagtttcgcctggtggggtgtcgttggtggtccg

SEQ ID NO: 148097 - DNA, 829 bp, Cannabis sativa
taatgggctgatccattagccaaggcctttgagctgggagttgagtaacctcccaaacctcactgtgcttcacggcccctgcgtaacgtttcagctcctttcgggtagtacctccgatgtgaggtccccctgagatcatggctactctcccgttgggtcttggcggcaggccaggaatttgttgggtttctcctgggggagcaactggggctaatgctccggttacacccctagtgctccttggggcaaaggccctcctgcctgaactggattgaggtgaggcaaccggttcttgatccattcgtaaagatgccccaataagatcaagttttcgatctcttccttgaggtttttgcattcattggtgctatgcccaatgtcgttgtgatactcgcatcttttgttgggacgcctccgggagctatccctgtacagaggaggcggtctccggtagtgcgtattttgcctggtagcgaaatacacacgatcttgggagtccgttagctccgtgtactgggtatactggggagtgtacccccttttctgccgcttatcttctgtccggttgctaccttttgaggacctcttcctctgagagccttgagagggacctggtaagcttgcggccagagcggagtgcgacaggacttgtccactcatccccaaaggattcccaaactgagaagatgcaggggctaaggtctgaccctgattatatcccagggtagcaaaaaattgtatgccactcatcggtggggcggctgttggtaaggtccctgggagctgagctccgggcacatatcctgctatcccggtagggtagtatccc

SEQ ID NO: 148098 - DNA, 771 bp, Cannabis sativa
cacacactaatgtctgacaagtgtgtacaagtttgtaagtctcctctagtaaaaaaaatcttggttcacattttatgtaacttgtctattttttcttaacatctggtaagtataatttgtatttgagatactaaattcttatgatctttgaaaacataacatggttatttgtctttttatgaatcttggaaagatgcatgcattagaataacttgatttttgtataaaatattttagtttttttattattttgaaaaaaaaaaatgataattaaaaaaaagtgtcgtgtgacttcacttttgggctaagaaagattgatcatttgtctttcttttggtaagtatcaacatgtgctttatttggtaaatttttgatgagtttcctcttaaaatttgatttcatattctttatattttgtttaatcgttgatcatgattgtttttcagatcttaatttttggaaaatcttggtttctttttatctttggcccttatagataaacaaaaagggagagtatttggaattttaattttaattgtatactcaattgtccagggggagttgaggtttgtatttgtgttcatctttggtcaaagttagctttttattttagtttaatgttgttcttttcagggggagtttttatatttatttcgctaactttattttgtaggtgtttgttaattaaaaaaatttggattatctaaagtgccaaagggggttacgtatttttttttttttttggcaatttagttgtcaaaatatttttaa

SEQ ID NO: 148099 - DNA, 1191 bp, Cannabis sativa
gcagataatgttagggtcaatccctatcatatctccatggctccaggcaaactaatcctggtttgcccttaaaaaacttataagctgctattttaggtgctcgtccaggttcttcccaatgtaaacacactttgtgggatttcctaggtcgagaataacttcttccaattcttcaattggttttaataagtttctttcattttgaacccgggggtcaagatcctcgtccttcttttcactttcttctgccaagattgccattaactgatgactgacttttctatgctgcaactctatgcgatagaaatcgcgagctagcatctggtcgccccgcaccactcccacaccttttggtgtttggaacttcaaggataggtgcttgatcgaagtaactgcccctagtccgatcaatgcaagatgatccaacaatatgttgtaagccgatggcaggtcgacaactagaaagtcttgaataattgtggcggataggggtgcctcgcccatggttaatgcgagctcgattatgccagactggcaatactgtcaccagtaaagccgcagagatttaccatacaaggcctcaatttggctttttcaagccccatcttcctcagtgtttccttataaagggtgtttactgagcttttgttgtctatttgcaccctctttatccttttattggtgagttgaatggtaatcaccaatagatcgacatgaggatatctcacgcttttctcgtcttccactttgaatataattggaggttattcagttttcaccttcttggaaggttctggggaaaatgctgactgctcgttccttatctctttcacatatctcttttgggcgttattgctctcccctacaatatgcagtcctcccaaaataaccaagatgtcctctcctttaacaggaagagcttgtaacacctgattgtttgggttgtttggcacactaggttggttgtgtccattgctctttcttttcacatactgttagaagtggcctcgagcgatgagactttctatctcatccttcaactggtgacattctttggtcgtgtgcccaatgtccctatgatatttacagtacctgttaggatcgctttttttcctcacatgcctcatgggctcgggcttgccgaaggcaaccttttgctcatgtgcaaggtaaatattctctcgagtttca

SEQ ID NO: 148100 - DNA, 537 bp, Cannabis sativa
gtggaaccttctgacaggaaaccaatccttatgttgtcggattttggaagctaaatatcttaaaggccgacactttttggactgtaagccgaaagcctaggactcgtggttttggaagaatgtgactaaagcaagagcaattattcacaagggggcctgtaggcgaataatggatggtaaggatactaaggtttggcatgacccttggatagcccacatgaaaggttcttaccccggccaagaggcccctttctgaaggaggatttaaaagtcgctgatctcctgctgcccgatgggggatgggatatccaaaagcttaacagcttatttgataatgagactatttcggctatcttgaatggaggcaatccttcaggcataggagaggacaattggttctggaccttagaatctaatggttacttttctagcaaatcatcttatcgggcccaagctgcagaccgagcgatttcttgtgaggttgccccggccttatggaataagctttggaatagtaaaatccctgagaggctcaag

SEQ ID NO: 148101 - DNA, 548 bp, Cannabis sativa
gtgtgctaaaagaatggacgggtgaaaatgctctttcctttctagagggggtaggctgaccctcattcagtctgtcctatcctcacttccaatttactatatgtctttattcaaagctccaaagatggtcttaaaggaacttgaaaaaatgatgagagatttcttttgtgaaggaggagatttggcaggtggggatcatttagtggcttgggatgaggtgtgtaaacccagacttgagggtggtttagcaatcggaagactagaagtgaggaataaaggattgcttatgaaatggctatggagatttcccttagaatcgaactccctgtggcacatagttattaaaagtcgctatggcaaagcagacaatttttgggatactaaacaaggggttagaatgtccccaagaggaccattgaaggatatcgcagacctttacgatgaatatggtaagttggtaaagtttaaagtaggaaatagggcaagtattcggatctgggaagacgagtggattgggggggccttcactaagggatcaatttccaaat

SEQ ID NO: 148102 - DNA, 579 bp, Cannabis sativa
tcttttatattgtaaacaaaacacaaaaaaaaaaaatgaggcatccatcttccacactcacggacagaaccaccagaggaacacctgaataattggaaaacaaccattaatttcggtgagattgagaaaaaatagtaaaatcgatatcaaataaataatcatgacaaaacaactataaaataacactaaaataaatcaaacaaaagaaaggaaaaaatgattaaaaaaattaaaaatgttctgcacaacctcaatgtaccaaatgcaatagcatttatatttgcaagcccaatattaaaaaattagaataaaaaaactactaatacaacaaaaaaataaatgtaaaacaataatcagatataaccgcttagaaaaacataaaagaaccacacacctcaaaatattttttctagtgagctcgtcaaatgtatttataggagaactagaataaaaaaaaaaactacaaaaaaaccataaagaaggatgaagaaatgtattttatagcattcatcttccacacccacagatagaaccactatagcaccacgagaacaccaaaaaacaatcattaattctagc

SEQ ID NO: 148103 - DNA, 715 bp, Cannabis sativa
aaaaaaatatgtaaaagtgaaaaaaaaatgaaaaatatcgtatacatagcaattcccctattttattacttttttaaacttacaataaaaatttcttttgcgttaattatgcttattgatccgtaatatttttttagtgttacaaatttttagactttaaacactttttaaaaaataaaaattaaaaagtttataaacaattttctttaatttataaaattttaatattattattttcatacatcttgataacattttgaaactttatatttgtttaaaattttatataatattttttttaaaaaaaaaaaatattatattatattttctttgcaagtcctatgaatggcctacaaacatttttaaacccttctttgcaagcatgtaaacaaacatagcacctttggaatattcttttatcaccttccgtctcacacttaattttgccagtgctacctgaattggtctagaagagttgtttgaagtaatcctccaagattgcatactgctcaatgattatgccttctagctctgcgtttgacatgttctttgccctataaaactttgtggtagttacctttgaatattttgtatttttgactatcttcaagaaggacttgtactcaattgatggatgtaatctgaatgtgtctctgaattgttctgctagccattgtgtagtaatatgtctattgtccaaaacaatgccacagtt

SEQ ID NO: 148104 - DNA, 636 bp, Cannabis sativa
taggaatcatattcatttaaaaatataaattatatatatgttacctcataaagtaaccatcttcattacatcacattgcctaatcaggcaagtcgatgctttaaactgataacttgtattgtattgcttaatcaggcaagcttgtgtcatagcctaacaccatatattgcataactacatcacccaatcaggtgagcccgtgccaaaagcttgcactcatatatcatataattggatcatccaatcaagagagcttgtgccacaacctaaaatctatatattgccgcctaatcagacgagcttgtacctacactaagtacataattgcatcacctaatcaagtgagcccgtgccacaacttggcaccaatatatcacatcgtctaattagacgagctcgtagctacgctcgatacttatcatatgtcactgacgtctgtacctatgcctgatacgtcgctaggaagaaacccaataatagttcgatctatgccataaccaggcatttttatatcactgacgcttgtatcttcacgtcgctaggaggaaaccctacaacagtttcattctatgccataaccttgaaattttcgtatcactgacgcccgtatctacacgttgttggaaattattttac

SEQ ID NO: 148105 - DNA, 652 bp, Cannabis sativa
tttccctatcgataaataacatgacaataccctaaatatctcaaaaatgggaaaaactagggttccaaaaactgccccaaccggtaaaccagttgccaaccggaatttcgattctgtagggtttccctgggaccaaccggaatttcggttcctacaggcccctctgaaccggaattcggttcagtgcaggaaagaccgaaaattccctaactcgaccaaatcaaccccaattcaatccaaactttccagacttgctatttagaccataataaacatatctaaggcaacaaaataaccacccattctcagaatcaaattccaccattaataagccaagcttgagttcaaaactccaaagcttgctcaaacaacataacagctcctaaaaccacttccaatcaactcaaacatacataaaataactatagaaacaatcttcaaacaacaacagcaacaacagcaactaaaactctatatcatgcaaaactattttctttccttacaactcaagaaaacaaaaaggaggttgctagaaattataccttagcttgaattacactttgagctactggaaaacacagaaatgaaggagaaaaaaaatcaagaaccctagctggttctaggtggttcgaaaatgagagagagagagaga

SEQ ID NO: 148106 - DNA, 793 bp, Cannabis sativa
gcatgctattacttattctgtttgttcttttctgggttcgcattcgaaatttctgggcatgcaagtgtttaaatccttcatgtagtctgtttgaatttatcactctaatgataggattgccattgtcacgcctctttttttattgtgtattttctttgtagaaggccatacgtttttcgtataatggttgcttagggcatagaacagacttttctttctgttttctttatcgcgtaaagccgtcttctgtaagtttactgcacacgacacttgtccagggaatccttctagggtttcctgtgcgacacgtgtccggagggggcctctttccagtggttaggggacccccattccctttttcttgatttagggtttggtacggggcctaactgctggaattttacccttttttacagaatagaaaattgtctgcttccgactcaaagtcctcaaagaagagtggtaagcgcatggctaccctcgaagaggtctccctgggacccgttgctcaggaggggtataagtcccgggcgaccggatgggaagcggctgagcttcattcgaccttgacctgtccccaccaactggagaacattgtggaggttgctggaatcaagccctctacttcaggaacctaccaccggccacctcgcgacgcggagacgcccaaccacaactacggcagctttggagcatggagccaaacgcacctgatggccggtgccatgctccctcttcaggattactttgttaattttctagtttttgtcggccttgcgagatcggaagagcg

SEQ ID NO: 148107 - DNA, 680 bp, Cannabis sativa
ttgattagattttttctatgcaataaaagataagaaaggccgaaattgttactccttttttttatgcattaattttttttttaaaagcataacaactataatgtatgctaactaagagagtattatgcacctatgctcactttacagtcagtcaatggtagttggaactcattcatggaggaagatgtttggaagatgttgtggaagattaaaacccttcctaaggttttacattttacttagaaagctctttcgggttgtttgcctacacgtactcaacttcatagtaaacatgttcctgtggatttacattgtgtgttagggaagagtcaatttttcatgtgttggttcaatgctcctttggtcattcttgttggatccgatcagcgttaggtgttggccaatttgcaacaaccaatttttttgactggtttatggaagtgttggcagtaggcaatatggaattggttgaagaagttgtcatggttggttggacaatttggaaggctcggaatgatatgctttggaatggtaaaagttgtagtgctcctgatgttgattggttggctcgtaccattctttgataatggacgtgtgctcaggctaagaggttggactcggtttccctggcttctaatcgatatgacacaagagatcactggtccaaaccggctgctgga

SEQ ID NO: 148108 - DNA, 505 bp, Cannabis sativa
  modified_base (196)..(208): a, c, t, g, unknown or other
ggcacgggacttatagttctcctgagccacgagaccctgcatgacctcctcaagggtggccagttgaacctctcccttcttggaagacttagaaccagacgcggaagcatacattttggttctgaaaaaattgacaaaatccagcagttaggccccataccaaacgataatgttcaaaaaagggaatgggggtccnnnnnnnnnnnnnaagaggccccctccggacacttgcgaaataagaaaaccccaagagtctttccttggcaagaatcgggtgcaagaatcccaaaggtagtgacattgcgaaagaaaaaaaaaaggggcaaagccgaaaaagcaagatctactctaagccctaaaggcattattacgtaagatgaggatgattcgtcaacataaacgtagtgaaaaggagcagtctaaacgcaaaaaaataggaatctaacgcatcatacaggaactcaggcaaactcattcctataagttcgacatccaacccagaaat

SEQ ID NO: 148109 - DNA, 582 bp, Cannabis sativa
ttgtatatttttagattttaaaatgaacaatgaaatttcttaaccaagcattataatattgccaaagatattaattaaatcatatcatatgaattatattagaggaaatgctactaaacaagatatggtgacattttcatatttttatatttttataatattttaccaaaaaataaataaaataatcattaaatcgtttttaaaatcactaaatatttttctttaatataatattttaaattttaaataacatgataatatcacgtgacaatataaatgaatgtatatttaaaattagtatgagtaaaatttaatacaaaattattatttaatttttatttaatgattaaaagacattttttatttcatataataatttaaaaaaataaataaatacccgttgcgaagcgcggattgtttactagtatatatataaaagagaagtatgagacggtaacatggtggtctaaaatctgtccaaagctattttttttttctccttaattctctcatgtttttaatattttattaaagcataaatttacaaattaatattttactattattttaataaatcttcta

SEQ ID NO: 148110 - DNA, 593 bp, Cannabis sativa
tttttcttgtaattaaattattttctcaatcaaagtaccaaagaggaagattgttaattctatttttagcatctttaatttgacaaaaatattttataatttgaatattaattttagctgaggtgtttatttggttttcatttttttattgattgaattatataaggaagaaaatatgactagcttttttatttatgaaaagtaagacataaagggtaagtttaatgactcatctaatttttttctatcaagttgtgtatatctgatcccttgtgagttttctaaaatatttgatcatatttcttgtgaaaaaaactgaagcaagacttttcttttatataaaaggaaaatcgcacttagtgttcacgattctgtgggtacggaacaagaaatatatgagctgattgaagaattattttaggaaagttttcaagtgagttttggtcttgtttagaccatgtatgagctgtttataaggtatatattgattataaattgcaccttaaagcagctaggtcgtgtatctcttttatacactttgaattgtattcatatctttagaaaagagcgtctttgttttgttgagaagagct

SEQ ID NO: 148111 - DNA, 590 bp, Cannabis sativa
ttctatttttaaaaacaaaaaatatttttttagttatgatgccaaacatgaacttagcttctcaaagttttcatgcctagtttcatattttcacttaccaatatagatggttatttggcgatgcttttaattaattaagtctagttttatttaaaagagtttgttgaccttgttaaagaaaaaaggtgttttggttggaaggtcatcaccgtagctctttcaataaaagattacatcttcttttcccttaggatttttccaatcaaactgtcctttttttctaagtggaaaatttcatctgattccatcttttagttttactataacaaagagaataagaagaacactaccaaaccccattatggaaatatactttttaagtgtaaagtggtcaatcccaatgtctggctgagatttaaccatcatcctttaccagctaatgatttgctaaatttaaaacattgaacaaacttttttttttttttgctatttacaaatatgaaaaacataaaataaaagttttcaaatgtatcacatggaaatataattacactaaatataatatttttttaagaaaaaaacttaaaaat

SEQ ID NO: 148112 - DNA, 595 bp, Cannabis sativa
gtcgggacctaaaaccgcaccctgggacctaaaccagaaccagaccgagaaccgtcactgtgatccatatcttgactcgagattcgcataacgaaggcctagaacagaccagtagtcagtgtctagatctgggactcagactaggaccagaagccagacgaagaaccaaacccgaaccaagacctagacctgggacccaaaattagaacatcaataagaatcgccgaaccaggaccccagaacaagactagaaccgtgacctggacccggacccagacatagaaccgaacacagacatagcctgaaaccaaaactgagactggaactcggtcccgaacacggtcgtgtgcccagaccgaaattgagacccgaacctggatctaaatctgggactcgatcccaaacacggactttgacctagatagggatctggatacgaacatggactcgggcaaggacccagactgggattaaaatgcttgacctatatctcgacgtagatcctgacccagacccaaactttgacccgcactcgttagccgaacatggacctagacccgaacctacactatgatcagggtccagacctggacac

SEQ ID NO: 148113 - DNA, 500 bp, Cannabis sativa
actcggtacgctagtcatattctatgcgtactgatgtgatactatcaaatagtacttaagccaacatacatttctaatgtaacctaacaggcttaactaacatgcacactaaacatgtaaatacatatgcttatcattatactaatcttaccttgtttctgaatttaggtgtgtccgccaacttgagtggaacagatgctcgacgaattacaggcccgtaaatcacattattcgtaaaattggtgagtgacacgctaaatcacttaccggggacttaaacttgaaactaaaagtttccctatcaataaataacatggaaataccctaaatataacaaaaatagaaaaagatagggttcctgaaactgccccaactggtagaccggttccctaaccagaattccattcttaggggtttcctggggactaaccggaatttcgattcctacaggtcccactgaaccggtcgaccagttcagtgtaggaaaacttcaaaaattc

SEQ ID NO: 148114 - DNA, 863 bp, Cannabis sativa
gaaagaggccccctccagacacttgccaaaaaagaaagccccaaaaggttttccttgacaagagttggatgcaagaatccgaaaggtagtgacattgaaaaaaactaaagagagaaagggaaaaaaaaggggaaaactaaaaaggcgaggtctactctaagccctaaagctgtcattacatgaaatgagaatgatgccctggcaaaaacatagaagtaaacgcaaaagagggagaatttaacacatcattcagaaactcaaacaaaactattcccaaaagttcaacatccaacctagaaaccgtaaagcatgctatataaacaaacagtaagcaagcgtacgagatatgaagaacttacatgaagtttgaaggttgggagttggtgttgatcgccggtaaaacgtagactggcagcgtcgaaggaagaagagcaagaaatcaatggtgcttaaagtttcttttctctttagaaaactctgaggaaatttggtgaaatgctgaaagtatccaaatgaagtaagaaggctggcttttataggccgaaacaggcgtgagacagctctgatcagccaccatcgaacggttaggatggcaatcgattcaaattctacagatccaacggtttgattaaaccctcatcaaggcggtagaaaacgtttgagtacccatctgacacccatttaatgcgccgtatcaataaatggacaagaaacgaatcgacgcctgcaaaaagaaataactgcagtaatggtgatcattaatatatcaccacgcgcccaaagcacatgccaggaagctgataaggcaaccggaggcatctaagcaagccttgttcactccatcaccaaacaaggcttggggg

SEQ ID NO: 148115 - DNA, 589 bp, Cannabis sativa
atttttaatggtggtttccatataaactgataggtccaacataggcctgattgtttttaaatattttacatacaaaaatttgcaagaactatatgaaaacctatttatggcacaaatgtttaacaaagtccaacaataattccacaagaatacataatagtacaacacataataatattaaattcaacattcatttttaaccttggtaggtgcaagtgcttctgttgtgccccttggcaccacatttcccataattttgttttatcacaatcttttcaccattacaagtaattcggtttgatttaattcttccaaccttttacttcttaggtctccctactggttgattctcaatacgcactccaactatcatgttctttatgtcatcaggcaattcttaattatcctcgccacaaagtggcataattgtaccttcatatgtgctcctccaatattttgtcgtgtaatattgcgagcatagtgtgtacatggtaatacttcgttgctgagctacaacacatgcatgaggatagggaaacttcatgatttggaacaagccgcaagtgcaagtctgttcctgcaagtccac

SEQ ID NO: 148116 - DNA, 511 bp, Cannabis sativa
aagctagtatactaagactcctggaacaccaaccaatgatggctacattctttcttcatcatcgtcattcttttaatttgaagtaactaggtagaatttttggtattattcctccaaatagaaaggtctccacaatcatcatttttggaaagttattcattcgcggttgcaagtccaaaagggtgtggatgatagtcgagtccagaagggagttcccggttgactttcaagtccactctgagtccagttcttaagatagttagcgctcccctagaaaggagttccagctggctagttgtccctcctagaatggtagttctgaatagttgactctagtatactctatcctatctgaaagtgtcttcagcaagtgtttgtggtctgcgagtttagaagctcgtttatgttctcagaggccataatacttaagctgatgtggagacttcgctaaaagaggagttggttaagttagttatttctaactaacttaacaagatcggaagagcggttc

SEQ ID NO: 148117 - DNA, 567 bp, Cannabis sativa
  modified_base (448)..(449): a, c, t, g, unknown or other
  modified_base (529)..(531): a, c, t, g, unknown or other
tgctcttcttgccgctcttcactgtgttttaggtctccagatcgctctccctgatttccaatcgcagttttctatttatatctaatttttaggattctttggacaaaaatacccccgagcgtacgggcgctcgctgtggcggcagatggttttgccgcggtgactggggcttgtaaaaacctcgtcgctgtcttgactttatggtcgcggccatgactatctcaccgcggccagaagtgcatttagcctgaattcggcgttttttcttggctccagttgtcttttattgcacttttgcattccggggcctccattactccgaggaacttgaaaacatagaaaacaagcatcattctgtcctaaaacatcgaaagagaacataaaagtgatccaaagtataggctagaaatagcctaacatttatacgctcccaaaggcggcttaaccnntcgttctggagataagcatgtcgatccttttgccataacaatatgccacgaacattgactatattcattaaataacttannnatttgtgagaccacaacatcagaagggttggctttg

SEQ ID NO: 148118 - DNA, 555 bp, Cannabis sativa
  modified_base (36)..(68): a, c, t, g, unknown or other
aacattaaatgttaattctgatctatattaataagnnnnnnnnnnnnnnnnnnnnnnnnnnnnnnnnngggcataaaacccaacacctatcaacttccagtagaacattttgtcaattatgatgctggatcaagcttaaggcctccttgatcccgatgatttcggcaatctctggcctaacaatttcctctttgctaataatgaaggcctcgagaacttgaccagcatggttatgggctaagcaacccatccaaaaatggctaacatcattaaatagagcaccgtcaacattgaccttgatttgatcagaaactagtgtagtccaaagcacacgcgaagacagtcttatcgaactgttagacaacgaacttgtcgtccgtgactgtgcaaaacgaaattgatcaaggaatgatcttgccaacaaaaccactgatgcagcagtaggatatttttgcttccaaacaacctcattacgggccttccagatactccatgcaaccatcgccgcttcctccaatgcttgagaactgatccttgccgaaagagcttgaaacc

SEQ ID NO: 148119 - DNA, 565 bp, Cannabis sativa
atcgatttcgggttcaacgcaaccatgagaactctccttcgaatagaccgattatgactatgggtgaagcttcacggattgtttctgcggttgagaaaaatcgggctcgttattcgggacctacaccggaggagcttgcacctacttcgattctagaggctcgggaaagagaggaggagttggcctcccatgatactgatgttactaaaattgccgtggcacctatgggtaatgtgacggttgaggttaatgtggaggggttgaagaaagataagggtgtgggcagggataagagtctaaatggtacatcttcgggtttggatagtgtgactgaaatggtgattcccgtagataatgagaaggaagtgatagtgggtgagggggataatggcaaaggtaatggttctactagtgttattgtggatttggttactgagatggaagttggtgaaagaggtaatcaaaagttcactaaagaacaaaagggtaagggtgttttggcgccttcttcccaagatgagctctcttttagccatgcgctacaacatacatttgaaccacttat

SEQ ID NO: 148120 - DNA, 518 bp, Cannabis sativa
  modified_base (459)..(465): a, c, t, g, unknown or other
ttcatccatatatcacatcagctaagcaggcaagcccatatattgcattgcctaatcaggcaagcttgtgccataacttggcactcacatacattgtatcacctaatcaagtgagtccataccataacctatcatccaaatatcgcatcacgtaattaggcgagtccatatatcacattccctaatcaggcaagcccatatatcgcattgccattgcctaatcagacaattgacaatcaagaaacctcccatgccatgtagtacattatacttttcttacctttaatccagattcatgcatgttgaccaactcaagtggagaaacattcctgatgatctcgaccctatgtcacaacaatagtaaaccaataagtgtctatcccaaaatactacttaatatttacaaaaatcagtctagggttttttattcaaccccacggtataaatacactaaaatannnnnnntattttggctctaaaacatacaccatattatagagctcatcgcaagcttcgaa

SEQ ID NO: 148121 - DNA, 605 bp, Cannabis sativa
  modified_base (474)..(475): a, c, t, g, unknown or other
cacctaacttgccaaaaaaggactttacaggatcctagtggaccagaaagtttccaatgttcatggagatgagaagttattggcagaaactagaggaagaaaagaagaaacggagaagatggtgtactacacgatcatcatgtatctatcaaacagtgttcgaagaaaattcatcgcagagaagacggcgaaagaagtttcgaataaattgaaagatttgtacttaaagccatcaattgttagaaagattaatttgctagaaagattatatgggtttagaattatttcttccctttctttaaatgactccatcactcttggatctatgaacttctagaccaagtatcttctttacttgtcccaattctttcatgtcaaattctgctttgagtttatctttaattcctttgattactgccttgtctttgcccattattaacatatcatctacatagagtagaagatacacaactnntgactcttctaggtgcttgaaatacaaacaatgatcaaacttggaccttgtgagaccaatctcctgaacacagcatgtcaaatcgtttgttccattatcgtggtgattgcttaaggctgtatagggactt

SEQ ID NO: 148122 - DNA, 582 bp, Cannabis sativa
tttattttatgaaattttcacatttatttaatatttttttcttaataaacctttcattttttcatcacaccttttcaattattaataattaattttaattttcaattaatgatggttctttggttagtaggctttataaggcaaaatattatgctagtggtaatctgttttctgctgaattgtgagacaatcctagttttatatggcgtagtattcttgaagctaaagatctaatcgatgcttgtgctcaaagaactattgctaatggggaaaatgtctccattcttaataatccttggattcctcataactctaacagctatgttgtctcacgacaccctgctcttgtgaataagtcggttagctgcctctttcaagttgatactcgtgtttgggatgaggatgttgtgtgagatctgtttgtttcccgtaatcaggatcttattttgtccattcagcttagtgattcggccactaatgatggttagagttggagacttgagacttgtgagaattatttagttaaaagtgcctataaattcttgcaagaatccaagggtgcttggtctcgagatgccaata

SEQ ID NO: 148123 - DNA, 573 bp, Cannabis sativa
ccctactgttctgggcaatcccaccacaaaatccatggtgatatctacccatttccactcaggaatctttaaaggctgaagtaaacctgccgacctctaatgttctactttaatttgctgataggttaagcatcttgacacatattgaacaacatccctcttcatacccggccaccagtataaagctttcacatcatgatacattttggttgtccccgggtgtaaggagtatggtgtagtatgagtatcatcaagaatctcctgtctaatgtctttgtcacaaggtatacaaattctatttttgtatcataataaaccaccagatgaaaatgaaaaatcttttgccgacctagcctctaacttctccttatgcccctataactcagaataactttcttaagccactctaattctttccaacaaatcagactgcaaggtaatattggcaagttttccaatcacaaattaaattcccgctctagtcatatcctcagctaactttactcaaaatcttctttagttcacagacttgccctggtccttttcgacttagagcatccgctaccacatttg

SEQ ID NO: 148124 - DNA, 650 bp, Cannabis sativa
ctttacgctcttaatgattaattttctgatcccgtctctcctgaaattgaggctaagtttgatgataggattagcaaaggattgctaaaacatcctaggtgcttatttttttattctgtttttatttttttatttctctgcatttcattttattttgccattttttttaattgaatattgtttcttagtcgtttgttttttgatataggccttacactgtttacgatgatggtgcaaagaaaatttcccaggggttcagattaggtgtagattatgttgaagataaaacctggttttatcatttgtcttgttgtgacatgtttatcaatgactcggtaatatttcttattccttttacatttttttatagttggtttatcattgttttttagtttagttactgtaatttagtttttgtaataattgttcacattttcttttgtgtttcttttattgtgttgtttcagcatatgaatactatatattctattaccttaggaaaaaacggaaatattcttctgctgttactgtgaatttcgctacaccagattgccttttcgatgattctattcaatctttataccacaaattctgcaaagccaagtcaatgaaaacaaagatgtctcacatccatgctgctcacccaatag

SEQ ID NO: 148125 - DNA, 556 bp, Cannabis sativa
tcttacagctctctaaacttataatattttatcggttgccgaaaacctcggtcaacactatataatagtcatgttattatacattattattacttaaaatgtttatattagaaattattccatgtgatatacattaaagatcaaaatttacatacatcttgaagattatgtaaaaactatattcatatattctttgaaatattgtaaaagaaattattgaataatttcttatatttttatagatgaattaacaagtttttaagaaatttaaattaatattcttcttgctcaaaatcattccccaaagtgaatgtaataattttaaataattaatgatattatttactactcaaatatttctagaaaaaattgaaaacaaccaaaagatgaaataccacacataatcaaagtgcatgaaatctgtatatcatgtgtgaaattgaataatagtggtcacatacttttagaacggacacacttataatcaggataaaattatatttgattattgaatagaatgtgaattgtacatatattttaatatatcgcaaattca

SEQ ID NO: 148126 - DNA, 881 bp, Cannabis sativa
cctaaatcttgagtaatcatgaacacatgttcatgttattagtctctttgattcactcgttaaaatttatcagagaagatgattcttataacttatattttgggaatctaataatgcagatggctgggaacatgatctataattatgaaatcctgactttcctaacggatcgaatattggttccctctatgtgttaattctagaactgaaaagttgtgcataaatttagattggatctaaattatactttcaatagtgaattaacgttactaaatgataaagaaaaaattagaaaggtaaaatagtattttgactaaactaattaaaaccaatactatgagggctaatcactggaattgaatatcgacacaacagtaaaacttagtaaatataattctataattaataagagttcaattctatatctatagtgaagtaatcatgaaattaataaataagattgatgagattcaataaataaatgtagtttattggagtttagaattataggttcatcatggtcctcggatcgccaccttgaaacattgtcaagggatgggataaacgttgtttatgccactacttcttttttgaataatttctatttttgcccccagaacttttggtactatctatttttcgccccctaaaatatacagcttgttaaaaattctccctaaaatataacagttacataattatgcccattctgttaggttctgttttttttttaaccgttaaaaattagcattttactccatgaactttgatcaataaaattttttatcctcttttatcaaaaaaattaatttttaaaattataatattctattttttaatagtaattataatattctattaattcaaaaataaaaaataaa

SEQ ID NO: 148127 - DNA, 684 bp, Cannabis sativa
ttaattattttaagagtgattattataaaattattataagttgaatatgttataagtttttataagtataattattgttttaaaaataaatttaattaaaatgtttttttaatgtaaatttgaaataaaaaaaatatataattaaaactaacttttaaatagaaataaaataaaaagataaaaacattatatttggagtttgttagttgaacctaccattaataatattaaaaattaattataaataaaaaaacatattaattttggtgtagttttcaagagttgatttgaaccattagattaaatcaagggctataaatcaatatccctattgataggtaaaatacccaatccctaccataatagcccccttaatagttctctctatatttcatccaaattttagatgaatagctaaaaacttagagtggagagtcaattttattattcttgctccaaccatactataatatttaattatgttaataatattttataatttaaatttattaaatataaatttatctgaaataatgtaaaaggtaatagtagttttattaaaatgatattaaaaaaatttagcaaaaaatacagagttcttcacatttaggtggcgtttggttggagataataaaatagaatagaatggaaaggaaacaattttcattctattttttttttttt

SEQ ID NO: 148128 - DNA, 539 bp, Cannabis sativa
  modified_base (346)..(347): a, c, t, g, unknown or other
ctgcacagaacaaaaacagaatggctagaaaacagccatcagaaaacacaagtcatgaaagtcaagaagctcaaaagagaagtaaaatgcaaggtgactccccgcaaagagattcagaagtccatcatcacctgacattgatcttgtctcagacatgacagccttccctttcccggcaaaggggagagacgactgaacaggtgaagtgggctctcttatgcgaattgcatgtccaatgggcctgggcgtggccaagagtttcttcttcctcttcaatggggtcacctgctcagcctcagcctcatcctcagtatccaaagtctcctgagcatactacttggccttnncacctcccttcaacctagcttcacgcttaagttgaatgagctcatcctccttatgatctcattcatgccggccagcatcggacttcctcttcttccccaccacggatttaggagaaaagtcctcagggtaaagcccatacttcaccagattatcatcggaggtcaacgggatgatattcctgtcttcctccg

SEQ ID NO: 148129 - DNA, 1241 bp, Cannabis sativa
tagatcctggaaaaataatttcaacaactaataccttccatcatgatcaggaagagctccgtgctgcagtgaaccttgtgttcgaagagcaaaggcgtcactttgctgaatggagggacagagagatggaaacgttgaaggctcaataggcagccatcgacgaccaaacaagataggccaccgtactgatacaaagagcctaccaagttgataaccaacaacctgcgtccagcatcccactgggcgactcggaagaaattcttgctgggcatactgcccaaactctgaacggtcagccgtccaatccctgatcacaggttccacctgtgggccaagtggtaggtggccagaccttatttggcaattcatcaggtggggttatacccaataactccgcccagactagcggttctaaccaactgaccggccaaaccaaccagtcgctgagataacctggtgtttcagtatttgacagactggaaactgctcatgatctcaaggatgatctgaatagaaggagagatctagacaaacaatatgttcaaccaggcactcagctcggtatccgcatccaagatccatctcaaaaagatcgtgatgtggcactgatcgaccaagaggtcgaacaagttcacccatccgtgcaagcatagttggatgaattgaaaaatatgttccaaggcctagtcggtcaaaagctcaatgatctcgagttggaccgagcacgtggatccccatttactcctgagatcaatgttctagagctacccctcaagttcaaaatggtgacctggaagatgtacacagtgaaagaagatcccttatcgcatctcaagtattttgaaatgcaaatgaatttgtaaggggtacgaggagatatgcgctgcagagtattgcctgccacacttttagaagccgcacagtagtggtacttcaagttgtcactaggaaggttcaactcttggaaagccttctcctcgaagtttcatgcacaattctcttcttctcgccaactcccactgcatttagaagacttgctcaaagtgaagcaagaactaggggagcatctttgagcttacataagcagattcatgacaaaggccacaaaagtagcatggttaactgaagaagggaatctcgatgcccctagctgccatactggggggcatcgagattcttggagagctatggaaagacatcaagaaaagtggtctcgtagactctatgagtgatttccttga

SEQ ID NO: 148130 - DNA, 1232 bp, Cannabis sativa
  modified_base (1182)..(1202): a, c, t, g, unknown or other
tttcaaaattaatacatatataatcatgatttttttattaaaatatgtcaaatatgtcctatatattattagattagtaatactattatgttgtttaatttaaaattcataatatatatattatgagattttgtttgaaaaatctttgaaaatttatattaattttacccttttgctataatatggacgaattaataggtatgtcgatttttaaaaatcataaattttgatcatattttaattaaaaagatcattatcaaatttgaaatgatattatcaaatttattcatcgtgtttatttatattaggacttttttttttcttttatttttattggtgtttcttattatgttttgttgtgtatcgtattgtaatattttttaatattatttatttgtttttagtgttttttttttttaaaaaaaatatatatacatgtttttgttaaacttaatgggttgtttttgtttatttttttgatgtattttttttttgctctttattattaatttaaaactgtttattattttcaatcgttaattatttttttatgttttatatttaaaatattacatatgtatatttttaataaatcatcttctcatcgatgttattgttttgtttattttttggttttattttttttcatgtgtgtattttaagtacttttcatctaaatttagtcatcgtgtttattttcatgtgtttatttatattataactgttttttttttgtggtgtttcttattatgttttgttgtgtatcgtattgtaatattttttaatattatttatttatttttagtgtttttttttaaaaaaaaattatatatgtttttgttaaacttaatgggttatttttgtttattttttaatgtatttttttcgctctttattattaatttaaaactgtttattattttgaatcgttaattattgttttatgttttatatttaaaatattacatctgtatatttttaataaaccaccttctcattgatgttattgttttgtttattttttggtttttttttttttgtcatgtgtgtattttaaaaatatatcatatattaattttatatgaacataaatatcttgatcatatgttgattttaaaatctaccctataatgatatattattaaaaaaaaaataattacataaggcactattttttgtaannnnnnnnnnnnnnnnnnnnnaaagaatgtttttttacatttttacggttt

SEQ ID NO: 148131 - DNA, 1107 bp, Cannabis sativa
  modified_base (400)..(400): a, c, t, g, unknown or other
gtaaaaagagtgttggtggataattgaagctcagtaaacatcctatacaaagatacgctaaagaaaatggggctacacaatgcaaagttagaaccttgtatggtgagcttatgcatatttaccggtgatagtgttgcaagtcaaggcatcattgaactctcattaacaataggtgagccattattatctacaacattaatgcaagacttcttagttgtttatctaccgtcattttataacatattgatggggtgctctgcattgaattgagtaggggtagtcagttcaatgaaacacctatctttaaaattccaaacaccagcaggagtaggtgtagtgtgaggtgacagttgttggctcgtgaatgctatcgttagaacttcaaaatagaagagccaancatcaattaatggtggtcataacaaaagaaggcaagaagaaacaagaggatctagaccctagaatccaagacgagaaaaaccagttaaagctaattgaggaactcgaagaagttattttagatctagataattccactagatgtgtgtttattgggaaaaatctagatgaaaaactaaaatagtagttaacaaattttttgaaggcaaacaaggttcaatttgcttggagcgccattcaaatatgataagggattgaccctaaagtgatttgccatcatttgaatatcgaccataattacccagcaaaaagacaaaaaatatgacccttagattctaagagacaatgggcacttaaggaagaagtagacaagttattaacaactgatttcatatgtgaggccttctacccatcatggatttaaaatcatgctcttgtcccgaagccaaacaacacttggagaacttatattgacttttcagatttaaacaaggcgtgtccgaaagattactttccactaccgaggattgaccagtagctggatgcaactgcggggcacgagctgatgacattcatgtacgcatattctagatataaccagatcgaaatgcatgtccctgatcaatgagttgactaatctattcaatgaatgataactttgactctcgcctaccaggacactgtatcaatttgttggaaaccttggaa

SEQ ID NO: 148132 - DNA, 660 bp, Cannabis sativa
ctgaagaggttaaagtggttaaggaattcctggacgtgtttcctgaggaattaccagggttaccacctcagcgggagatagattttatcattgatctaatacctggggcacaacctgtttcaaaggcaccttaccgaatggcacctgcagaattaaaagaactgaagatacaacttcagggaatgttggatctagggttcacccgaccaagtgtgtctccttggggaactccagttctatttgtaaagaaaaaagatgggacccttcgaatgtgtatcgactatcgggaactgaacaaattaactattaaaaacaaatatcctttaccttgaattgacgatctatttgatcaacttcaaggcaagatggtattctctaagattgacttgagatctggatatcatcaattgagaatccgagaagaggatatcccaaagacagccttccgaactaggtatggtcattacgagttcctggttatgtcattcgggttgacaaatgctctagcagcctttatggatctcatgaatagagtattcaagtactttctcgataattttgtaattgtatttatcgatgatattcttgtgtactctcggtcggaagtagaacacgaacaacatcttcgcatggttctgcaacgattcagagatcataaac

SEQ ID NO: 148133 - DNA, 727 bp, Cannabis sativa
atgaagtatcctcacttgtttaattttcaacctgaggttgtactttaaaattttgggacgaaaatctgtaaggagggaagaatgtgaaggatcggttcgaccgagttaaacctattatatataataaataaatgaataaaataacatatatgtatatatatataaaatcaatattagatttcaaaaaaaccccacccctatcgtggctctctctcgctctctctttctctttctctctcttcaagcttcaaagaaaacccacaaaccaccatcaccaccactctccggtgacccacctccgaccactgaccaaccccacacgctggacaaaatgaacccctagtgccagcgacctcaccccccaagtggcaccactcctttcaccacccttagcttgggatcgcaagtcaaagtttggtgattcaaactttgaacggattttcctgtctcctttggtgtccgtttgacgagtcgtcttcaccactagactcagctcgtcgaggagaacaacctacactaaaccattttgcccagctcgctacttttccggtgacatttttatagctccgcccctttccaacgacttttcggcaacatcgtgtgttgttttgacaaacggtctacatgggtgtgatctactcgtcgaggtggtcgttttgatatacactagccctattttcggtgacatttccggtacaccaatttttatcgccaccgattgttaatg

SEQ ID NO: 148134 - DNA, 982 bp, Cannabis sativa
tgagatactacttgattgcgtatacttgcgtagtaatcataaaattcgtaacagatataggcaaatttttttagatcgattgagcttttcaagcctaccctatttgttaattctctagttttacccaatttgagcctaaatgttgacatcttgtttttcttttaaccatatacactaacctttgagcctaaaagaaaaatcattatccatcctttttcacaccatagtatattgatgttttatgtatttgtaaatgtgtgagaattttgttgaggggaaaatattcatggttatgtgatgatgaagaaaataattgctattctcttagaataaatgtttgtaagctgtaagtatttattaaaaaaactaaaaaaaatgatgagaaatatgtagaaaaataaaagaatacttgcaacaatttaagtgtggagaaatagtaagttttatgaaaaaaaaaagataccatattgaattgttgagggaagtgattggggaatacaaatgagaattatttgagagaatattgtatgtgtatactttggtgtgatttgagcctaaattaaccttttttatctacctttcaccctagccttacattataagcctataaaggcatattgatctttagattgtgtgtaattaaattattggagaatggtttgataattaagcttatggagtggatttttgttgaaatacacatttctttggagatgagcattgattgttgacatgcatgaattgatttgaatgttattaatatgatgagttgattgaacacacacacacacacaaaattgagtttgaaaagtaattatcttgagttgaaattctaatgattgaagagtttggattttcttagaattatgaagggatttaaattttttgaaactaaaattatttttcataaagaccgatttacttaagtatcattcattttatcattaacttacttgaggacgagcaagagtcaagtgtgggg

SEQ ID NO: 148135 - DNA, 783 bp, Cannabis sativa
  modified_base (345)..(352): a, c, t, g, unknown or other
ttaagttcacgatcaggacatccttgaatctagtaatggtgtacactaagtacataaccattccatcattctaaaattttcctatcactaaggtattccctagaaggactcagacagctactagtggctaatcataaacctttcgctataaccaacataaaaattgaatttctggagaggtaagtttgaatacagttcgaagttcaaattaatgatctttgaactgcatatccaccaaatatttctccacccctatgagttcacaagatctttaaccacttaccttaatggttttccaccattgctagaaattcatgaaacttctcaaacatttcaaatttcttnnnnnnnngtaaaatctagagtgatcttctaaagattataacaataacccatatccaccccctgaatgtacatccatattcgaatatagatgatcctactttcaagtgaatattggcatgttttctctttgtagagaatgatcttgtcaaaactataatgaacaagttgcaaatgccatagatataaaataatagtttgatgaatcctaggtctacttacagcaaagagttcttagaatagtctaagtagatcctggtcacagaatacaaatctcaaattccatcataaacatacagttcgaatccattgacaaaaaatggatattaaacttgtgaacattgtgttgtaatgttcaatgtaatcttggaaactgaaattgaaatttctatttagaatcttaaatttaaagtcaaagacttaaatttataccaaaaaaaa

SEQ ID NO: 148136 - DNA, 759 bp, Cannabis sativa
aaataataaaatattcttgtcaattaaatatgccaaaaatagaattaacaatctttccctttggcactttgattgacaaaatattttatttgaagaaaacttacatcaagtgtaagaaacaaaaacaaaagagtatagaaaataccccctgcatgaaagcactctaacacataaaataaaataactttttaaatggaaaaattcacaaaccacaaataaagcaactttttaaacggaaaagtgcacaaacaacaaacaagtcaactccccttaaaacaagggtctagagttgtaataagcaattcaaaaaaataaatactactctccctttttgtctatcaaggagccaaagacaacaaaaaacttgaactaagtcaaaatagttcaaaacacatagataaaatggaccacttattcatcatcattggatcggaagaatttcatgatgttgtccatcctcctcacaagtaaggattgacttatcttcattctttccaaacgcaagttgaattcagccatttcagtagaagtagaagtggaggtagatgcagcaggaggttcatcagtagcaccaagagaagcagacggagcctttttcttagaagacttttcttgaggaggtttcatttggaactttgaaagtggtaccaacaacaagcatttttatggtttcattctcaagaatcaactcctcttggttagacaaaatcttataaatcaagtgaggaaaaataggattgagtctaggtttcttgccct

SEQ ID NO: 148137 - DNA, 560 bp, Cannabis sativa
  modified_base (335)..(341): a, c, t, g, unknown or other
gttgcactcgattacttttgattttccatattcgcttttgaggcgggaagtcgaggcgtctaaggttcctttgtatgcagttaacctttttgcctataaatactcaaagtactggcgcattactcattttatcacccttcattgttaagtaaacttcaaagcgaaaagatagagttttttggctttaaagttgccgaagtgcctacagacgattgctggcttgcttgaactcggacattcgaatctttgagtaagtttctgatttcctttattctttcctttgcatgtttatgctttgagtgtaactatgctgtagaaagaatgcttaggaaacnnnnnnnttagaaacttctgcgactcttcttttccacgtccttatgttaactttctgcagtagagcttattttgaactgcattgtgtttgtcttccatcttacttattccgagtttcatgaacttttttgccctaactcaagaaaactttatgacttcttgagtttcgaattttcttcgaacatagtcgttctttaatctgctgagtattcctggtcggcatattt

SEQ ID NO: 148138 - DNA, 733 bp, Cannabis sativa
ggtaattatttactttcaagaaatatggatttaaaacgatgtatgtatgatttgaatgtgattcatgttgatctatgtatttattgatgattgattgatgtttacacaatttttttacagaaaacaattatattcacgatctgaaattattttatttggatagtatgaaaaaaattaagcaattcattttttttacaaaactggatttcaattttatttgaattagttatgaatttttgaaaattgaaaaaaactaggaaggggaagcatcccctatgtgtgcgcggacacctcgtgacatttaggtgtcacgcgcattcgtacatgccctgtccgaggttgctgtgttgagatgggcagattttgtttgaacggggcccttacatgcacagagatgctgcatgcagccttcagcgccggcatttctcaaccatgcatctattcctgcacgcgcaccaaacccaattttttcaattttttcatgatttttcaaggaattaatttcaaaactttttgtgtaattttgtatgtagatttttatttttcatatttcaaatctaatcatcagtttgaaattaattattttttttgaataattttagatattagtagattttgaacttgaaaaagataatatctacattcttttttgcttaattgattatcttatttttaaatttaaggtcagatattttatatacttaaataatttaataaaatgaccttatttgaa

SEQ ID NO: 148139 - DNA, 1268 bp, Cannabis sativa
ggaatcgcccttgtcacacctaggggcaacacctgcacgctgcagtcaagtttgcatttaaagcatccaacaatgaggctgaatatgaagctttaatccctagtctaaaactagcctgggagatgaaggctgaacatattaaaatctgcagtgattcccagctggtggtaaatcatgtacctggagaatacgaggctcggggtgaaaagatgataacatatttgagcaaaatacacgaccttcttgcactattaaaaagctatactcttagacaaattccaagccaagaaaacacgaattctgacgcattggcttggcttgcaagcagtaatgtaagtgacagagcaaatcttgttcctattcagtttctcgaagaacctagcatcaccagcatggaagagatcgaaatgattgatacatccccaaactggatgacgccaatagggacctacctcaatactggggaactcccagatagtcgaaatgaagctcgaaacatgagaaggaaggttgtacagtacatcatagtaaagggaattatgtacagacgaggattctccatgccattgctcagatctgttacccaagaagaagctgcacgacttttgtctgaagtgcacgatggattttgtggaaatcacgccgtcaggtagagtttatctaagaaaattttaaggcctatgttaaaaaatgtggcaaatgccagagattttcaaagatacggcgagctccgcccaacgagttgactcagatgcaaagtttgtggcctttttccatttggggaattgacgtgatcggacaattacccaaggcaaaggtggagtgcagtatgcagtggttgcggttgattatttcactaagtgcacggaagccgagccactagcaaccattacatccaaataagttcaagactttattgtgaagaacataatctgccgattcatatttccgtaaaaaatagtttcgaacaatggaaagcagtttgacagccagtcctttactgatttctgtgcaaaccatggtatcatcaaaagtttctccacagtagtgcatccccaagcaaatggtcaagttgaagcagtcaacaagacactgaaggacacactaaagaaaagacttgaggatgctaagggaaactggccggtggagcttcctgaacttctatggtcgtactaaagaactgagaaaacggcaaccggacagactccatttaccatggcatatggatatgaagcaatgctactcgtagaactcgagccaccatccca

SEQ ID NO: 148140 - DNA, 736 bp, Cannabis sativa
gcctccttggcctccctcagctcgcgcctcgcattagccacggcctcatcccaggtcttcaactcctccgccttggctgccagtgcctcttgatgcttcctctccgcctgagcctccctctgttgggcctcttcccggaatgctttcctcttagccgccaaatctctcagactcttcatggcctcgtccatgcccccgaactcagacatgacgtacccatgatcaattaaagtctttgagaggcgaccagtctttgcagcgatctggaaaaataaaaaaaaaggttaagaataagagatccgatgccagaagtaaagcagaaaagaaaagaagaaatcattaataaagacctaccacggtcatagcagcactgatatcctgaacctgatagattgagttcgtggaagcgcaagctgcgtatcgtttggctagaagttgggtcaggttggagacaaaatggctcgtcaactcagaggcaaaaggagcaatagtaggaccaacgaagtgcttgaaccagtccgtcagagggtccatgttcaggtcccaaccattcctaaaggcctcctcgcttaaggaattttgctgagcttcccgtaagacctttttcacggcttccacctcggcattcccccttgtgtattcgacaatggcataggagtaaggacgatgctgggaggtacagtgtattcctcggcttcaggtggaatccctaaatcagagctgacggccggagtgt

SEQ ID NO: 148141 - DNA, 502 bp, Cannabis sativa
  modified_base (442)..(442): a, c, t, g, unknown or other
ggtaaatggcggcaaaatctttaaaattttattttggtttcacttaacctccaaaatctaaatttgggcggtaaaacccttaatactcgcattctgttagcaatttaacatttctgttcattttaagtgttaaatgccatgttggactgaacatagtgtacacgtgacaaagaaaaaaaaaaagaaaaaaaaaattggacaaagagaagaagaaaaataaagctaggcaaagtgaagatatatagaccaataataaatgaaatattttcatcaaaatataatcaatgaaaattattttttccaacttaattaaattgagtttgagttgctactaatcttcaagataattgagttattattattattattattattatattgggaatgagatttgaaactaatggacattataaaaaataattatttttagtgataatttttnagtcacaatataatttttttgtgattaaatgtgacttttagtcacaacaaaacgttactt

SEQ ID NO: 148142 - DNA, 589 bp, Cannabis sativa
aacctttaaccttacttgtaactatagtaggcttagatgatgaactcaattaacataaacctttaaccttacttgtaactatagtaggcttagatgatgaactcaactgcttggcataaggagactgcaaatgtaaaccaggctttaggattctcctctcaacgggaggagtgacctcatccaatatcaataaaaattctcgactgcaacattagggtcagactcttctatattaacaacagatgtcaaatcctacataaaaaagataaaaacacatatatattaaaaaaataatatataaacataaacaaaacaattagaaaaaaaatttactagattagtagaagatactaattgtggatcgtatggaactaaagcataggattgctgcaaaacaacaaaataataacattataacaataaacaaacaataaaagaaaataaattaataaaaaagaaaatacataaaattttgcaatagcttttaaaccagccataacaacatcatcatcctcaacaggtagctggctataacctttgaaaaaatcatcatcaacttttttttttctcatcgttgacaacatctttt

SEQ ID NO: 148143 - DNA, 576 bp, Cannabis sativa
agacagatacttgatgcccttagtaagtgaactgggctgggcagaggccgaagaagtctgccacatccttaaaatattgatgcaagggcacccaaccaggcgtacatccccctttcagggtttgtggcacgattgttgtaggcgagaatgtagcagtctagctcacccaggtattcctggtcaagagttcgaggtgcgcctccgtaatcttggacagaaggcttacccaccatgcgcccaagcgaccctgccttctatgaggaacaatcgtagcaagctcctcactgacgtagtccatgccctcaaccaggacgtctccgttagcatcgacttgctccccagcctcgttttactccccatagtttgggggtgcaacctctgccttttcctcctcctcagaggaactgtcaggacgtacatcgtcctgcccctcaatctcctggacctcagcgtccccttcatgatcctcctccatctggacggctggatcctgttcggcgcgtggtagagtggcgtgccgagccacttgggggtcaaacgcgtcagccagacgcgtcagccagacgcgcagttttc

SEQ ID NO: 148144 - DNA, 553 bp, Cannabis sativa
  modified_base (197)..(199): a, c, t, g, unknown or other
tggagctcctaaatccattgttttcaacagagatccaaagtttacatccaaattctgggtaagtcttcagagagctatgggcacaaagctaaagttcagtacaacttttcaccctcaaacgaatggttagtcaaagagaaccattcaaatactagaagacttattacgagcatgtgttatggactttgagggttcannnagtaagtacttgcctttgattgagttctcccacaacaacaactaccaaagtacaatagggatagctgcttatgagatgttgtatggtcgaaaatgtcgctccacaatccactggaatgaaactggaacagcctgttcaaatcctcaatagttcaaaagaccaatgaagctatagacaagatcaaggctcagatgcttacttcgcaaagcagacaaaaaaggtatgctgatccgaagcgcataaacattacatttcaggaaggggaacatgttttcctatgggtatcttcagtgaagggtattaaacgctttggaaagaggggcaagttaagccctaggttcattgggccatttc

SEQ ID NO: 148145 - DNA, 728 bp, Cannabis sativa
atattttgaatttaattgttagagatggtttgtctgttatcggtgataccattgataagattcgagacaatgtcgcttattggtcaggcacaccaaaacagtatgagaaattttaggagaatgctcgtcaccttggagtgacatgtactaaaaagttgtctcttgattgtgttacaagatggaattcaacatacttaatgataaagatagctttattgtacaaaacagtatttgagcgagcaaagcttcctgatccaaagtttaaatgtttgccatcagaagaggattggattagagctcaaaagttatgtgaaaggctagaagtttttcatgaggtgacagagttattttcgtctaccaagtaccctactgccaatctattcttcccagagatgtgttaaattaagaggaaaattgaagaaggaatgtcatcaaatgatttatttattaaggatatgtcaaatcaaatgatgtttaagtttcaaaagtattgggaacagattcatgggattatgactattgtagtggttttggatcctagatacaagtttttgttgctccaattttattttcctcaactttatggagatcataaatgggaggttgaaattagaaaggtgggtaggctttgtgatgatatattcaatgagtacaaatctaaatgtcctactttaagtgaaaacaattcacttgtggaagggtcatcatcttcttcaacacaagatcat

SEQ ID NO: 148146 - DNA, 714 bp, Cannabis sativa
tcctagtcttgttcaagggtcctggttttgcagttcttgttcaggttccagttccgtctcccgggtctggctcagggtccgcgtttgggtcttggtccgggttcgggctcgggtcgtggtttgagtccctgatctagtcccggtcacttgtcctgatctagttccggttaaggtcttgggtcccaagtccgagtttgggttcgcgaccgagactggggtgcggttctaggtcccggccccaattttgtgtcccgagtctggttccatgttttggtctgagtttgggtctaggttcgacagtgagtctaggtatgagttgggatctaggtttgggtctcgattcgggtctaggtcttggttggagtgtggcacgtggtccggttacaattctgggtctaggtttaagtccggttacggttctaggtctaagtaaaagttctggttacggttccagtcccgttcccgggtcccggcctacttccgtttttggttcaaatttttggtcacagggtacggattagggtccaagttttggtttgggactggctttggtccgggtcttggttcaggtcctggtcttgttatagttcgggtctcgggtcttgggcagggtcctaagtttacgattgggtccgagttcggggttgtgtcccaatagtcaagtccttgtttctgggtccagggttgggtcccgtctctcgagtttggggtcga

SEQ ID NO: 148147 - DNA, 848 bp, Cannabis sativa
ggggtaccatggtgtcagctctccaccacccctggcaccttggtgctaagtgagctaatactagccagcggggctagtagggcgggcatatgaggaccacgaggggactcatagtgcattattgggccaacctagtagtgcatttaagtagctgccagaggttaacaggtgcatttccagtggcttaccgatatgctgcttgcacgggaggtggccctaaacttccaagagacggttgtgggtgtgccttggccacgagtctcaacagaagatgacattggtagtcattcgtgggctagtttgcatacgcgcatgggacggatgcaccatgttggaaaaagacaaaggtctagcttatgttactagtttggtggcttgtctcgagggcctgccaacatgcgtggaggcatggggccttgagtattggtccatggacgtatgggagtccttgggcgacgagggagactgtttggacaatatcgaatggggcatgatagaagcgttggcacgttgacttggtgttggcatgttgccacacatgctaccttggtcacaagtgacaaggtgagcgtcggtgttgggatttgccttatcatagtaggaacctatggacagtgcgagtatcttggctagagagcttcgatgcatggatgcttgtgagcatgactcgatgggagttgttggagagacgaaagtgtgcacgaggcacacggtcgcgcgaaaaatgagcccattgttactcgaatggttggaaggttgacttaagtcaaggtgccgcacgggtgttccgctgcctgaaaaggtgagcccgtgacaataggcaacaaccttgtatgtaaacttcataa

SEQ ID NO: 148148 - DNA, 914 bp, Cannabis sativa
  modified_base (225)..(226): a, c, t, g, unknown or other
  modified_base (297)..(306): a, c, t, g, unknown or other
  modified_base (490)..(490): a, c, t, g, unknown or other
tttcaatgttgaggaaatatgtttcagacccgactcatatcttgagttatgaatcccttgaactgcaatcagacttatcctatgaggaacaccctattcagattctggatcaaaaggagacagttcttcagaacaagaccattattttggtcaaagtactctggagaaatagcatactggaggaagccacctggaagttagagtctgatatgaggactcaacatnnagagctattcaggttagatttcaaggacgaaatccttttaacggggggtaattgtaatgaccgctttagtnnnnnnnnnnagtaaaggcaattagcactaattactatttatttttataattatttacgaatttaattatttgtggaccccaatattagaaatgagcattagagttataatttctcaatttcagagattttattaagctctaggggtattatttgacttatatgtgaagtatattatttttgtaatttttgctnggcgacaacgaaaaatgcgatggatggctagtttgatcacatgggtaagtttagagccttatttcttagtgggaaatattttagagaaaataaatatcgaggttgtgcgggattatggaatttgaccattttacccctagtttgcgaaatacctaagttgtaacttggagggtaatttagtaattttctatttaaggtgattaggtggatgcctaattagatgacacctagcattaattatttcagccaaggttaaggttttaacctttatttcatttacagattttaaaggaaaaatcaaataaaagataaaaaaaaaaatagaaagagttctcttcctttccctctctctcttcgaaccagcagaagacaaggggaattgctgctggtttttgggtgtttcagcagggattaaaggatttct

SEQ ID NO: 148149 - DNA, 879 bp, Cannabis sativa
  modified_base (269)..(290): a, c, t, g, unknown or other
  modified_base (526)..(527): a, c, t, g, unknown or other
  modified_base (565)..(581): a, c, t, g, unknown or other
aaattaatttcattaattaattttagatcaactcaaattagaatatttttcttaatattaaattaaaattaataattaagttgattttattcaagatacttattatttatttctttattttatttatttaattaaatagaaaattagatatttaagttgattttattctagatacttaaatattagttattttcaaaagatatttaattagatagaaaattatatttaagttggaaattttaatttcagaccaacttaaattagaatannnnnnnnnnnnnnnnnnnnnntattttattaatcattttcccaccaattttgaaattgtatttattcaatgcagataattttgatttttttttttaaaaaaatagattaaagttgaaaattaattattttaattaattttagataaacttaaatcaagtaaatttttcattaatgatttattaaaataaattgactaaaatatattatattttaattagaaaataagtaattaattagtgaaatatctagatagttnntttttgtatgcttgaagtatttttctagttatatttannnnnnnnnnnnnnnnntatttaagttgattttatttaagatacttaaatatttagaatttttcttagatatttaattaaataggaaaattatgtttgtgttgaaaattaatttattaattaattttggaacaacgtaaattagaataatttttcaggatttattttattttattttatgtaaatttcgaaaatgtattttttaaatacattgaatttcgtattttgctctatatatttatagaaaattaaatttgagttgaaaattaatattaattaattttagaccaacttaaattaaataattttcataata

SEQ ID NO: 148150 - DNA, 793 bp, Cannabis sativa
gtaacagttccactcaggttgaccaacacacctaaatttagaaacgaggtaagattagtataatgatatgcatatgtatttacatatttaacgtacgtatttattaagcctattagattacatcgataccagtatcaatacacgtagagttgtattggataccgataaatgtatgtttggcttagatactgatcaaaactatcacatcagtacgactagagtaccaagtataggctaatattatggtcgatagtattgtcgtacgaatgttctagactcagtaccttctagggtgcagggatagggttatagtttggtgtatgggtgattaactgtaatctgggttatatttatgattatgattatgcttttcttattgagtctgccggctcacaaatattgtttgcatatgtaggtaagggcaaggctaaagttgagcagctatgagagcgagcggataaagattgtacatgtcggggtaattagacttagagcgtacgatctttggaatagctggttgcattttgtatagttgctaggcgacaacttttgtatttagtattttgaatcaattgtaaatattttaaactcgggatcccaaatatataaaagttagtttattttaatattgttagtaattaagtaaagttttaattattcacaatttttaataaactcgttgattagcagcaaactgcacagtcaatataaaatcacgataacacgcctaaactagtatggtgttacaatttggtatcagagctgccatgttgtcttttgaagatcgtcacga

SEQ ID NO: 148151 - DNA, 1040 bp, Cannabis sativa
  modified_base (47)..(50): a, c, t, g, unknown or other
  modified_base (983)..(997): a, c, t, g, unknown or other
aattcatattaggatgttaatgagacatacttgttagtaaatctagnnnntggtaaaatatttccaacaggtcttcctgggacttgcagtctgttcatacgatgaatcggtagatcgctaaggactcaatggttctttttcgggacaatgattgactgcttcttgaggattgctatctttggtatcatccatcacttttatgtcaagaggcttttttctgagctttttcatagaggctctcaatcagagcaccaaactgttaacgcagatttttgttgaccaactttgagcctcacgattatgattcaacatagaaaatataaaagctatagaaaaataaaatatgcacaccgagctttttacgtggttttggagttaaaattcttcatagtcaacgagtcaatcttattaagatttctgagtatttttttcacggccttttgcgtaagagttttttcgtcccccctttttctttgatcttgtctgccactatttataattgcatagttgcagttaattagaaagctgaccaaaatatgtttacagccattatccctaaaattgtgggatctgattacacatcaagccaaataaatgaggtttttacaaagctgtgaatatcccgcttttattgggccgagatgaacgcgtaattaaagatctacggtaagccttatctcgtagggatgtctcgccatgaagggagccaagatcactttgatagcgagcagttgcttgtcattttggcttctctagaataatattgtctttactctgataactatactctcttgtgtcgagaggatcttccttgcatgcataccatcttctagcgagataaatgcctcgctatctgctatcttggatcttcatactatctatactcatttttgtatattgtataatatacgctaagtatttttagcgttgtcgctttccctttaacacagcgaggttgaggcctcgtcatgaacgtgtgcacnnnnnnnnnnnnnnntcaatacataagttagcagttcgtgttggatattattttacca

SEQ ID NO: 148152 - DNA, 787 bp, Cannabis sativa
cagacgatgccgacacaaccagggcagaagacatctcagacgatgccgacacaacaagggcagcagacatctcaaatgatgccgactccacatggtcagtagacatctcaaatgatgacaagttcgcaaatgtcgccatactacccataaatactgaatgttcctagagatgctagtgatgatgacgatgctactacaaacttcttttagaattttattttagttttacgaactattaattttatgtttattgatattttatgaacactcactctatatttaagtaagcagtattgtaatgtttgtgactcactctttattgtaatgtttgtgactctaaatatttattatgaaaaagtatttactagttttactctaaatttcatgaattaattaatttaattatttcatatattaattaattaaaaaatataaatatttaatataattttagaaataaaaaaacaaaattttaaaaaaaaaaacataattaacaatgacgataatgttgtcgttgataacataatcaatgacgatattgtcgtcgttgatgtacacaaatattcaaaaaaaaattaagtattatcaatgacgatattcagatgatgtcgacaaacaagggcagcagacatctcaaatgatgccgactccacatggtcagtagacatctcacatgatgacaagttcgcaaataccgccatactacccacaaataccgaatgttcctagaaatgctagtgatgatgacagtgctactacaaacttcttttagggctcgtttggtacg

SEQ ID NO: 148153 - DNA, 1315 bp, Cannabis sativa
ttgattatcaacgagttgcacagttaagtttaaaatcacgttaacatacctaagatcgttagggtgttacaaaagagttctcagaatagtccaagtggatccctgtcatagaatactaaactcaaatctcatgcattaacatacactttgaatccattgaaagaaaatagatattaatagcttgtgaaagtaatactgtattattcaatgtattctaggaaactgaatttctatttggaatctaaaatttaaagtcaaagccttaaatttataccaaatattcattagtatttattctagcttggaccaccaccgctaatctaacactaagtttaggttgcctatagtaagcatttataagtaggagatttctaagatcaaggatttatatcatttcaggatagaatatcagcaatatagtcatctgcgccattcaatttcatagaagaaaatagaatgatatcataagcagatgatttataaaccatctatccaatgatatactatgtcagaaaattctaaatgaaaaagctaagagaaaaactaaaggataatttcgattaaaataagaatccaatgatattccgtttggcgagagtcaaagttattcttattttataaatttcttcattgtttcatattgtaaacactagtctatatagtcatctttggatgaacaactagatgttgcatttacaattattcatctctcaagatctaacactattttttttgtctaatggatgactatcctttgggatttgtctcattaaaacaacaagctaagttagaccaacaataaagatttgaaattatactagaacattaataacagaaaacaacatgattcaacataaatgcataacacattcagaaagtatcatacatttagcaagtaacaaagacatgtgaaaatacaaaacaagcacatcttaaataatttccaaggtttccaacaaactgatacaatattctggcaagcgagagtcaaagatatcattcattgaatatagtagtcagctcatctaaaacaaacaccattctagcaaccttttattcaatcaaaataagaatccaacattgtctctgtaagcgagagccaaggttattcttattttatgagcttccaccattgtttcatacttcgtaaatttatctctaagtagtcaccgcaggggagagtctaatagagacaaaaacttacaaaatacttatccttcgagatctttatagtgttaaatgcttcaacgaataaccatccataagggggacgaagtctagcgtcttgagattatattgaaataattaaccatgt

SEQ ID NO: 148154 - DNA, 638 bp, Cannabis sativa
gtatttagaattatattgtcaaaaatattcttactttatttgtatttctaaaatattattaaaatttggtggtaaagtattttgtaaaataactttgtaaagaaaaagtaagaaagacaaaagagtaatgtttactaaaatttttgaaaactaattaaattaaaacttcagaatttttttaaaatattaagcaagtgagacgaaggattttacgtgattcgggcattaaatatccctagtccatgagtcagtatattggccttataccaaatgtattacaagtggtgtttactgttaacccaatttttgctcacctgacgtggcatgtctgcatggccaacatcagtgacacattgccaacatcagtgacacatggcaatgcagcttgccaataagaaggtcaagtcatctactcaagacttcaaccaacgaggggttcgagtactcaagtgggacggtaaagagacgaaccagaatcctcaagggggctggacgaccatccttggacggccctataaccagcgtaggccggccggcttctagacatcccatggccggctagcatgcaccctgcaggtgcatggacggccaacctttggcttgacaggattttgatgcccaactttcatacgtggaca

SEQ ID NO: 148155 - DNA, 772 bp, Cannabis sativa
ctatcgtgacaagtggcaatgaaaatcaaacacacggctaaagtttaaaaggcagtaaactgccaaaaaaaaaaaaaacagtataaatgttgtatttgccgtgtaacagtataaaagtaataaaatgggaaaaaacagtagtgggtgtaaatttcccataatttatgagggagggaccaagtgaagtgggcctaactacgtaatttgaagattgacatgtatgtctcctacttagagccggaatgtataggctttctcaattatctttatttttaggagattttacaaaaatattagatttttagtaaatgtttacatttatactgctacacggcaaaaattattttctactgccttcaccatattttttttttcttttatactgtaaactccaaaaataaaaaatgaggcatccatcttccacactcacggacagaaccatcacagcacaatagccagaaaacaacgattaatttcggcgagatgaagcataaacattcactactacaaaattgggctttagaggcagtttttaagagtttttagcatcggttttgacaaaatttgctacagacgttgttctaggtgacgctgtagggtaaataacaaccgacggtataaggaccctatggcatcggttgttatgaaaaaattgactccaaagggactctatggcatcggctgttatgaaaaaacttacgccatagggtcttggtttttttttttcagctttacaattttataatttttttatatatattattttattatt

SEQ ID NO: 148156 - DNA, 603 bp, Cannabis sativa
aaaaaaaaaaaaaaaaaagtcagtctagaggggcattccattgtctatgcctgaaaattggtttgaattgtgaagaagatcttagcaaaaataataataattatattgaagaagcctataatagttaataggtgtcgttttctttacttttactaccttaacctaaattttctttttcttgtacaaacaaacaaagcctaatatactaattgattgattttcttcttttaaaatttggtgtagtttgccgttaataatccaaatttacaccacttaagattcacttttttagttattcttagtgatttattgttgcctcatgatagattgtcggtgcagtctattcttgttctgtctcgaccaacaataaataccttaaactggtcgcttgatctttctgggttgtaatcagtggagagtgcatataagcttctccaacaacttagtggtgagtttgggttggatgtttcagtcgaagacaagttttggaggaagctgtgaaagcgaaaaaccccaccgaaaataaaaaatctgttattgcgtgcagcgaaaagttgtctcccaacaatgactcagctgcaattgaaaagagtacatgtgaat

SEQ ID NO: 148157 - DNA, 1125 bp, Cannabis sativa
caaacctctttaaaaccttgtgttatttattgtttacatattttctctcaatttgattacatttcttaacgcttattagttgagtcaatgttgtttgttaaaagcgaggtcaacattttggtactttcattgagagcaaaaatccaagtttgttctttatctaaaatttcaacagacacacagaatggtggtgcaaacttgcagaggcttggttaaccagagtgacccattgttgacagatcctgccatgtcaactcctgtgaatacaagggtcccacccgaaacaaatcccgagcagccaaacacgcagccacctactgtgggccaaggtgtgagtttccctctggttaggatcacaccacgtgtgcaagagagtgggaataccagttatgcagacaattaaagcactcccaatactggaatcccatccacaaccaatgcttagacaatggtaggggatgacactgagattcaaaacctctgtaatgcccttggactcatgcaaggtcacaataacaccttgcatcatgatcacgagaattccgtgctgcaatgaaccttacgttcgaagagcagagatgttagttcattgagtggagggatagggagatggaaacattgaaggctcagtaagcgaccatcgatgaccaaacaaggtaggatactgtactgatatggagagcctatcaagttgctaatcagcaaccagctgctatgtccagtatcccactgggtggcacagaagaaattctttctgggaatactgcccagactcataatggtcagccgtccaatcctcgatcatatttcccacctgtgggccaagcggtagacagccacaccctatcaaacagctctttaggtggagctatacctaataattctatccaaactgacagttctggccaacccaccggccaaacaagtcaatcactaatgccacatggtgtttcagtattcaatagattgggtaaagcttatgatctcagaaatgatttgaaaagaagaagaggtctggacaaacaatacgttcaaccggccactcagccaggtatccacatccaggacccagcttaaagagatcctgacgtgacacaagttggccaagaggctgaactagttcac

SEQ ID NO: 148158 - DNA, 710 bp, Cannabis sativa
aattaattttaaattataaaaaataaaaaaaatattttttttctttttactctctctctatatatatatatctatctttttcgtcttcttccttctttatcttcactgctctctctctcatcgaaatcgaaaccccctgccttctccctcttgcccttgccttcactgctctctctctctcatcgttgtcgataccgtcgatacccgtgttcttatcttcttcttcgtttggatttttcaaccccatcaagtcgcacaccctgatctgcccaggaaccatgggatcattgttcttctccctcatcggcgttggcctgcgaacacagtgcatcctccttttcctctcttctcgacaacctgggaatcagaggcttgagcatgaaaatcctaaccccgcagctcgagttctctctgctcaatttctccctctcttgtctccttgccgaattcaatagcggaatcaccatccccaagctcctcttgcgagaagatgagatctatcacataagaggccagatctggatatgggtttggctaaatagaagagaagattatagaggtattggttgcttgattttttttttggtcattttttctttaggaaatagaatattgaacaatgatgaacatatgatgaaatgttgctatttatttgtgtataaatctgagtatagtctgtgtagttataaagaattggtttgaatgcaaca

SEQ ID NO: 148159 - DNA, 911 bp, Cannabis sativa
  modified_base (869)..(875): a, c, t, g, unknown or other
tgaggttggggagccagtcgatgcagattgcgacgtcctggttgagggcgtggactatgccaaagaggaacttactgccgcggttcctcacagaagatagggtgctttgggtgccaggtgggtgagccctctgtccaatgtcactgaggcacgcttacgggatatcgatcaggatggctacttgggcgagttagactgctatattcctgcttacaacaattgaaccacaaaccctgaaaggggaatgtgtgcctggtcgggtgctcatgccaagcaaggggcattgctgcctttgcacccatactttaggaatgtggcagacttcttccgcctctgtccgacccaattcactcccaagggcattaagtatctgtctgccttcttcgttctctacgcctcccagaagtgggatataccttctctgcacgaggttagctggttttttgacttgaagtctacccctaagcaaggcagatcggggtacttctatttttgtcaaccagacttcaagtggttgacgagcaccggggataaggccgttagcaaaattaagcattttgttgacgaatacttcatggtggaaggcatgggcaccacctacactcagtttcaacagatccccacatatcatcgccctctgttcacacttgccctctgggatagagctcaaaagcttgctctgctaccgggtgctgcccgggatatcactctgttgaccttgacctctgagaacagctttgtggagtacgggctttacccgaatgatttcatttcctcagcctatgaaggagaagaagaggaaatctagagctggtcgggctgaaggagctcattaggagaatgaactcattcaacttaagcgtgaagcnnnnnnnaagggaggtgcaagggccaaacagtatgctcatgag

SEQ ID NO: 148160 - DNA, 540 bp, Cannabis sativa
aattccaccattaaagctccaagtgttaaatctaactaacaatcaacaaaacctgcttgaatccatataactaaacatatttaagcttcagataataaccctaaacattaacagcagctacagcaatcaaaagctcaaagcatgcaactattacttatttacaatttaagaaactaaagaagacaaagtcaaaagcttaccaagagttcaagatcccttaaaatctgccggaatcaacaagaagaaggagaaaaacacagcaatcccagctggttttgagggtttcgaaagagagagagaacttgagagtgaaatgcaaacttttgtctaacttttgatttttgcataaaatgaataaaagaattgattttccttattttattaaattgtttcagccaaacaaagctagaaaaatcagattaacaatttaattaaacaatccacaaaaaacaaagcacatattggcaaaatgacctttttgccctctgacattaaattgacataaaagggtactaatggtattttgggaaattctaaatt

SEQ ID NO: 148161 - DNA, 567 bp, Cannabis sativa
atgggtttacgaaaaactcaataaacaatatgcattgtgcctatttttaaaagatcttcaataatttatagtaccgaaaatagatcttaaatatagaatagtatgcatacttattttttttatatgcgtataacttgttatttaaaattttatttttgacattataaattatttaggatttctttaaaatttataaaatacctactataattataaatttttaaaagtaaggcgcctacccaagaaaccctttatataaattatataaatatatgtataatatatggaatagatataaggtaatcaattttacaatttaatatattaaatgcagtaaaataaacgtgtcaaatgtactaataataggtgtttcaaatgaactgtaatatttggtattttataaaaatacaaaaaatacataaaaaataacaataaaatattataaaaaataatatataaataataaaaaattaacaataaaataataaaagtacaatataaaaacatattaaaaaattatattttatataaataaaattttaaaaattataaaaatatttaaaatga

SEQ ID NO: 148162 - DNA, 863 bp, Cannabis sativa
aataaattcataaataataataaaataataaaaattagtgttaattgcctttactaattcaaattactaaagcggtcattacatcattgcttctcttatttcaaccacaacttctggcttggtgatcatgatgaatctcattcatctaatcactcattgttgaagtcttcttcttcgaatggtgctcgaaatgtcgagaaagctattgtgcccttgcctacggtgagctctcaaactaggtccaaggtgtccacaccaaagaaacctgaagtggttctgcccaaaggagcctccaaaggaaagaaagcgttgccctcttcctcaaagggcaaaaacctcaaagagaatcctcgttccatttcatcatcggactctgaacctgaagaagagaccaaagagaatcaagaatcagagggtgtgtctgattctagtgaagaatttgttcccaaagaacaaccctctgctgacgattctgggtctgtaagtgaagtgcctgaagttgatcctgtcagtgcacaaccagttgttgtccagttccaaaggaggacaaaggaaaaagacccctggtttctccaagccttattcttcctcaagaaagaaataggccctctagtattactctttaaaaattcaagccccattctaattatttttgttacaatgataatcctagagacgtgcaattttatgagaataggaattttactgttgagaaaatttcaatgtcattgctcataagccatttggggtttataacatgttgaaagaaagacaatgggtggatactttgatcatttttaatggatatgtggatcgaattttcaaggagttttatgctaatatcactgatgagtgcctcgatg

SEQ ID NO: 148163 - DNA, 1181 bp, Cannabis sativa
  modified_base (978)..(980): a, c, t, g, unknown or other
cacctcgcttattaggtctcgagccaacccgactgttatacttagtttgtacattatatgctaagtgttttcacagtcgatatacgtcgctttcgtcttcccagatgtaaggttttgatgcctcgctatatgccttcaatgacatatggtttcttgttaatataccaaacaacaatttgcatatcttttccttacataagaccttatagtcagcgagttgcaagtatgctttgctacttatgcaattaatgagttattcaattaaaagttatttcatcgatccatatttcctttatcatgatacgtgtcctccactgagatggtagccgaattttgggtataacaattgccccttaaaaagttgtttttaataaaaagtgatttttaataattacagagggcattttcatcataatcccttttggaaaaatgcgtcctttgattctggcggttgtacagtttcgagggtcattatgaaccatcttctcatcttctgccccactcccaaccgttagatttcccaacctttggccttcttgtcactggactttgtgtatgaaatggtggcttaagattgccatattccacacacttctggttttttggtgaaatccatcttgagattggattgtcattctcttgctaacatgtcccatctgagttaagaaatttatccctccaaactcataacaccagaatgtaccaaccagttttcttctccatacgttcccaaggacttcaaacctcaatttgaattggaaacgaaggattccaaggctgaggagcttccgatcaatccaaaccaagggaaccccgttgtattctttatttaggaagatgacttaatggtttttccccagtggtatttttgtaaagacaagtttgtaacccaacttgggttttctcttatcttaaatgccttgtactcttttcatttgaacttaatacaattgtatttgcttgcgtttttattcacannntaaacaactatattttgatcaaaggtaaagtactttttgggtttttcaattgctcgtaatcttcttgtttaagtagtttgttatctaccaaactatttgattttcgagtagttgtcaattctgcctcgctatggcagttataatctaccttaagcaatcttgaatatacttttaatgattttttcactttgtatattttag

SEQ ID NO: 148164 - DNA, 561 bp, Cannabis sativa
  modified_base (460)..(462): a, c, t, g, unknown or other
  modified_base (520)..(522): a, c, t, g, unknown or other
aaattgattataaagttattagattttttttaataaaacattaattagatattaaattttatattaaaattttgtaattgtctattggagtacaaagttaaaatttaatataaatttactacaaaattactttttgtgctaaatatagcacaatttttacatctttcattgaagatggtctaagttttatactgtgttaagtttttacggttgctttacgattattttttaattgttccattattgttttaattgttctatttagttattttacagttgttttaaaaaatgtgatagtaaaattataaacttttacataatatttagtaattttgtaaaaatttcttatttatttttaatgaactcacaaaccagaggacatcttaggtgtggacttgatagtgatacatgagatattgctatcatttgaaaataaaggtatatatatatgtatatatannnatatatttatatatatacagtagaacctctattcaagaatactctattcaagaataannnctaatttgttataaaaaaatgaagtcccaatttgggcca

SEQ ID NO: 148165 - DNA, 815 bp, Cannabis sativa
acaattaaatatttaacaaataaccaattttgaatttgaaatattatggttagaatatctataaaaatatctaggttaatttcaaatttataaattatttaattcatattataaggtaattttaacataatatttcaaattaaaaagataaggctatcttataatttaaaatatacctaatattaaaatatcgaactttataattaaataatatataaatattgaagaaattaacaaattttaaacctgactataaattaaaaataaaataatcaattttttaaatttaaacctcaaaatattaaaattaataataatctattaaataaatttaatattattaatttaaaattttgatattaagatttaaatattaaaaataatattttaaattgaaattggggtttgaaaattggaaaaatttgaaattgggtgaaaattcctaaaaaatcagattttgggtgcaaacacccttgctgtgcacacgtaggttgtgtttagcctcttccgcggcgcaggaggctgctggcagccttcgtgtgcgtagctaggagtgtccgtgtgtctcaagcgtggggcatcagtgtgcattcagacaaaaaatgcttgaatctgcgtgcacatgagtgtttcttgtccgagatgctggtgcgattggcaccatctcgacaccatgtgcactccattttcaaaccttcataacattttcaatttttttggaatcaagttctgtaaaaaccaatattacttaattttttttataagaaatctaaataaaatatttccgtaaatcacatatattcatcaaataacac

SEQ ID NO: 148166 - DNA, 1380 bp, Cannabis sativa
  modified_base (975)..(975): a, c, t, g, unknown or other
tttcgtattttagccataacttttcactcgggtgtccgttttagacacagattagagccaaaagatacattttattttagggtattttttactataagatttggtagaaaaccctaggttattttatccgggttttagacagtgttttgaaatagacccttattgatttacctttgtcgtgacataggactcaaaattgtcgagcatcattccactcaagtctgcccacatgcttgaccttggacttgaggtaagaaaagtagcaagcactgtgtatggttaatgatatgattgttatggtctcgattatgatcgagattaataatatgtatttgttgtgactcgatggtaatcgaggtaatgatgagaaatgataattttcgtatgtgaattttttatgaattagggaagaacacggttatcactgtttttgtaaatgaattaagatacggtcattaccgttatgagtaattactcttgaaaccgcgtataggtttcttacttatcgtttgctttaccgggcaacgatagtgacatacgcagctcgtggataacgagtggtgaggattggtaacagtgattaccgttatgagtaattattcttgaaaccgcggacaggtttcttacttatcgtttgctgtatcaggcaacgatagtgacatatgtagctcgtggttgacgagtggtaagggtactttataaagtactaggattgtgtgattacgaagttgtgaaatgaattacgcatgttattatgtgatgagttgtaatcggatacatctttgttataatgtgactaaatgaattttatattgcttaagaaactagtttcttttcttgcagagcctcagtgactcacaggatgtaagattacgtgtatatagggatgtaaaattagagtgctttacaaggcactgaaaatatgtaattgtgtattgaatgaatatttgattagtgtaatgataaagctattcncggcaagatgctatgatatttttatattgtgtaatatacggttcgtatagacattatactatacatgaatgctgaatagagaattaatcacgagtatgtatgttatgttatgataagaatacttgcatttttttttgcttttgatttaatagcttttcttgttgagtcattgtgactcacaggtgcttcattgtgcaggtaaaaaggttaaaagttgtgtttagccatgagccagaggtcttctagcagtgtacatatcagccgtggtgtctttgctttcggaaagcaggatttacctattttctatgtttggaaatgtaaccttatttttgtaatagtaattttgtaacctactgtaaaagaattttataaacaggggatccccgtattatggtatttagtatg

SEQ ID NO: 148167 - DNA, 687 bp, Cannabis sativa
attataggtacccgaagcccatcacagttcagttgtacatcaaggccttctgtctccatcaacttcataagatagttatttaccttctcatggtccattcgatgcatcatacctttacaagtgcaaaaccttattgtttccctgacctgacataattttataactgagttaaaattgattgacttgtgaaagtaaattgaaggtgtagatcaaaagaaactaaattttcttgtaacttataaataaaaccagtaaatcaagaaaagaagttaaaccataccagtgaacagagttcttttcagttgaattttccgtacttcctccaaagcctggaaaagatcaaattgaaattaagattgtcactaagacagttttattactgttgggatgaattggattttacctttggaagtccaatatgtgttgatgatgaccggtccggtcttaaggcatcctgaggaaatgatttgaaacatcagcaaggccccaaatttattgttattattatgcttttgaactatttttggattaatatacttcttttttgaagagttaaattgttcataaaagtttgagttaaacagaatagttagatgaatgaatagggaggcaccataatcaggatttcacaatccttgaggagtggataagtttcttcaggtatcttcaggtatttcactaacatcg

SEQ ID NO: 148168 - DNA, 526 bp, Cannabis sativa
aaaaaaaaaaatataagaacttaggcccaactcaggtggcccagtagcctatttatttagggttttttacaaaaatattagattttggacaaaaatttacaattttactatcacacgaatttttttacaaaaatattgtcattttattagaaaaaactgtaagacaacaaaacagaataattaaaataacagtgaaacaactaaaaaacaaccatagaacaaccgtgaaaacttaacataatacacaatataaaacttacacagtatttttgaaaaaaaaaacatagtattaaaaatttatcccacattaaaaaagtaaaaaaaattaaaaatttcagtatgtggtgtaaaaaccaaacttaaagcttcagcgtgaaagcaaagcaaaaaagcaaaaaaaaattgaaaatatcattcgtacatgccgatactccttagattgtacctttttttttaatttaaaatcacatacatataatttatttttttaaaaaaaaatacacaacaaaaaaaaaaaaatatatat

SEQ ID NO: 148169 - DNA, 1944 bp, Cannabis sativa
  modified_base (814)..(815): a, c, t, g, unknown or other
agatttactaattaataaaaattagaaattgcattttatgtttgttgcccctgattttgcctaacatacgtggacctgtataaagacgacacgtggagctgagaggatcagctcttaaaaaaatcaaccaagtcttaggcaacagaggagtgtctctaggaagatgactcccagagacggtatgagaaggatctttatgctcccggaggccagggccatactaaggcagcttcgggaggtactggactctattgaacaatcacctcgcatttaatgccgcatgggggaagacgtattgaaactaccataaacgatatgactaatggcgtaacccctcttttgcagctattacgctgtgattaataaggctaatgccggctactttataaggaatcacgtcaatcaagaggagataaaagattatatccacctaacccctaagatacctactgtataggtcatgtatttcctattttgtatctgctaggaatatatgcccgtactgaacctgcacagaaagacaagtgattcagttctagggatccccctagaaaaatactataaataccccacaaacacactgagaaaagggtcgagaattctgggttcataggaatcaaagagagaaaataggagaaatattcaccaagaaacttctctgtaataaatactctcattaataacaaagactcgtggactaaggctaattaacgccccaaccacgtaaaaatctcatgcattaaactttatacagctttcttatatatattatttaattggctgccgaatacctcggtcaacattttggtgcttnnattgagagctgaaggaagcgtcttcaacagacaataaccttataaactggcaacaatggtggaaactcgcagcacacatcagccccgtcctcctcaagatgctcaaaatctggaggacgaggaagtggtctcaagagtcaacatggattttgaggagcaagaggaggccaatgatgacgagtacgaggaaaactttgacgaatatgacgcttacaacgaaggctgttacacggagccactgctcttaaggaaaaaggctgctgatcatgatgctgagatcgcagcccaaaaagaacaaaataaaaagatgcaagaggtgatggtcgttatggaaaaagccatggagacagcagggatccatatacaccttaaggccatcccagtgggacttgaggaaatgccagaagattcctctccaagcactcagaagcacaagcccagggaaccaagtcctatacggtatccctatgaagaaaatcaacggaaaacccctacttccatcctagggagaaagaaaaaggtgcaagatttgcaaaaggttcgctcagatttctcgagagggaaaggtccgcagaggggcagactccaaaaagggagtcttggccctcaggatcaagaggaccgaaaaggcatttctgtgcaccaggaacccgaggagaaaggaagagggaaccgaagataccctcctgttgatttaagacaccaaattaacgaaaagcatggtgatttgcaggatcacttggacaaaaagaaacacatgccggcagtctccgcaggaacgctgaatgaaggaattatggctgagttggcaatagtagtaaagacattgctcgagtcttccggaggctaaaaggggatgactgagactctgattgtgaggatcgggagccgtgcgcccgacacattttggaggcagagctccccaaaaattttaagatgcccgagatggcagcctacaccgggggctcagaccccagcaatcatgtctcagtttaatcgagtaatgacggttatgagagtcagcaatgatgccaagtgtttattctttccactaacgttgagttgttccgctgaagaatggttcaaaaagttggaactaggatctgtggattgctggaacaagttgcaa

SEQ ID NO: 148170 - DNA, 621 bp, Cannabis sativa
  modified_base (51)..(56): a, c, t, g, unknown or other
  modified_base (568)..(581): a, c, t, g, unknown or other
tttaaaaaatattttcacttttctacttttaaaaacaaaaaactgattaannnnnngttaccaaacgccacctaaataaacttaattatttatgcaaaaaaaataacaaagaagtaactatttgttgatgattaaacccccaatgtggtgagaaaatagtgtcattctttaacgataaaatgaaaaaagaaataaaaaaaaacactggtagaagcaattgaaaccacataaataactcctaatatgcaaaattaaaaaaagaggcatttgtacaaacagatagggtgcaatatgtaaacaataagtaatatttgaacccaaccagatgaaggaaaaaaaaatttaccaaaagataaagtagatgtaatttgtagtagttggacaaatttgaagtgcaactttgagctaagctacaacttgagcaaacatgaaaatgggttttaatttgggaaggagattagagagacagtgacaaaagaaataagattatatcactgtgagtgaattgggtggctatggcagtgaaaaattgatatattataataaaatgggtaaatactattttggnnnnnnnnnnnnnnaaaagttacagattggaccctgtgttttgttaaatgacaa

SEQ ID NO: 148171 - DNA, 609 bp, Cannabis sativa
  modified_base (451)..(454): a, c, t, g, unknown or other
taaattagtctgtctaatctagtccagtcctacgtaccaaatgaacccaaaaagtaaaatgcatttcgaatcatgaattcatattttttatttttgctcttgaatgagggaatgagtgtgttggttggtttagaaatgcaaataatttttggaaagattcaatttgtttttgtttggttaatctaatttttggatctttgaatatttcatcagagaaaaatggaacttgactcaatttatcgaaataactaggcttcaatttttgcaattattaagttgaataatctttacaaactagttgtaaaatagctaggttttccactttcatataacaagctatatataatgtacatatacactgtatataatagatatttagagatttttttctcaacagtagaaatataagggaaatttgataaaatgtatttaaaaatttagactattcttnnnntataccacctttaaacaaatactctaaatattctccacatcctaaaacccaaaattaccccaaaaactctcttctcccactctctctgtctaacttccccccctctctctctgttattccaagcctcgactattcacgagctccgaccgaccaag

SEQ ID NO: 148172 - DNA, 758 bp, Cannabis sativa
  modified_base (58)..(70): a, c, t, g, unknown or other
atctagacaccgaccacttgtctgttccaggccctgttacccgaatcccgagtcaagnnnnnnnnnnnnntcacgggtcttggtctggttcttgttaaggtccctgatcccatttctgagtttgtgttcgggatcgagattggggtgcggttctatgtcacgactcttgtatcgtgtcccttgtctggatccatgtttgggtttgagttcaggttcggttttgggtcccgagtccaggtttgggttgggatcctggtccggctcccaatttttgtctaggttagatttggagtccgggtcctggtccggttacggttcttgatctacgtccaatttatgttatgatttcaagtccaagtcctagttccactcccggtcaactttttcttttggttccacttttgggtcacagggtacgagttcgggtcccctttggtgtttgggactgggtttaggtccgggtgtgggttcaggtccttaatagggttcgggtccagggctaggtcccaaatccagacactgactacgggttttgtgtaagcccttggtccagatgcggatcccgatctcgggtcccagtgtggttccatttctggtgccaggtcacgagctgggtcctaggttcaagttcgggtctaggtcggggactaggtccccacccctgttctgtttcccaggtccctatcctaattctgggtctaggtcccggttattgttgagtttaggtcccagtctaggttcgggttcaagtcctagtc

SEQ ID NO: 148173 - DNA, 832 bp, Cannabis sativa
tgtttgatggccccagcgtagcgctttaattcttttctggtggtccccccaatatggggcccaccggagatcatagccactctttcgttgggtcttggcagaagtctaggggcctgctgagggatcgttcccccgtggggcactataggtgctagcgctccgggtgcaccccttggtgttccttgaggcaactgtccccctgctggaaccggggtgagatggggcagccggtttttaatccactcgtatagatgacccaaccagatcaagtttttgatctcgtctttcagattcttgcattcattggtactgtgtccaatgtcgttgtggtattcgcatctcttgctgggatcccttcgcgaactatccctgtacggaggaggaggcttccgtagtgtgtattttgccttgtggcgaaatatactcgctcttgcgtgtccgttagctccgtgtacatggtatattgaggggtataccccctttgttgtcgcttgtcctccgtccggttgctgccttttgaggatctctcgctccttgatctctgaggaggtccggtcaggcttgcagtgggagcggagtgcgacggggcttgtccgttcatccctgaggggttacctaggggattcccaaaatgcgatgatgcgggattaaaggctgggctctgattatatcctggtgtagcggagaattttatgtcgctcattggtggagtggccggaggtagggctgatattttcaccaaggccctagactcaagtcgctttgactccctcaaaaagtctttgggagtttgcattgtctaatctctcttgttcatatttttgtacaatat

SEQ ID NO: 148174 - DNA, 810 bp, Cannabis sativa
  modified_base (109)..(115): a, c, t, g, unknown or other
ttttgcagatttaaaatagaagaagattagaaactatcaaaggaataagatgggaaaaagatcaaaaaaatctcacaaaaagatgataaaatagagaaaattgtgcaannnnnnnaagctgaaacttcaagcctaaattggactatcttctgattatattttggaaaatggcaaaacataaaagttctagatctctcttttatcgtttcgaaacatcttgaattatctaattccaagcaatatcgagagagttatagccaaaatactatcagtgaatgtaatagaaaaattaccatcgaaatgaagccatgtagtgaaactctaacatgggtcgcggcccgcccccctaaattgcacaaaaattgtctttttctctcacgtgggttttggtcgaataggcatttaacatgggcattttatatctttttagtccttgaaagcctacataaatggtgaactaaagttgatttcagtcaaggaattgagagggaaaaaggagtacgaattttagagaccaaagtcaatactggaggcattctataaaggatttttagcattattttattctctatcttcttctctttcttaaagttaatatgtgtaatttttcttccatgaacatgtgtagctaaacacttgattagggttagatggatattttttcacattgctttatggtttaaatatgatttattttccccctaatttttatgtattctatttcattcgtccttaattacttttaattgttttgccaccaattaactgtctatgattttgatgcgagatctgagaagtgagtgtcaatta

SEQ ID NO: 148175 - DNA, 790 bp, Cannabis sativa
  modified_base (29)..(30): a, c, t, g, unknown or other
taaaaaagagggtaaaaataaaagaggannatataaaaagggtataaagtgtaatttcctcaaataaattatgaattgcattgtatatccattttactttgtttattaatttttaccttcatttttatattctttaagatatacctacttttataaatgatattctcattatatcccttaagttaatgtaaaatatgtactaaacttaagtggagagtgatggtaaattgggcaatccactcaaaaagtgggtatattttaatgaaatatgagagtattttttattgatgggtataaaaaagaggtattcctcaacttatcccacaaattttagtattccgaaagagaagatatttttattctggattatttagactgaaatttctagtttttttatttttttactgtgggatagaatttttttcaaaaatactgtattttttttcaaagacattgtgtactgtgttaagttttcactattgctccatagttatttttcagttgttttattattatttttagttgttcagttttgtgttccactgttattctataaaacacagtatttttgaaaaaaattctgcgtgacagtgttttcgtgaaattaacctaaattttaatatttttgtacgtttacatttatttttacaacctttaaaatcagtttcttgaggcatttccacaaaatatatggtagtaataataatacacaaaagcatgcacttagtactttttttttgagaaattttcaatattattataaatcaacagtcatttacaataatagaga

SEQ ID NO: 148176 - DNA, 680 bp, Cannabis sativa
  modified_base (38)..(40): a, c, t, g, unknown or other
aggttgttaatccaacatacatgatagtaaatagatcnnngtaaaataattccaacagtagcctctcgccataagaccttgactactaaaatctctcatttccttaacactttaagctctctcgccaagattttgataggttgttcttcataagtcacatcttcctgaagagggatagcctcatactaaataacatgtgacagatctatagtatacttcctcaacatagacacatggaatacattatgaacatgtcccaactgtcctagtaagtttaatcggtaagcgacctccccaatcctctcgataacctcaaaaggtccaatatacctcagggctagcttacccttcactccaaatctcgttactccatgcataggagtaactttcaagaagacataatcaacaacatcaaagtcaacttcccgtcgatggagatcggcatagcttttctgacgattctgaacaaccttaagtctttcttggattcgcttaatcttttcagtggtactagtgataatctggggtccaatagtgacatgctcatctggttctgcccaacacaaaggcgatctgcattgtctcccacataaggcttcgtaaggagccatgcctatactggcttggtagctattgttgtatgtgaattccactatgtgacaaatgttctccccaactac

SEQ ID NO: 148177 - DNA, 954 bp, Cannabis sativa
aagaaatgttaaatttaattaatgataataaatgagaaaaaaaataaaataataataagaaaatataaattgaaattcatatttgaaactaaaaaatcatagtaaattttttaaatataatcacctatcacctatcacgttttttttaaaaaaaaaaaaataacaaagcactaatataagaaatacatcaaaagaaagctaataaaagtctaaaatattaaaaaaaaaaaaataaataataactctaaatctatcacatatcacctagctatcacatttttttttatttaaaaaaaaaataacaaagtactaatataagaaagatatttaaataaacttaatagaagtctaaaaagattaataaaaacttaagaataaacttaatagcttcttaaacttagaaactgaattttttcttattgttgcattcattagattttcttatacgataagtggtaaacacattcagtatttaataattgataaatgataaaaaaaaaaccaatagagggaaaatatgaataaatgataatcaccttagtattaagagactcccacattctacaaactctaatttttatactccatcatgagagaataatagagaaagtaagtagtaaactgaattatgaatttaagagaaataggttaagatatatatatatatataaaatctagtaagtgatatagaaaaaaagccataaaatatatcattttaaaaatttaattttaaaaaaaaaaataagcaaaacatgagatttttaaagaaaatatcaaaaaaaaaaaagataaaaaaggtggaatgatgatgttttttttaattagttgtttttttggatttttttttaattattgaattaattaatatttaatgtgattaaaaaatatgaaaaaatgagaaaaattctagagtagaataaaattatcttaagtgtcatatcaccgcctcatact

SEQ ID NO: 148178 - DNA, 541 bp, Cannabis sativa
atctgcccacaaaattactgcacaaacataaaaacataatacttaaacattaggcagcctgcccattttagggtttgagtttaggtgtttcaggcttgggtgggcttgggtttgggttgtgttcagattaagactgacctaaatattaggcagcttgaattattgtacaaaacttcttatattaaaagaaaaaattacattatataaccactttactttacttattttaatttttacctttatttttatatatttttttaaaatatatctatttttataaataatattcccattaaacttcttaagttaatataaataaataaataaatactaaaaaaaacgataatagttgtggtggaaagtcctatttatttatttttaaatctcttattcttataattaaactgtgttcaaacttcaatcatagtagctaacatcaaatggccatatttaggggtgttcattagatcacatccaatatttttaaacatatccagatccgatccaattatatattagatgttagattttaccatccgat

SEQ ID NO: 148179 - DNA, 654 bp, Cannabis sativa
  modified_base (320)..(321): a, c, t, g, unknown or other
ttttgccattttgcattgaagatcaagtggtggattctcatccattttagctcaaattttgggttgtgaatccttgcaaggtgcttttcaaatctaccggttccgatttggcgattgtcctctctaaggtgctcttctataatacccacttggtgagacccaaactttttcttttgtgtatctatcttttgagatgatgttgttgattgtattggtgatccaagattgtttaatcttgatgttgttgtgagcctctcgtctttctagagaataactttgtaatcccattattgaactttggtgatagtgaatgatttgannggactacggtcccgtagttttttcccgcattgggtttccatgtaaaaatcttggtgtctcacttttattctcgatttgtgtattttatgttgtttgtggtgctttggttgatatttcataattgcttgttgtggtgtttgataagtatcccatttttgacatacaaagaggaaaaatattgtggttaattgcaataggttttcccaacataatgaaagtggacttgagtaaagcatacgatacaatggattgggactttgtcgaagacattctaaaaggcttatgtgttgggttttatgccttaaataaaactctatttcaatgtaatccaga

SEQ ID NO: 148180 - DNA, 598 bp, Cannabis sativa
gtgagtagatctaagaacctagtaaaataatttccaacaaaccagatctaggcgcagaaccgaataatgactctaacccaagagacccgaacccaaccccagaattgcgccaggacctgcgacccagatcccgtaacccaggacccattacccgggaccaggtctagaacccagacctataccagaacccgaacgcagacccaaacccagaccaagacccggacccagacacggactgaaactttgacccagactcagaccaaaacccagactggtactcgtactagaacacggactcgaacccaggacccggacctagaccgatatccggtatgggacctagactcggactaggataaagacctaaaccaggactaggactagaacctggactaggaatgatcgagactcaagagctgggaccgagatcgagacctgggaccgggaccgagaccgggaccgggacctgggaccgggatcgggactgagaccaggactgggacccgggacccgatacttagaccttagacctgagaaccgaattgtgacccaaacctagaccaagccaagacccaagacaaggaccagtaccgaacac

SEQ ID NO: 148181 - DNA, 563 bp, Cannabis sativa
  modified_base (60)..(69): a, c, t, g, unknown or other
  modified_base (179)..(181): a, c, t, g, unknown or other
tggttaggaaattattattttaatgataaaataataaaaaaataataattatcctaattnnnnnnnnnnatatctcaaattaagtatttttcaaatttctacataatatctaggttatttaaataatataccatttacaaatttctaataagtaaattttctaacttataatttataannnattaaatatttaacaaaataactattgaccgaggttttctgcaaccgatttaataatatatataagaaagttgtaggaagtttaatgcatgggatttttacgtggttggggcattaccgagccttagtccacgagtcttttttatttatgagagtatttattaccgagaatgttcttggtagatattcctcctatttgctctctttaattcttatgagcctagaattctcgacccctatctcagtgtgtttggggggtatttatagtgttttttttgggggatccctagaactgagtcacttgtctttctgtgcaggttcaatcggggcacatattggtagcagatgcaaaataggaaatacatgacctataccgtaggtat

SEQ ID NO: 148182 - DNA, 665 bp, Cannabis sativa
  modified_base (517)..(522): a, c, t, g, unknown or other
aattttgtaccaacttaaattaagaaatgttcataatatttattaaaaattaatactaaggatgaaacataaattttatttaattttaaacctaattaagtatataattttataaattttaaattaaaatttatatttagtttattaaaattagtaattttaattaaataaatatattaatattaaaataaatagactaaatagatatcaaaatgaaaataaaatatattttaaaataatgagctttagttttaagatattcgatctccattattggttttacatggttcttattttaatgagattcatccataatagatattcattcattagcaatttaacatcgtataatcttgaaagataagtattattgtaaatcttttattctcagtaacgatcacaccaatagtgacttatcagaatagggtttacaaaatataaaacaatggtagaagctcataaaataaaaatgaccttgactctgcctaaacaggacaatgttggattcttattttgnnnnnntaaaaggttgctaaaatggtatctattatatatgagctgacaactctattcaactgataatgtatttgaatctggtctaaacggaacacttatatcatcaagttggaaaccttagtaattatttaagatgtgttttttttttt

SEQ ID NO: 148183 - DNA, 511 bp, Cannabis sativa
  modified_base (256)..(267): a, c, t, g, unknown or other
gctggtatattctgatcttgtgtgttttccattttgttagatcagatttcttgaagagaaaatcggagctaaacttttctttactaaagaagaaaagttgtacttactgcccacaattctgtaggtacagaagtggaaattcttgggctgattgaagatttattttaggaaattttctagtaggctggggtcttgttcagaccatgtgtaagctgttaataaggtgtatattgattataaatacactttataacannnnnnnnnnnnatctctttcatacactttgaattgtattcatatcttaaggaaaaagtgtctttgttttgtagagaagagcttgtatgactcttactctgtttatatgtattttgtattgtcttgactctgtattcaagtctacaaaggagagaacatcagtgctaccttcgggagaaggttttacaaagctttcgggagattacttttcaagtcttgcatcgggaggattcaagcacacaacctttgggagaag

SEQ ID NO: 148184 - DNA, 643 bp, Cannabis sativa
aattctttaatctgaaagcagtgttattgtggactgtcagtgattttcctgcttacagtaatttatcaggcttaagcacaaaaggttacgaaggttgcccgatttgttgcactagcacatcgacttgtcgctaggaaaatgacacaagatgtgttatatgggtcacaaacggtacttgcctacaaattatcctgatggacagaagaagaaagcattcgatggtactgaagagggagatatggctcctttgccactgtcagtgaaacgaattctccaacaagtagaacttgtagattttaagtatggaaagacgcaaaaaaataaaaaaaaaaacaaatggttattttcaaaaaaagtcaatcttttttcgtctttcatattggaaaagtttacttgttcgacattgtttggatgtcatgcatattgaaaaaaatgtgtgtgagagtattatcggtaccttacttgatattcctaaaaaaactaaggacggtctaaatagttgtttagatctcgttgaaatgggtatacgccaatgtctggcacctaagaagaaaggtgaaggattatatttgcctcctgcttgtttcactttgtccaaaaaggaaaaataaatagtttgcaaatcatttgcaaatatgaaagt

SEQ ID NO: 148185 - DNA, 694 bp, Cannabis sativa
tcgccaaccccgtggtagttcccatgaaaaatggaaagtggagagtgtgtgtagatttcactgacttaaacaaggcttgtccaaaagacagttttctgctgccacgccacacattgatatgataattgacgccaccgcggggcacaagctaatgagcttcatggacgctttctcatggtataatcaaataatgatgcatcctcccgaccgtgataaaacgtcattcatcagtgagcgggggacatattgctacaaggtgatgccctttgggcttaaaaacaccggggcaacgtatcagcgaatggtgaacaagatgtttgcccaacaattgggacttactatggaagcctatatcaacgacatgctagggaaatccaaagatggcgccgaccacgtcgatcatctgcgagaatgctttcagatcctcctcacccactcaatgaaactcaacccagccaagtgcgccttcgcggtaggatcgggaaagttcctaggtcatctagtaacccgacgaggggtagaagtgaacccacaccaaataaaagcatttcaagcgacaggacagccccgcaccgtgaaagacagccaccttaagtcgcttcatctcgaaactctcagacaaaagccttccattctacgacttgctaaggggaaaccgcaagtttaagtgggacgaaaaatgccagctggcctt

SEQ ID NO: 148186 - DNA, 527 bp, Cannabis sativa
atttaacatgctaaaaataaagtaagttcaaacagctgtcagttgtaagcgtgacttttttattatatacacgtataaaatagaaataatgttttctatattgtaaattattctaaaatacttgaaattttgtaaaatgttttaaaaaactataacatacacgattatgagaaaaattaaactaattttttttaaatgccgaaatatatatttaagagggcacattctaaaagcacccaataattataacacattattagccttcataaatatgtcctacccaaaatattttttgaccgttgattgcatatcaaaagaaaaatagggagtaatttttagttcatttaaatatctatatcaattaatgtttaagaaaatatctgtatcaattattgttttaaaaaatatctatatcaatttcttttaataataatatattaagggtaatttaattttttatgcttacatttagttaaaaaaaatttcctaaacaaataataattaatatttgtaggatatgacaattt

SEQ ID NO: 148187 - DNA, 567 bp, Cannabis sativa
gcctgagacgacgtctggaagaggcacaacgtcgaaaagctaagttagaacgtgaggcagtctcggccagggcgacacagggaacgaataccctaaatcaacctgaacatggagtgagaagaccacgaggcaaacctcgtggctcacgaaccaagagacaaacggacaacctagggaaaatgagacacctcctgaaaatcaagaggaacagccagatgggagacaaccaaaaattgatgaacgagaaatccctaatgaaaatgaggatgattttgggactcaactgggagaacggagatcacctgctagaaatcaccaacgttcttcccaaacacattgagcgaggactagtacataccctggtgggggaaatgcgatatatcgctctcgagaggaaggaacagagcctgaagaagcaagtgtgactttaaggtgatccacaacccatagtcgatcaaatcaatgagaaaaaagtactcaatgagctaatgattgagaaattatgggaaccagtaaatccgcaagccactcaaagacaaagtctatgagtaggacgcgatctatgag

SEQ ID NO: 148188 - DNA, 539 bp, Cannabis sativa
taggacccagctcgtgacccagcaccagaaatggaaccagtctgcgacccgagattgggattcagatctagacctaggtcttaaacaaaagccatagtcgttgtctggatttgggacccaaccctggacccgaaccctgacaaggacccaaatccacaccacgacctaaaccgagtcccaaacccaaaagtggacccgaacacgtaccctgtgacccaaaattggaaccaaaaccggaagttcaccgggactggaactaggacttggacttggaatcataactaaaattggacctatatcctgaaccgtaactagaccaggacccggactccaaatttgacctagacctgaattgggagccggacccagatgcccacccaaacttggactcgggacccgaacctgaaaccaaacccaaacgtggaaccagactagggacacagaaccaaaaccaggccgagacccttgacagtgatccagatcttgactcgagattcgggtaacggagcctagaacagaccaatagtcggtgtctagat

SEQ ID NO: 148189 - DNA, 867 bp, Cannabis sativa
tttgctgaagtgctttcaccagaattgctcgtttagcttggcgtaacctaagtccagacgttcgatccttgagtaagttctcaatttcttttatttttactttgcacatttactctctaaatgcaactttaaccttgttgtagaggatatgtaggaaaccctaagttttagaaactctgcgattttcctttgtaacgattcatgctaattcatcgttcgtaatgcttactttttgaactgcataattcctgtccttcatcttgcttattctaagcttcatgaaattttttgcgctaactcgcgaaaattcaaactttctgagttttgacttttcgtcgaatatttttattctttaatccgttgagtactcctggtcggcgtatttgccttatttaatgtccgatatcctgaccaaacactcatcttgtgttttgtcttttgtagatgaacccaggtgagttttggggaaccgaacaccaaatcgaccaagatttgcttcaactcttgcacgagggtcatcctcgtcttcgttctagtccaacttcttcgagtgacggacattttagcttaagtcttccgtctggccataggatgatggctcatacaaaaaagacaatgcgtagaatcgacacatctaaacccctcaagtggcccgacatgccaccttacccagtgtcgaacaagatccgcccgtccaggaggatgagggtcatgaaggggatgccgaggtcgaagagattgaggaacaggacgatgttcgtcctagcagtctttccgaggcggaggaagaggaggaggttgctcccccaaactttggaggatacaatgaggctggggagccagtcgatgcggatggcgacgtcctgg

SEQ ID NO: 148190 - DNA, 626 bp, Cannabis sativa
taaagtctcgactaaactgtttgcgaccttttgcccagtgaacatgcatcactatttatagggttgtgaacttggagaggaagtgtttcccttcttgttcccatgggtataaacagaaaaaatcgtgggattaatgcggaatacaaagatcgtgggataaatgcagaatacactgatcgtgggattgtgggtatgccatatcactataatctgatccccaagtaatagggatttcgttgatgactcataatgcgaaagctgaatttgctaagtgttggttgctctacgcggattgttgattgctttgctctgggcatgccagcgaagcatcctgttcagactgtaccctccgagcagatactccaagttgattccatgtgtcaccattatgtgatgccacgtcaaagtgcaaaaattgggacaacatttgcccccaagtctgtacgggacttctgaagttccgtgtagacttcatccgagctgcttctgcctttggatggggacacgtgttgggcacgtcttttcgagactcgatgtgaggctgactaggcatcccttcagttttcggctaattaatgctctaacaattaatatttcgaaatccaattttctctcaccacggttga

SEQ ID NO: 148191 - DNA, 628 bp, Cannabis sativa
gataaagttatcttttaatttaaaaatatggctaatattaaaatatgtgatcttataattaaataatatataaatattaaaaaaattaacaaatttttaaaagctgaccataattaaaataaaataatcatttttaaatttaaacctcaaaatatcaaagaattaataataatttattaaaaattaaattattaatttaaaattgatatttatgtttaaatatattaaaaataatatttgattttgaattttagggtttgaaattgggaaaattcgaaattttttttggaaaaatcccacaaaaatgcacattgtgtgtgctgcccaggaggctgcaagcagccttgatgcatgcgggtagaggggacttgcaggatgtcccaactgagaaaactcgacgtgtgcagggtggggacacgggattttcagccttgtgcgtgtctgaataggttcaatgccgtgtcttcagacacgacttgtccaggcatgcgcgcgcacgggcttcttgtccgaagctcttggtgcgtgaatccaaataaaatatttttagaataaaaataaaattattttcatgaaaaaattttgtaattcacattcaatcatcaaataacacataaactaatatgaa

SEQ ID NO: 148192 - DNA, 894 bp, Cannabis sativa
  modified_base (551)..(563): a, c, t, g, unknown or other
gggctgaacctctataaaattcccatgtcttattattgctttatcatatatctattactacatatcgtttatcgcttgtgaaatagactcattgtcgttggctaaaagtgaagtcaacagagtcaatcactataggctttaaatgattgatgatgcttttttgctaagtattactttgacatagtgagcatattctcaatcactataggctttaaattattgagaagaagaagaagatattgaaaaaatagaagaggctctctttattttataattttgtctgacaaagagtcaattaggttattctaattaggttagaaaataagagtcatctcttctatttgtaggatagctattagggttaggtttagaatttaaatagaataaaaaaaaggataaaataggctttatttaaagccttataatcgaatcctttagtaggcctattggatttcaattttgccattttatttggaacttatctttcttttctcaaatgttacctttaaattctaactctatatatgtcaattctatctatttaataattnnnnnnnnnnnnnaaataaaatttccatttaacttatttattaattagaccttacaaagtcttttaagtaataaacaaaccctaaagtctcttttcttcttaaataagcccttgcttagtgaaaattcacaaacaagacagtcttattcaaaattttaattgattaattaaaatcaatcaattcagactacaaaataatattggcccagttagtgtgggaaccatgggcctatgtgacaaagatctcaataagtagatctaaaatttactaagtaaattttctaacttattaattcctcctaactccactatagattcgaaattgcactcctaattacatagaa

SEQ ID NO: 148193 - DNA, 695 bp, Cannabis sativa
gtgggctgtataaatgttgattgggccggcccacagtaattttgtaatattttaccctttttggaattttcctgtttttttcccttttttttttgaattttaattataatactaaaaattatattaaatattatattttttttgttattttactattttattaatataataaaaatattttaatactaaatatttgttaaattcaataaattatattagtaaatattaaattttttaatttacaataaacattacattatttttttactcttaaaaaatagtatttaatttactctaaaaattaaaataccttaaaaatattaattaaattttatctttaaagtgttgaattaatacatttcaaaactcaattaattaacaaatcatttattgtataataataatttattatagccaaatatttatattaataaaaatattaatattactttatttacaataaatattccattttatttttactcttacaaaataaactacatttaattaactccataaaataacacacattaaagatattaactaaattatactaattttgagaattagtattgggaaatttgacatcgtatacttaaaaaaagcataaagtgtttttatatgcttcttaaaaaaatgtaaaaataataccctccaaacatctttaatcccaacaataccctcctcatttcaaa

SEQ ID NO: 148194 - DNA, 557 bp, Cannabis sativa
gtatgcctcttcatatgactctggttctctaaacttttcttcttcagctaccgcagcattagcatattttggatttggctcttacgctcttgttgatctccaaagttctgattggctatcatcatgttcttttctttgatgcacccctgctttccatggattctaaggtgtcttgtcctcggtgtttgcttctttatttgtatcttgagttagaggtaactcaacaatttgctcccccattttcttctgcaattcgtcttccatttctttagaatctggtaatgcttccttttgcgatgaccaccatgatgatgcctcatcgaagaccacattccttgatgtataacactttccagttgtagggtcgcaacatctccaccctttccgttcgctgtcgtatcccacaaagatacatcgtatcgccttcttgtcaaatttgctacgtaagtggcttggcacgaatacgtagcacacaaaactaaatactcgaaagtgacttactacagatttacaaccccacagtttttcaaagggtgaaacgaaccctaacttagctt

SEQ ID NO: 148195 - DNA, 1140 bp, Cannabis sativa
tgaaatgccccaccatgccgcactgaaagcatgtcttccggttacactctcctggatgatgtttcttacaatgtgggcactcagggtaagagtaactttgacgtccacctcttccttggttcccacggaaccgcttgctctgccccgagccaccagatgtcggcgtaactttcctcttctgctcagtggtggaataaccactatccctaccataaacaggagtaggaagagtggggtttccaccaacactcagagtcacccgaggctcttgaaggaattttaccgcaccctcagctcgaaaggccttctcaaccgtttccgcataagatgtgcttcattggtagtgatcaccagacaatgtctattcttcacattcaaactggctaggtactgttcttttttactaaaatttgttggcacgatacccacggcaagtttggccaaatgattgaactttgtagtatactccgtaaccaacatcccctcagtttgtactaattcggtcaactctttccgcttagcactacagactgcttcattataatacttagcattgaataactctcggaactcctcccaagtcataatagtgatgtccagagtgagggacaccaatttccaccacacgagagcgtcctcctggaactaaaaagtggcgcaagtcagctgatcattactagccaccccaataaaattcagaattcgctcaatcaccgtgagccactgctcagccttcatcacatcaggatctcccagaaacactagaggtgcttgtttacggaacctttcgcataacagctccatatggttgccagaaataggttgttctgctggcacagctggagctacaacggtctgagcttgttgtgaagggacgccaggatgaccctgctgccttaacctcagaatttcttcatcttgttggcgaattcaatcttgcatttctgcaaacctctgctcccaatctggaggagcttgtggtggatttacaagacgaccaccctgaactctgccacggccacaaccacgaccacagggattttggggaatttgatttccctgtccgcctccggtctcaaccatattaccctgacttcttgtatttcgttgggcgtgcattttataggacttagcctgcga

SEQ ID NO: 148196 - DNA, 789 bp, Cannabis sativa
  modified_base (269)..(276): a, c, t, g, unknown or other
ttaaattatagtacaccataaaagaccccataagcccaattggttaataaccccttagggttataagggcaatagtatatatgtatatatatgtgtaatgtgtggaaatgggggtgagatggttttgtgtggtgaaagacaaaagggttgctccacaagtgttctctccaaaaaacttttgctcaaagatcttaatggtgatggctctcatggatggcatatgaggtatgtgttttattatctttgatgctctaaataaatactagatnnnnnnnntaatgattatgagtaatcattattttaacaattggtatcagagccaaagttattgattttagggctcaaaattttttttcacaatttttttttcaaatctgaaatttgtagtatttttttcggattaatgtgtttaagattgtgtgaatatgagtattatcctctaaatgtgttcatatatgtcatggtaacaatcttttaattttttcattgagaaatacatgagttttaacaatggagaaacccattttttagattcatcattttatgatgtattattatgtgtttgttgaataaatggatattggaaaatgagaggattaaaaatgggacaaaacgcctcaaacggcgtcgaatttggtggccggatgtgggagttatggccgggtcacgaaccgggtcgcgccgatccgagttgcagacccgcagacccattgaagaattttttggttgacagggacgataaaaacgacatgtcgtttgcctctgtcaggcaaaaacgacatgtcgtac

SEQ ID NO: 148197 - DNA, 522 bp, Cannabis sativa
  modified_base (475)..(480): a, c, t, g, unknown or other
aagaaagaagtgcatggttgaaagctaaatgcaagtgggccaaagagggtgatgctaactcgagattttttcataacatgttgaattcgagaaagacaagaataaatcaagtcgtggaggaagtcgactttcggtaacaatcaaatgataaaaagtgctttggaaagacggctggttgaattagataaattggaaggcagtgaaagaagaatgacaaaaaaggaatggcaaaatttagcttttgctgaagaaagaagtgtatgcttgaaagctaataacaagtgggccaaagagggtgatgctaactcgagattttttcatgacatgttgaatgcgagaaaggaaagaataacaatttcatgaattgaaaggggggatggatcgtttatcgatgaagaagacgatgtggttgaagagattttttttaagagattatacacctctgcgaagacaagagggagaagtattgaaggannnnnntggtaaaaaattttggatttcttggcgggacaactagaaagg

SEQ ID NO: 148198 - DNA, 530 bp, Cannabis sativa
tacatggagttaatatctttaattttcatttaaaatatatctattttgtgatgtgtttaatgtttaagtttcacctttgcaatgcagattatatattttattttcttaaaatgcactaagtatttgagtattgtgagataccattcgttagcaatagattcctaactagtagatgtaattatacttcgcgcagttatataataaaataaatataaattttagttttgtgtattaaaaattatttgtggttttttctatttaattaaagagaaaattacactttttatgagattttaaaagtttttatgttaaatataacacttttaaatccaatttatatggtatttttttttaggttttttcattgtatttgatatgctatatatatatatatatatgtaaattaggttttcaaatctcatatttaatattttatttgtttaggtagttttatttgtcactagtggcgaaaaagtcgccgaagtttgttgtcggtgtcgggaaaatcatcggagtagctgtcggtgtca

SEQ ID NO: 148199 - DNA, 871 bp, Cannabis sativa
atgttttatatggttttttttaaaccatatttttaatttgattggttagataatgtcatatttagtggcatttactttttatgccatatatatcataactttaataattattcccatatttttttaaaataaccccaaaaaaatgatgataattacaccacatactgatatttttaacttttttacttttaaactgtgggacggaatttttttcaaaaatactgtgttaagttttcactgttattttacggttgttttttagttattcattctactgttgttttaaattgttctgttttgttattttacggttgttttaggttgttttataaaaagatagtatttttgtaaaaaaaaattctgtgtggcagtaaaattgtaaactttgaccaaaatccaatatttttgtaaaaatctcaaaaaaatgttagaggaattagcttgtgacaggcccagtgaaatgaaagggggcacatttgctatgggctgtggaatatcgagtatactcaggcccaaataattgcgctttagataattttgcttgatttggtgtaagtttttcattatctttaaaagaatttactcaaaaacactaattttttcttcgtaattttaaggacgtcaaatatataaccatatatataataccttcatataaatagtcaataatttttttttttgggggggttttatataatttatgtaaaattattttatgagaataattttaaaaaaagatatcttactattataaaagtgttgtaatgaggtgatagtttggagacaattttaccctttaagaaagtcagtattaacaattttgcccttccaccggtcaataactgaagtattgtaattccatctaatagtc

SEQ ID NO: 148200 - DNA, 898 bp, Cannabis sativa
  modified_base (533)..(537): a, c, t, g, unknown or other
gtctcttgcacaccaggcgcgacttcatctataggagttgttacaccattgcccatgcttgccagctgtccaggattaacaactggcagaaccctcatgtttcatgtgttttgcaatgcaggatccaccgtctgcgaatttcctggatcagtcaggcctctacgagtttgcaccatcgtatttgcggttagattttgaatagagagcgattcttgattcttctcttaagaaagcaccaaaatgcggacctcgcttttagccaacgacaatgagtctatttttataagaaataaaagctttatagtaatcgatatagaataaagcaatataaagacacgagaattttatagaggttcagccctgagcaattcggtaatagcctaatcctcattacttgtattgacttaagaaccaggagaaagattccttttgttatagctcttccaacattatctctgaatatataattcttagataatatttttagggtattctcaacaaaactgtttgcgaccttttgcccagtgaacatnnnnnactatttatagggctagtaagcttagagaggaagagtttcccctctcgttacaatgtgtataaccagaaagatcatgtgatcaatgctaagtacaaggattgtgggattgaggctgaatacactgatagtgggattgtgtgtatgccatatccacgtagtctgatccctaagttatagggattgcgctgatgactcaagatgcgaaagctgaattcgctaagtgttggttgctctgcgcggtttgctaaaagccttgttctgggcatgctagcgagacatcctgctcggactatgattcccgagcagatgctccatgtggattccacgtgtcaccattcatgtgatgtcatgtcagagtgc

SEQ ID NO: 148201 - DNA, 803 bp, Cannabis sativa
cagtttataactgttggaaaaaaatcactttaaatgacagtttataactgttggaaaaaaatcactttaaatgacagtttataactgttggagaaaaccactttaaatgacaatttataattgttggcaaaaatattatgaaaattaaattactttttaatatatattttaaatattaaatatatataataatatttatttttattaaaaaataatattattaaaataaaaaaataatatattttaataattcacaatatatacaatattattctgaataaaaaatacaattgaaaataaataataaacatgaatattacaacttaatctttaaacaaatatgcaataataataatatctgaacaaaaaatatgtaataataatattacagattttgttgttcataaaaaaaatatattacaacttaatctctaaacaaaaaatgtctccaacctcagcacaatgatgttcttcttcacagtaatggtcttcttcacaataaaaaaactcagctactcttcaactcgctcatataagatttcatctcatttttctcagatctcaatgatttttcgaaatagaccagcacaaaatagaccaaccgaagcaaagaatgcattcacatggatgaacaaaaatataaaatcttttaaaattaaaacctaatatgaaatagactaaaagagaaaagagtacacactgaaaatccataaacggagacgacgactcaatcggatccgtcgaaatccatggattttgttgccggacacgactcgtctgagaacacgagagagggagcaacc

SEQ ID NO: 148202 - DNA, 685 bp, Cannabis sativa
  modified_base (150)..(154): a, c, t, g, unknown or other
agtatggtataattattttatggttgtatgtaattttcttaatatggtatatacaatgttgtttaataatattatattatttaattttatttttaattgtaagtatatatcttttgttcttatatagtttttgttgtctatagtatatcnnnnntttaagatgatatttagtttttataagggttgttaatcaaattgctcaaaccgcccgtaccgcaaaaaagtgtggtttgaaattctttgcggtgcagtcggtttgaatttttcctaaaccgcgcggtgcggtgctgtttgcagttttaaattgttaatatgcagttcaaaccgcaccccacattataaaaatatcaatttttatattaatttaggtccaatatgtaaatgttcaacttaaagcccactaattattgtattgttgaaacttaattttttttcatatttattttcaagtcttatggtatttttgacaagtattgctcaagctttattgtatttgtgattgttttattatttggtgatagtccaaaccgcagaaactgcaaaaactgcaccgcaccgcaccattttttatggtgttttagtttagcgatgcgtgcgatttgggaaattagaaaaattacatgtgcgaattggtttaatgtcactgacgctcgtacttacacccagtacatcgctaggaaaattg

SEQ ID NO: 148203 - DNA, 1126 bp, Cannabis sativa
aatcaagactcaggactaggactgagaccaaagacccaaccccggtctcggtcccagactcagacacagacatagactgggacccaggatctggatggaaatgagagcgggacccaacattgggatccggatcttgacccacgacctggggcttggacctgacccgtagttggtgtctagatcttacaatcataccgagaccggaacctggaacaatttctagaccaggacccaaacccaaactcgaaccccgagacccgaaataggaacaagaaccagaataaggaccctggaacaggaattggaccttgatccaaaatcggatcaagacacggaaccgaacacagacccggacccatgctgggatcaataccaggacccaggcccgaacgcggacccagacttgcgccagaacctaggacctaggaccagtgtcccaagacctggacgaaaacccattcccatacgagaactcgaacatagacccagacccagacccaaaccaagacccgaacacatacacagagtgaaaactaggcccagacccaaacccagacctagacctagacccagacccggactcgtaccaaaactcgaactcaaactcaggactcagacccagacatatatcaggactcggacttagacccaaactaggaccgagacctgaacttggactaggattagaactcagactgggatcgggaccgagacccgatactcaaacacgggacctcagaactgaaccgttaaataaacccagaccaggccaagacccaagacaaggaccagttccaaacatggaccgggaccagcactcggactgggaccctaacccagatcgggactaggatcctgacctgaatcggggactcggacccatgactaaggcccaatacccaaacctagacccaaacttgcagataagagccagaccaggacccaagacatgagctagaactggacctggatctagatttagaccccagacaggacccaagactcgagggttggacccgacccatattcggtgtctaaatcttgtaattagacctaggctcggacctagacccagaccagaactcgaacccgtaccaaaacttgaaactagactcgacatgtggtt

SEQ ID NO: 148204 - DNA, 578 bp, Cannabis sativa
  modified_base (133)..(133): a, c, t, g, unknown or other
cactaaaaattgttatttttttatataaatactaactattttactaaataagacattaagggttcgtttgatacgtcgcattggattatattgtattgtattatgttagattatattgtattgtattagtatnatttaatacaatattatgtttggtgttgacttgtattaaagttataatatatttttaaatacactcgaccccaacacaacctatgggtcgggtcccaagtccaagtccgagttagggtctagatccgaattcgtgtcccagttcagggtcacctctatacaacgttgtacatgagaaagttttatttgatgaatgaatttgagtgagaattaatttttatgaaaaataaattttgaagggcaaaataataatttatgaaattattgttttgattaattatgacaattatgaattgtattaatagtattatgaattatgaatcgtattatgaattataattaatagtatttaactatttaattttattaaaaaaaactatattaatattaaataatattaaataaacaaatacattattttcaagaaaataatatttattttaatc

SEQ ID NO: 148205 - DNA, 929 bp, Cannabis sativa
  modified_base (35)..(40): a, c, t, g, unknown or other
tgttaaataaaatagattacattgaaatggagttnnnnnnagggcataaaacccaacaccgggtccaggtccaggtccgagttccggttccgggtccgggtcctagtccctggtccgggtctcgggtcttggtcctgggttcgagtcctgaccggggtctgggtttgggtccgagtccaagttcggggtccgggtcccgggtctaggtccgagtcccgggtctaggtccgggtcccgagtctgggtccaggtccgggtctgggccctaggtcggggtcttgggtctcggtccgggtccaggtccgagatccgagtccgggtttgggttagggtccaagtctgggtcctgggtctcgggtctaggtctgggtcctggtccgggtctgggtctaagtctgggtccaagtcccgagttccgatccgggtctgagtttgggtccgggtcccgggtcccgatctgggtctgggtccgagtccaggtcccaaaggttctgagtcttaacttaaagtttttttttttttaaaataaatgtaaattgggtcggatcagatccgatccagaaaaaaattaggcggggtggagcgaatctgatcaaagatccaataagtattcgaatgtttcagatcagaggtgatctgtcgggtaggagcttcaacccgctccaactaaatggatctttttgacatgcctatatttagttaacaaactgaaaaaatattttgaattcaactaaattataattctaaatatctaattaattatagtttcaaaaattaattaatagatatttcattttagctactaaattatattttcttaatagtaattaatgggtaaataccattttggactctctgttttgcaaaagttaccaattggaccctgtgttttgttaaatgacaaaataaaatagtacaaataggaccct

SEQ ID NO: 148206 - DNA, 566 bp, Cannabis sativa
ctttttgaaatgtaatttatttgactatagatattaaattaaaaaataaataataataaaagcatttaatagctatttaatttgaattaaaataaatctctatgttaagtctgagaaacaaaggagttacttaaattatattaaatttaataccatgcaatcaaaattaaaataaaaaattgataaattaataccgacaataaaattaaaattggaaaggaacaaaataataattattacactgcaatacaaaaattactttaaatatcaaaataacaaaaacgtttaaaagcaatataaatactatatacttaaagtagaataaaacagtagagaaaataatttaaaataacttaatttattttaattaataaataaatacaaccataaaatagatataaagaattaatgaataattttttttaaaaaaataatctaattaaatcataaattttaaaaaacggccaatccctaaaattgagtatttaaaaaattaatgaatatttaaaacctaaaacgaaggtcaagtgtatctaaatcacaatgtatttaaatcataaaagcta

SEQ ID NO: 148207 - DNA, 515 bp, Cannabis sativa
aaatgtgccatatttatcataagaccttttaaaattccatactaagtgtaatttcctcttatacaaataatctctttaacggataaatctctactggtatagtttcagagagtttttatcagactatctatttgagaaattaacatagctttttgttcaaagatgcataaatttccattccaccaaatgcgagagagagagagagtaacaaacatcaattaaaaagaaattcaacacattttatctaaataaaacataatcctaattaatataaatatggtgaaagaggaagctttctagttcaagacaaagatacaaatagaaaaagtaaaaaaaattaaaaactttatcattttccttaagcaaattttctttctttattttgtttgattcttaataaaacaatattcaagagatatattcatagatttatacaactatataatatattttaaataccattttgaaccttctgttttacaaaagttactaattggaccttgtattttgttaaa

SEQ ID NO: 148208 - DNA, 1014 bp, Cannabis sativa
aaaaataattccaagtttaaagaccgcttggccggtcatgatgtcttaaaaaaaggccttatggccgaataagatataaaaaaaagaaagataaaaagagaagtatttaaacggctggagtcccaggctctcggttcgggtcttctaggccggcgggagctggaggatctgttgtcctagcgaaaggtacatcaacattcttggcagaggtagaagcaatcgcctcgggttcaccataagccacttgagaaacgcagtactcgagatacatgtctttggcctcgcccaggtaatcaaaatttgcctgaggattagccttccaaaagtcataaaaaatctcgagattggttgtctctaaggcatgtactttctcttcctgccttgtaacctcagatttgtacttctaaacctcagcttcaacctcctcctcttcctccacctaggagggactgctaggacaaacatcgtcctgctccacaatctcttggacctcagcgtccccttcatgatcctcctcctcctagacgaatggatcttgttcggggcagggtaaagtggcatgccgagccacttgaggatcaaatgcgtcgatcacgcgcattgtctttttggtgcgagccatcatcctatggctggacagaagacttaagctagaatacctgtcactcgaagaagttggactagaacgaaggcgagggtgatcctcgtgcaagagttgaagtaaatcctggtcgatttggtgttcgcttccccaaaactcacctaggttcatctacaaaagacaacacacaagatgagtgtttggttgggatatcgaacattaaacaggcaaatataccggagtactcaacagattaaggaataataatattaaacgaaaagtcaaaactcaggaagtttgaaatcttcgcaagctagggcgaaaaatttcatgaagcttagaataagcaagatgaaagacaagcattatgcagttcaagaagcaagcagtacgggcgatgaaattgcatgaac

SEQ ID NO: 148209 - DNA, 525 bp, Cannabis sativa
caaagaagttttactctttctttatttaaaattacttaaggggtatttgtgtatgataaaccagaatccatctggaaatacatggtataatgcaaactcaccatttcaaaaatgaaaagatttttgaattttaacggttctcgaataaacctctttgacgtaagaggggtcaaactgttataacttcctgaccaaacctttttgacgagagagaggtcgaatggttatagccttatgatcaaacctttttgacgaagaagggatcaaacaattataatttgcgcgagctaagaaagtgctaaatgagacatcaagatgtctttatagaagtacttgaacatagaaaatggatagattgcctaactattcatacgtgcaaataaaaaatatacaaagtaatgaaaccattaaaagtatattcaaattttcttacggtagattataactgccatagcgaggtaaaattgacaactgctcgaaaataaaaaagtttggtagataactaactacttaaacaggaagatt

SEQ ID NO: 148210 - DNA, 676 bp, Cannabis sativa
cttcgcagccaatgtacatatcaagccagtcttcaggatcattaaaccttggtcgtttggataccatgttgtaacgtcctgacccttagggacgccacatgtgtgcttttacaaacttatttctttctaatctattagtttagaaaaagtgtagtttaattaaaaactttttgattaagttgaaataaaactttcatacttattacaccataatacggggatatcctgtttataaaattcttttacaataggttacaaaatcactgttacaaaaattaaagttacatttctaaacatagaaaagaagtcgatcctgcttcccggaagctaagacaccatgactgatatgtacattgctcggacacctttgactcatggtcgaacgcagcttcttactttcttacctgcaccacgaagcacccatgagtcacaatgactcagcaagaaaagctactaattagacaccatggaaagtgctagcagatttcattacaatatagtattcataccaataggtcatacatattcaatgtacatatacaacttaatgtttatgcgagcacacttattacataataaagaatatttatagctgttcataatcaacaatctcagtatttcataaggcaccctaatcatacatcattataaacactcactttcagtgcttcataaa

SEQ ID NO: 148211 - DNA, 684 bp, Cannabis sativa
tccccaatttttccaatgaagtttcgaattatcccccgaggaaccccaccagaatttagaaattagggactcaatttccttgcaaagtttagttggtaacctaaaacaggacatggcataagtaagaatggcttggaggacaactttaatgagagtttctttaccagccctcaaaaaccatttatgatgccaagaatgaacaatggtggagatgcgatctttaagaaaggcaaaagcaggatatttagacctagacagacactgaggcaaacccaggtatttggcgataaacggcctatcctccaaatgaaatgtgtgaaaaaagagatctttaatctcagaatgactattgggggaaaataaaatagaagattttccaaaatttatcatttgtccagatgctttagaataaagagtaagagcttggttaagggcaatgcaagaagtaggatcagtagaacaaaaaaggatgctatcatctgcaaacaaaaggtgagaaatagaaggggctttcctagcgatggcaagacccctaagaaggcctcgatgttgataatttctaagaatagcatagaggccctcagaacatagaatgaacaagtaaggtgacaagggatccccttgacgtaaacccctagtaggcttgataagctcactaacaacaccattgacagaaaaagaaat

SEQ ID NO: 148212 - DNA, 637 bp, Cannabis sativa
  modified_base (563)..(581): a, c, t, g, unknown or other
aaatattctaaattggaaatatttgaaaaaaggaaatatttaaaaatggaaatatttcaaattggaaaaatctaaaattggaaaaatcggatttttgggaaacaatcccataaaaaagttggatttttgggtaaaaacccacaaaaatcgcaatttggtgtggctgcccaggaagggctgcacgtgcagccccaggaggctgcacgcaacctcaatacgggcgccgagaagagcacccagcagaggaaactcggcggatgcagggtgcatgagcgggaaaagtgggcggatgcagggtgctgagacgtgtcacgcgcgcggatggggggttgccagaccgagtgcctggttctcaagagcacccactcgacagccttgaatcccgattttccaaaattcgtatcttcttcgtttttcatcgaaatcgagttccgtaaaaaaacaaaatttcttaattttttacaaggaatctaaataaaatattttcaaaaatagaaaaaatatttttcatggaataaattttgtacagcacatacactcatcacataagcacataaaccaannnnnnnnnnnnnnnnnnnacacaaaacatataaaacatcgttttaattcatattacataaagtaaatcattacc

SEQ ID NO: 148213 - DNA, 545 bp, Cannabis sativa
gtttaattagattggattggatgatgcccacccctaagtaatgctatataaaatgaactatgctttggaggtggtcattcggaccgtagtacaaatattgtccaaaccattaaataatgaccattcagaaggctaccacttaagattgatgtttaagcatttttgagcattatgcaattaggtgatctttagacttttgcatttattagtatgggtggcaaaacgtatcatcgtgtcgtactcgtgtcatattttatgtgacccacttttatatttcgtgtcaagcgtgtcgacccattttttgactcgtgtctaattatctcaaccctaacccgacccgtaaaaaatcgtgtcgtattcgtatcgacccactgtgacccgttttactattattgaagctggaattgtagaaaagaataatagatttaagcactattagaaaacttatatatatttgtgtatatatagtttgttatatatatcataaaaattaaaaaaattaaaatatttttaatttcatgttaaaaaaaattacatttaaaatt

SEQ ID NO: 148214 - DNA, 553 bp, Cannabis sativa
  modified_base (506)..(510): a, c, t, g, unknown or other
atcaggtatgacctctcctgatgaattattagacaaggtctgcccgcctaccgctaggcccacaagtggaactcgtgaccggggattttgcagcttaccgtttgcagtctggaaagtattcattgttggatcttcgtccatctcgcccagggggatgacatttggaggttgctgacctacagtttggtaggcttttcgtatcagcacgttagcttgtcgactaagattttcaatctctgtatgatgagcccttaactcttccatctctttgtctctccactcggtaaacatacgcctttgttcctcgaacgcaagatttaccgcagcatggagttcttcttaatcatgatgtagggtattgggatgactttgcatgagtctaagagcggcagagagattttgtaactcagtatcatctccaatggtcgtatgagtgttggtaacgggtggagcggctgtgttatgaatgccctggttgggtgctgaactgttattcccagtctctnnnnnaccaggcgcgatttcatctataggagtcgttacaccatgaccc

SEQ ID NO: 148215 - DNA, 649 bp, Cannabis sativa
tattaacaaagtgttgtttttcaataataaattaaaaatatgtatatcaatccaccgacatatttggagaaagagaaaaagttactgcttttttatttggcatcataagttgcacatgcaatttactcaacatctaagcttattattattggcatttgaagataaaaaaaatgattataaaaaataaataaaaaaagaaaaagaaaattgtatttgccacattctaattgtgagaagaaagcatgtgctatagtatttagagtaatttattaattttcggttggaaataaatatttaatttaatttttgagagtaataatatttaaattatatttttagaactatatatgtacctaaccaataaatgttaagtcattatttgtcattttcttattggtatatttaagttattttttttttaaaaaaaaaaatttaatgacatggaccaattaagaattgtcacaagttaatttacgtaacttaatacccaagtacttacaaaatttctaaaattataacttaagaattattactgccaaaaattaaacttatgcatttatttataactggaagttaaacttaagtatttataccgcaaattattttattatttataatatgatcatgtttatgttatattatttataat

SEQ ID NO: 148216 - DNA, 515 bp, Cannabis sativa
gaaatctcagcagtaaattaagctgaggaaatcaattaaccaaatctctaaaaattaacttggtatcagagccaagatgtcaaccaatagtcaggcgcaatctaatgcaggaaatcctgctgtcactgttgctgcttcacaaatacaggcgcaggacccagtaaccctcagcttcatgtcccacaccatttcagcaccttgaaccagccattctctttgaagctcgacatgaacaactacagcttgtggaagacaatggtctccactatagtaagaggtcatcgcctcgacggtttcttgaatggtactaatatttgtccctctgaatttgtttctacaggttccactgaagaagggtctgaaactgtcacaacactcaatcctgagtttgagaactggattgtcaatgaccagttactcatgggctggttatatagttccatgaccgaaactatagcaaccgaagtgatgggatcaacaagtgcagcaggactgtggcatgcactggagcagct

SEQ ID NO: 148217 - DNA, 1233 bp, Cannabis sativa
  modified_base (1197)..(1207): a, c, t, g, unknown or other
aaactcaaatttaccaaataaagtacatgttcatacttaccaaaagaaaaataaatgacaaagtttttagcccataagacaagtcacatgaattttttatgtttttttttaaatatcattttttttttttgaaataaaaatacaagaaattaaaatattttatacaaaaatcaagttattctaatgcaaacatcttttcaagtttcataaaaaggataaataaccatgatatgctttcaaagatgataagaatttagtgtctcaaatacaaatcatacttactagatgttgagaaaaaatagacaagttacatacttgatgttgtcagacattagtgtgtgcagtgaaaataggatcattgtccttgtcaagattttattttttgcctttttcaatttgatcccacaactggatgttgtcacaccatattgaaggtagcacttttctatggtagcgcatcctcttcataactcttaattacaaagttctagcttactcaaaagatggctttcacaactcagtatgggtagctctattccagtaaggggcctgacaagaaactgaaacaaaaatcgctcaactctatacattaatactttagcttatcctgatcacacatatacaagtaacttgaatctttcaatccaacctcaaaattatgaagagtataagacactaagctaattattatctaaaagtataaacatgttctgtcaaccaagaatgaaagaatgacaaatgcaagataagaactactcaaaattttgtacaaaatggagaaccaaatgaaaataattaaatagtgcaaacccctaaagattttttgagggagtcaaactgacttgaatctagggctttagtaaaaatatcagccaattacttttcagtatcaatgttttgttgtcaacaagttccttaataaactaataccttatatcaatgtattttgtacgagaatgttgaacatgatttttggaaatatgtatagcactagtattatcacatgcaatatgagaagtaaaattagaaagacatttagattcatttttcttaacccaaatctttttgaattttgatcttttttttctagagaaagattttggaagggggctatttgtttttctttaacaacacggtgattacgaaaccttaggactaattttttagaaagcgaatgtttctgtaaagaccgcttannnnnnnnnnnaaattagcagttaatcatgattaatt

SEQ ID NO: 148218 - DNA, 507 bp, Cannabis sativa
taatagacaaagtgtagagatttttaaaatagacctcaattaacttataaatttatcacataaatattaaaatttagaacttttattattttattaatatatttagttttactattgttttcttatacttttaataaaaatactaaattttatatcaaattttgtaattatgcatttaatgtaatattaaaaattaatgtaaatatatcacaatgtattttttgtgttaaatatttacaaactcacagtcttatcttaaaaaataaaaaataactaaaaattcaataaatatataaaattatcttttttttaaaaaaaaaataaactaaaaaaatattatgttagcttaagcaaatttaaatttttagaaagaaaaaaaaaatcaaacttattctcatgatatttaattttactaaaattaaatttctaatatacttattaatatctatctaaatgggttttttaataaaaaataattaattttttaaattatttaattagttttaa

SEQ ID NO: 148219 - DNA, 623 bp, Cannabis sativa
  modified_base (322)..(337): a, c, t, g, unknown or other
acacccaagtgtgcccaaactagaatttatgggcctgcgcgagcgttttcaccttagagacctcaattcaacaaagaaaccatcaaagacttgactcatttaggcataaaaaggcttgagcttgaacataaagtcaaaattacacaagtatgccatgcaaaagggcatatgcgaccactgccacatgaagatggcatcgctctccttccttttggggagcactgccacaagaggatagcagcgtattatcaagatctgagcctagatgtccttctctcctttggatttggttactactgtcttccgcactatgattgagtannnnnnnnnnnnnnnntgggcatggcactctatcactaagggtcgactatgaagaacaatgaaggaggcttgaaaattgtgtagaaggtgtctctcatctactagctgtcagagaatgaaaactagatttggtaggttgaaaagcattgagttggataagatgagagcatcatgttccttttatagtatttcaactaggattcaggtttgaattatatgaataaaaaaagaataaaatattgggcaaaattacacactaaggccggccacttagtgggccactctctagttacaattttgcc

SEQ ID NO: 148220 - DNA, 515 bp, Cannabis sativa
acttctaactagtatatatatatgcatttttcaaaaaaaaaaaaaaatcatcaagaattacatttcccatttggacttattaattatgatgttatatacatatataaggggttttttacattatatattaaaatttttaattttttcttttttattgtggggtttaaaaatactgtgttttttttttcttagataaaatactgggtaagtttcatactgtgtactgtgttaagtttccattgttgttctacggttgttttttagttgttctattgttgtgttcttaattgttctgtttcggtggttttaagtatttataaaaagatagcatttttgtaaaaaaattcgtgtaacagtaaaattataaacttttatctaaaatcactatttttttttttataaaaactcctatataaaggacacaaatgacaacttgagatctaattcttacattatgattataatttaataatttattgattaaacatgttttgcatcccattgaattaatcgtg

SEQ ID NO: 148221 - DNA, 538 bp, Cannabis sativa
gggttattaattctggatctactagccatgttcatttttcttcttatttcatctccagctgcttaaacttggattgctatcctagcgagttgagtcggatgtttggacagaagggtggagattgtccaagtgaagatgaagttggaatcttctttttaatttttggattaatttttttagtttatgaacaatttactttcaattattagtttgggattttattccctatttcatatttatgcaaacaattcattatgacatttttgagattattaataaaattttctctttaagagatttttattatgaatttcttttataaaattgagcttcgtattctttaacttgtatgccaataccagttatatttatatgtttatcatgtttgtatgtgttttgtgttttattatataaaatctatggtatgttattctctaaaaagagataataccacataacacttagaatttaaattcagtatttatgaattattattaattcttaagcaattattaagattttgtttaataaaaagatc

SEQ ID NO: 148222 - DNA, 611 bp, Cannabis sativa
aatccagtgcgtcttcttgaaattacaaagggcacaagccaccctatcattacttgtgtgacgcccataaaattcaagattttactgatcacagttagccacttctcaactttcatgacatcgggacctcctagaaaaattagaggttcctgcttacggaaactttcatacaggggttccatccggttcatagaaactacagtttcggcctgcacaacaggggcaggggctattggtatttgtggagcaagaactgcaggagcaccctgctgtctcaaccgttgaatctcttcatcttgctcattgatcttggcttgcatcgctgcaaacctattttcccaatcttgggtagcttgggcagcctgtggcaggttagcatcaccacgaacctctaccacaaccgcaaatatttaggggaatctaagctccctgaccaccactggatccaaccgaattgtcctagctcctggtgtttcgcctagcgttcatactaattagaacagcatgcgtaacgaagagctagtctggtcagatcgtgatccaaggataaacttactaatgccgcttatttggaaattaaaaaaaaaaaacatgagcctattctactatca

SEQ ID NO: 148223 - DNA, 602 bp, Cannabis sativa
  modified_base (159)..(159): a, c, t, g, unknown or other
aggaagttttgctaagtccattgaatacacttattttcaaaatttccttcttgtccttgtaatagaaaacttctggttactccatatgaacgattttaaccatggttctcttgactttgattcttagttccttattctaactatccattacttgtttanactaacaatggattttaatcacaagtgccttccaaatcataaagggtggattccttaaaatcctccaattacgataaggtatcgtaaacactaattgtattatcctcatcggctgtatcaagacaacagaggtagtgggaccatcttatattgaataagatgatagaacacttttggaatcaagattatctcctctactttgctactttattttcagatttcgtcatattcttagaaaagtagtatttattgaaacaaacactttcttatcttaatgaccacaagatgttccacccttaatcacttagaatagctatcaaacttacacaccttagttaatagttctatcttttcttaaggtcacgatcaagacatccatgaatctagtaatagtttacactaagtacacaatcattctgtcattcttaaattttcctatcact

SEQ ID NO: 148224 - DNA, 721 bp, Cannabis sativa
tcatactactcctttatatatatactagggaacgataccgcgcctcgcgcggttgtttaatatctttttattatgttgtaaaaagtaaaatttatatttaatatatttaaagtaaaaagattagttaattaatatattaatattctataaaaaaaataataaaaattatgattttaatctgttaaaatatcatgttataaaaaatattaaaatattaaatcacattatctaattgaattattactatattattgtaagtttgttatctttatatatatatattaattacatgtataattctgtgttaaaatatatgaaatattaaatttttttaaaacaaaattacttttaaactaaatcaactgcaaaatataaataatctaaagttaacaaattttagaaagccaactcatcatctttagtttgcatgagtattgaaaaataaaatacaaaatttaataagtaaaatagagggaataagcataacctattattattattattattattatattttatttataagatgctaagtttaatatgtttcaaaattaatgtgaaccattcaaatattttggtaaaatttgtcaaactaaccatttcaaatactaaaatttgcaaaatagtcgcacactgtaattcatgattgtttttgcgaccataaaaagttattatgctaataaaaaaaatttacaaagttattttgttaataaaaattttc

SEQ ID NO: 148225 - DNA, 530 bp, Cannabis sativa
agtgttttaggaactaatttcttctttgtttttaattgtaatcggtttgagttattgcgtgttatttgtttgtatgcattatgttatataaccggttctattttagttaaatccggtttgaattatttcatgttatttgtttttattcattataacactattataaaactagttctattctaattataaatgttttgagttattttatattatttatatttatttattatattacagaaccggttatattttaattataaccagtttgagttattagttttattcatagaaccggttatatttttagttatatctgagacatttacttctggtgacttttccagtgactttgctagtgactgtgacttttctggcgacggtgactttttcggcgacggtggcttttccggcgacgatggctttttcggtgtcggtgacttttctggcagaacttattgttattttacaaatatgggatttccattttttttacaaaaatatggcataaaaaaaggctaattaggatattt

SEQ ID NO: 148226 - DNA, 1158 bp, Cannabis sativa
catccaaggcataaccctggcaagtcaaaagattcctctataccctcgatcgacctaagacatgtcttgtcgacctcggagagaagagtggttccagctcgccattgggatcactacaatcaagtttatgtcgagacatctccagattcaacaattaaagacatgtttaatacactatatttttgacccaataaaagcgagaaaatcacatatatatgattttcaaaatcatacaccgcatttacattttgtgatatgtaatcaaatcccatgattttagagatgatgactgcaatcatattttggtcagctttgtaattaactgctactatgcattataaatagtggaaacaatctcaaaaaaaggacaaaaaaactcttatgcaagaggccctaaaataatactcagaaatcttaataagattgactcgtggactatgcagaagtttaactgcaaaatcatgtaaaaaaccttgtgttcttatattatttttctatagcttttattttttctatgttgaattatcatcgtgaggcttaaatttagttaacaaaaatctacgttaacagtttggtgctttcattgagagcctctatgaaaaagctcagaaaaaaaccttcccttcttttaaagaaaaaccttctcctttatggctgaaaatccagagaatattaacaccacacatgaggaaactaaccatcgtttttgaaaagagcccatgacctcccagaagaactcaacccgacgttggtcctagtacgcaaacaacgcgctcgaggagaactcatcgtgggaatggtcagaatcccaggacgagggatgaagagctcaaccgttgaggtgcccaatctgtcggagaaagaacttatgaaatggaaagtcgccgcctgagatgcgatctagaagaggagcaacatcgaaacactgagttagaatgagaggcagccttagccagggcggcgcaggggacgaacgctcaaattcaacctgaacctagagtgagaagaccacgaggaagaactcgtggctcacgaaccaggagacatgaaaagactcgggaataacaacccagggaaaatgagacaccccttgagaatcaggatgaacgagaaatccctcatcaaaatgaggaggatcttggaacttagccgggagaa

SEQ ID NO: 148227 - DNA, 629 bp, Cannabis sativa
actgacgaaaatagaaaaaaattacagttttacaaacattgggtacttatgccactaaaaaaaattaatgggtttatgccacttacaaattcaaaactttgggtacttatgccgctatttaccatttagtttaaatgctgagatgtctttgtaaattatcaattttaccctataagctttgacaactatcgaattgtaccccctcaaaataaaaatgagaaagattcaacatttttgttagtaaatcttaaaatattaatttagatcttaaaaaaaatcatttagaataattaagaaaattaaaaaagaaattaaaattttaaaactacttaagcgatctaaaaattatttattttttattaaaaacttcatttagatattaaaaattcattttttgtaaaaactaaattttacgggaacaaacttgaatctattttgtttttctcaagaaaaacagatttatttaagtaaacataacattttttagtttaatttctaactttttttctcaaaataattttatgtttttattgtatttttaaatatttttctttatttgttaagatatgagtttataaatatatataagtttaatttttctttaaaaaaatctcagcttgtttaaatta

SEQ ID NO: 148228 - DNA, 733 bp, Cannabis sativa
  modified_base (483)..(484): a, c, t, g, unknown or other
ggtgaggtgtaaagtcctttttgacaatttagatgctaaaatagtttttattttatggtgagatttctttgcattcataaccgattttctcacctttattattcgatttttattgctcttttctatcttaggaaagaataattttcagctggacttttttttttatggaaacttcttgtaagagaataaattttcctatagaaagttaattttttaaaggaaactttgattattattatttcctttaataaatttgattgtgtcttgataagatcagattatacacactgtttatggcaggtatcaagacccaatacaagatcagactcgttttcggtaagtttccttttctggtctgatttgctgcgacaaaatctggttttgatgctgaaatcaagtttttcttaggaaatttttgtacagctgtggattcgactttgtggctatctctagggtttttatgttctataaatagaacctagnnagcagccattcgaatcagctcttctagatttcattttttgcatttttctcattttgtgaagagagagttattttggtgagaacctagttgttcatctaggttctagtatttttcacatatgttcttattctgttttagggttagttagaacaacttaattgaacaagagagaggtcttcaggagaaaacttgttcaagccttacttcgaaaggaagtaagaacgcacacttcaatgacgaagggagttc

SEQ ID NO: 148229 - DNA, 529 bp, Cannabis sativa
aagtaatatttcattaattttttattatcatatatattttttttattttaatagtttgtaccttgaaatactaaacatatggaccacttagaaaattaaatatgatttaaattgtaaaataaccataaaatgaaggattttcaaataatatttcattaattttttattatcatatatatttttctcattttaatattttgtactttgagatactatacatatgggccaccaagaaaattaaatatgtgtaaaataatttaagttgtaaaattaccacaaaatgaagaaataaaggatcaaacccatcaccacaacattatccaccaccacttaccattgggctattttcaaaaatataagaaaaattattaaggttatgataaatatagcataaaaaagtaattgccacggcattatctaatcaatcaaattaaaaatatggtttttttttttttttttataaaaataaccatataaaacattaaaaaaaatatgaattaaaaattcataaaaaataaaaacttaatta

SEQ ID NO: 148230 - DNA, 1148 bp, Cannabis sativa
aaacactaaaccgaaaaccctaaatcttaaaccctaaccttgacacgggtacaaacaaatgcccataacgagattggatcccaggccccaaacccagacccggatacggacccgaacctagacctagacataggacctaaactcggaccggaacccacaccagaacctcgtctgggacctagaatttgcttagaactcagataacgatccagactcgaactcgaaaagggactaggactcagaccaggacctggaaccagactacaacctgaacccatactgtgacctagacttggaccctaactcgggatcccaaccccaacctaaacttggacctagaccgggacctaggatccgaacatagaagggggacctaggccccaaactcgatcctggaaccaaacttggactaaggatccagacctagatgggggactttaaccccaaaaatatgccccaaaagtgggaccgagatccaaaactcgaccccagactcgagacacgggacacaaccttggacccgaaacgcaagacctaagtagcgggacacaaccccaaacctggacctaaatacattcatatgacgtggcccaagaccttggacctaaactggaataagaccgagatccaaatctagacttgaggtttcggcctaacccgtagtaagtttgtgaatccaagacccggacccggacctggacccagactgtgatccaaacacgatctcggacccggaataggaatcagactaggtctaggactagaacccagacctgggaagtagcaggacccaaacctaaacccaaactcatactagaacccataccgagactaggagttggatcgggacctgtgacgttggacctaaacaatgaccgggacacgaagcgagactcagacccagacccaaaaactagggctggacgcaggacctaagaaccagcctcggacttcggatctgaaactcggacccacactaggagtgggacccaaacgcaaactgggacctgaactcagatagggactcaagaccataacccgaaccgaaacacaaacttggacctggatcgggacctaggacctggacatagatgggggacccaaaccccgaaattgggaccccaaactaggaccaaaacttgggcctc

SEQ ID NO: 148231 - DNA, 659 bp, Cannabis sativa
accgattataactaaaatagaactaattatataatataatgaatacaaataagtaacacgtaataactcaagccgattacaattaaaaaataaagtaaaaatcagttcctagaaataaaaatgattataattttttttttaaaaaaaaatgaagatcaattctaaaaaatattgaggcataaaaataaaaagaattggtttcataacaaaataaataaacacaataataacacacaataactcaaatataatataaagaaacatgttatatttatcaactagttaaaaaatttaagataaaaaaaattgatttagtaaaacaactaagataaaaactcacacacaaaaactagttaaataaaataactcaaacaaaaatatttattcaacatgctccaacccattaaatagttatcctcataccatatctaccataaaaatactcatttattatgttatataaccggtttgagttattttgtgttatttgtttttatttattataaaattattatagaaccagttccattttccggcgacactaactttttcggcgtcggtgactttttcaaaaaaaattattattattattttacaaatatgagattttcatctttttttttttttttttttttttaaaaaaatatggcataaaaaaa

SEQ ID NO: 148232 - DNA, 1905 bp, Cannabis sativa
agccctggttcccggatcccaggataagatctgaatccctatcacgggtcacagtctggtttcggttcatgttcaggtctcgatctaggtcttagtctaggtctgagatcgagaattgcatccaattcttggtctcgatcccaattttgggtctcaagtactgttccatgttcgggtctaagtttaggtcttggttctggacccgcatcgcggttcgggtttggaacccaatcctagggtgggtttgtgtctgagtgtgggtcctggtccggttatagtttaaggtatgggtccaggtcttggtcttgttcctaagtcctgatccgcttctttttttggttctagtttcaagtcacatggtatgggttcaggtagagtttgggttcgagtctgggttcgggtcctgatttttgtctagggtgaggttcaggtctaggtttcggtctcagttagggttcgcggttgggtctggtgccgggtttaggtccgagtccaggtctcggtcctattccaagatcccattccgactccagttcaagttttattttggttcccgagtgtgggtctcggtttggggtcaggtcatggatctcgatccaagttctgaggccacagttctggtccaagtttgtgggccgaattcccaggtctaggtccccaatctatgttcaagtcctaggtcctggtccgggtccatgttcgtcttctggttcaggttcgggtctcgagtcccgatctgagtccaggtcccagtttttgttatggtcccagtttgggtcacagtcctagtgcgaggctgaggttcgggtcctcggtctgagtctggttcttaggtcctaggtccggccccagtttttgggtttgggtctaggtctaggttcgggtcccggtctgggtcaaggtctcggtcttggtttacgtcctaagtcataggtcccggtctaggtccaagtcccggtatgggttctagtctgactttgggtttaggtttttgtcctgttactgtcccaggtctgggttctagcgccgggtcctaagtttgggtttgggtccgtgtttggggttgtgtcccagtagtcaggtcttgggttccgggtccaggtttgggtcttagtccctattccaaggcccagttttgggtccaagtctcctatctaggtatgaatccttggtccaggtctgggtctaggtttgggtttagggcccaggtcccccatctaggtctggatcctaggtctcggtgtaggtccaggttaaggttcgggtttggatcccgagtttgggtctgagtctaggtcccagtacgggttcaggtttgagtttgggttcgggtcgcggtctgagtccaggtccctattctggtccgggtcggtgtcccgatccgggtcccagtcaaggtctaggtctcgaaccaggttttggtctgtgtttggatccgggttcaggtcatgagtctgggtctaggttcgggtctagattcaggtttgggtctgggtcctgggttccgatctcggtatgggtatgggtgtatgcccatgtccaggttagggttttgggtttatggtttgggtttagtgtttagggatttaatgtttagggtttagggcttaaggtttaggggtaagtgaatagagtttaggatttagggtttaaggtttagggtttatggtttaagggtctgcttctagttccagttctcattttgggtcatagggtaagatttaaggttctggtgtgggtctaggtccgagtcctggtctgggtctaggttcgtcttttggtttaagtccgagtcttggtcccaaatcaagacaccaaccacatgtcgagtctagtttgagttctggtccgggtctgggtccgggtccatgtccaattcccagatttagacaccgactgtgggtc

SEQ ID NO: 148233 - DNA, 838 bp, Cannabis sativa
gagttgtagttagtcgttgtttcagctcttggaaacttttctcacagttatccgaccatataaaccgttggtttttcctagttaactcagataacggcattgcaatcttggaaaaaccttccacaaaacgccgataataacccgctaaaccgagaaaacttcgaacttcagtgactgttttaggtctaggccaattcttcactgcttcaatcttccctagatcaaccataatcctgtcttttccctagaaaactcacactttttgaacttcgcataaagtttatgatctgtgagtcgctgcagaaccattcagagatgctgtttgtgttctgtttctgactgagagtacacaaggatatcgtcgataaatacaattacaaaattattgagaaaatccttgaatactctattcatgagatccataaaggctgccggtgcatttgttaacccgaatgacgtaaccaggaactcataatgaccatacctggttcggaaggctgtcttcggaatatcctcttctcggattcttagctgatgatatccaaacctcaagtcaatcttagagaatactgtcttgccctgaagttgatcgaacagatcgtcaattctaggcaaaggatatttatttttaacggttaacttgttcagctcccgataatcaatacacatccgaagagtcccatcctttttctttacaaacagagccggagctcccacaggtgacacactaggtcgtgtgaaccctagatccaacatcccttggagttgtatcttcagttcttttaattcaacagctgccattcagtagggtgcttttgaaacaggctctgctccagga

SEQ ID NO: 148234 - DNA, 1139 bp, Cannabis sativa
  modified_base (140)..(144): a, c, t, g, unknown or other
actgctatggcgaggcagaattgacaactactcgaacataaaaagaaagagtttggtagattactaactacttaaacaggaagattatgagcaacggaaaaacccaaaagtgctgtacatttgatcaaaatatagttgtnnnnnttgtgaataaaaacgcaagcaaacacaatggtattaagtttgaatgaatatagtacaaggcatttaagataagaaaaatcccacgttgggttacaaacttgtctttacaaaaatgccactagaggcaaaccattaagtcatcttcctaaacaaaggatgggaggaggaagaccgactacacatagcttggagaaagaccggctacatgtagctcgagaaagaccgtatgcacgaagagagccttgatctctgcacagacctcattctcctcatcatcagaacatcccatttcctgaagtcgagatctatttcccagcctcaggaaacttctcgataccaaaaagaggctggcgtaaaggaactctagtgaaggccttgagttggctagattctctgatagaaactaccccaatatctctcctgtgtccatccaaaaccatgtcaaccttcttcggggactccttgtgaaccagaggaggacttctaagatcactcataagatcaatgtctattctcctgtgaagagacgaagaaaaaaaagggtcaatggagcaacaaaaaatatacaaaattaacgatatgtataaaccgactcaaaccaccattcacaaggggtgatactcaccttcaaagatcacttgtaaggatctcccatagcgggttgtaggattcccgtggtatggattggtcggaagctcctcaacccttgaatccattatttccggttccaattgaggcttagaattcttgagaacgaatggaaaattgttggtgcatcatggtattatgagtttgggagagtgaacttctgaacttgaaagggacattctagcaagaaagaaatgatccattctgaaaatggatctcaacaaaatgttagaggtttgtgaaaaatgacaagcttgagccgcctttttatacaccaagtctagtgacaagaaagccaaagattgggaaatctaacggctggacagaatatgaaaaggcgattcata

SEQ ID NO: 148235 - DNA, 538 bp, Cannabis sativa
ataatatattatatacatcatatgacatatatatgactgacacttgttgcaaactcacatatgctacgtgtcatgtgtataacctatatgagaattattaaaagacactcttgttgcctagcatcatcttcaacatcatactattattggtataattaagtatcgagtcctatataacttaagaaaataggttttagaaaatatcgctaaccaatcataagacgtcacttataaactaaacactactagtacctaataacaatgctataaactacaaaatagggtatgcattacctacatagtaggcatcgtagatgttaggtgggattaattgatgtggttctttataatggagtcgtcactagcccatttgattatcgtgtaatcgtcataaatcaggcttacgatgtctggcacgtcctcttatgcacgtccccagacgcttttcccatgttgcattaaatgtgaagtgactgttcaagtagatccctctcgtcccggaagtgccttcctatgtcttgactcccggaggagaaga

SEQ ID NO: 148236 - DNA, 578 bp, Cannabis sativa
agtgcagaaaaatataatttgagggggcaataaataaatttttaataaaaattacaaaaattacaaaattataactaaaaaaattaaaaagaaaaaatactcggagagggaaaaaaacccctccatatagatagctctgtcctgattgggtatcacgtcccatttcaggattatggccttggatgagaatagtgcgattgtttgttattttattggagaaatagtataaagggcggatttgttatgttactattgatataattaactatattgagctatattttaatttaatataattattataaaaaactgttaactatttacaagacactaccttttttattagctgtaaatttttaaatttagtagaacgtgtaattttgttgctcataatgtggctaagttggcgttcacccaccaattgtacggttccattttgatttcctcagtatcggaggaactattttgtattgaccaagaggtctaactggtgtttgatccgtttccgtcattaatgcatgaatacgcttaatttttttttttttaaaaaaaaccatttacattaacgtgacggctaa

SEQ ID NO: 148237 - DNA, 866 bp, Cannabis sativa
gaggttctggccaggctgcatctcacaagaatcgacatttgccttcggagatttcttgcaagaaacgcctatagtgactagcattctcttcctggtgagttttcactacgtgttccctaaccctagcatcgtttaactctaatttggaggtgggttttgaagggttgggtctataagggatggctaattctgtagggaactcaaattttaaatcttctggacgataaactcctgaaccatagtgggacatttctgtaagcagaaagcattcccaatccctcgaagaattttatcagacccgaagatggtgagttagagattctgaaataacctatgtattgcctgaaccctagtatggactgaaatacagttttaccctaaaaactaccaaaactagatgagatgactacgatacaaacaaatttaagcagcaaataaacacaatgtaataacaagcatgtaaaggaagaaagcaacttactgtttgaagttagggctttgggcaatgacttgttgcttcgtctacaaatcttcgaatgtagtaaggatcgctttgagaagatgaagtcagaggaaactaatataaaaaatgtcaagaaccgggatggcatgcaagtcctcaggaaaatttgatggtgattcttagtgaaaaagcttaaggatttttcaggctttctacaatggaggaaataatgcaaaggtggttcctttttccttactttatactcacgatattggcttcgtcagatcagagaaaggtttaatcctatagatataattcaaagcgaaagtggaaaagatggtcatttaatactgatgtaccttgaaaccgcacaactgccaaaatcagaggacatgcgtctttt

SEQ ID NO: 148238 - DNA, 1328 bp, Cannabis sativa
  modified_base (368)..(388): a, c, t, g, unknown or other
  modified_base (835)..(835): a, c, t, g, unknown or other
ttaggatgttaatgaaatatacatggtagtaaatctagatccgggtaaaatatttccaacaggataagtgttaagcaagttttgaggagctaaaacaaaggttaatcacaggtccagtgttagcgctacattctaacaaggagaggttcgtggttcattgtgacgcatccagacagggtctggggtgtgtactgatgtaggctgatctggttattgcctatgcctcttgtcagttgaaagattatgaacaacggtacccgactcatgacctagaacttgccgcggtagtgtttgctttgaagatttggcggcattatctctatggagagagatgtaaaatttatactgaccataaaagtctcaaatannnnnnnnnnnnnnnnnnnnngaatatgaggcagaggcgttggttagagttagttaagcattacgattgtgagatcctttaccatcctgggaaagccaatgtagtggctgatgccctgagtagaaagggtcccgggcaggtagctagtatggttcaaatttcacctcagttagcagaagatatggtcagatcaagcatcgagtttgttgtaggaaaacttcatacttgaccctgcagtctgatctattctaacgtattaaagctgctcagctaactgatccagagttagtaaagatcagagaagaggtttcagttggtcaggccaaagattttatagtgtcagatagtggaatgctgttgttcaagaaaagggtttgtgttccttgaagtgcggaacttagaaatgaaattctcgaagaggctcataccactccatatcccctgcatcctggcaccaccaagatgtancaagatcttaaaccctacttctgctggagtggaatgaagaagaatgtggtacaattcgtatggagatgcctaacctgtcagcagatcaaggctgaacatcagagatcagcaaggttgttgcagcctttaaccttacctgagtgaaagtgggaagatatcacaatggactttgtggttgggttacctaaaaccataggtttgtttgattctatttgggtagtggtggaccgatttacgaaatatgctcattttctacctgttaaaacaacctttttagtggatcagtatgcggatttgtatgttaaagagatagtgaggctgcatggtgtgccaaaatccatagtttcagatagagatctgaagtttacttcaaagttttggcagagtgtacaacatcctatgggtacaaaactaaaattcagtacggctttccatcctcataccgatggggtaacgccctaaataattaggcacgctacccaaaatgcttatg

SEQ ID NO: 148239 - DNA, 501 bp, Cannabis sativa
  modified_base (27)..(29): a, c, t, g, unknown or other
tttaaaaaaaaataatattaataattnnnaattttattaatttttattttgaattattattatttttttaaaagttactttgaattattttatattggtatttatatttaaaaaagaattgttttttctaaacttattttttttggcttctcattttttggcttttcataatttactgttggttttttttttttttttaatgtttacacctagttttttctttttgtttttcttttagggtgtgcgtaattctagtgttattgactattttttttagtagtttttatcttgttgttgtctgactgctcttttgagatgccacttataaaaaaaaattaattaatttggttagatattattttttctgccaaaaaaactgagtttaggagaagcaggttggtatggacccaattaaagagcatctaaaatcattcaagcgatcctacatcagagaaacttttgaaaataaataactatataaaaaataatttaaattaattt

SEQ ID NO: 148240 - DNA, 628 bp, Cannabis sativa
  modified_base (424)..(436): a, c, t, g, unknown or other
agtaagaacatatatgaaaaacactagaacctagatgaacaactaggttctcacaaaaggaactctcttctcacaaataagaaaaatgcaaaaaatgaaaattggaagagataatccaaatggctgatctctaggttctgtttatagaacatagaaaccctagagacagccacaaagtcgaatctacagctgtacaaaactttcttaagaaaaacttgatttgcagcatcagaaagagattctgacgcagcaaatcagaccagaacaaggaaacttgccaaaaacgagtctgatcttgtattgggtcttgaaacctgccataaacattgtatatgatttgatatattcaagacacaatcgaactttattaaggaaaaagataatagtcaaagtttcctttaaaaacaaactttccataagagannnnnnnnnnnnncaagaagtttccatacaagaaaaggttcagctgaaaaataatctttcctaagatagaaaagagtaataaaactgaaaaattaaaggtgataaaatcagattggaaacacaaagaaatctcaccataaataaaaatattttggcatctaaattgctaaaaaaggactttacaatctccccctttgtcacttta

SEQ ID NO: 148241 - DNA, 532 bp, Cannabis sativa
ggcgagctcgaagaggacgtacccgcacaattttaggggaacctctataaattttggtgtgttctctccattttattttctgcatttactgttgtgttcatactatttttctgcttggttttctcttggtatagaatcggtttagagagagggttgctgggtttattttctgggcagtgagttaatttttctgggttgtattgatggtgttcttcatgttcttcaaagaagaacagtgaagaaagagaggcctggggtttatttttctggttgtgtttctgtgttcttcagagaagaacgaaggagacggctgggtttaatttttgttgctgggatatatgtttgaagaaagagatgcatatatatgactaggttaaatgttagggtttctagcttgatataaaacgacctgcagtacaattaaaatagggttgtcgttgggttgatgagcaggggtcaaaaaggagggctttgactgggtaaaggtcacttttgaccttgcttttgattattatttttgctgtgtgtaggg

SEQ ID NO: 148242 - DNA, 510 bp, Cannabis sativa
  modified_base (385)..(391): a, c, t, g, unknown or other
agcatgaagcttctaacaaagctgcttcttcaaatacaattattaaacataatcttctatgttcaaattgtaatgaaaaggaacatcaaaaagaacgacgtccccagcttctaaacaattcaaacgaaggtaatgcttttgtgtttgaatcatgtgttttagagaatgacaaatccatatggattgttgattttggatctactaaccatgtttgttcttcattgcagctgcttgaaacttgggagaatctgcacccagaagagttgaagcataaagttggaaatggcgagttagtatcggtcaaagcaagaggaaatgcccgcctcaagtttcaaaagagatttttactagaaaatgttgtatttattccaaactttagtagaannnnnnntagtgtttcatgtttacaaacacagttttatatattgaattttttgagttcttattgttcaatttcttgtaatgcatttcagttatgtgttgctcacatggaacaagggcttcatgttt

SEQ ID NO: 148243 - DNA, 706 bp, Cannabis sativa
  modified_base (580)..(581): a, c, t, g, unknown or other
  modified_base (664)..(666): a, c, t, g, unknown or other
tatacaataacaacaatagacactcatttactaaaaaaaaaaagaatgaaataacttcaagaaaaaaaaaaggcacttcacatacaaaaagataatatgacaacttatatgaattattcttcatttttttcctcaattttaaatttttattaattattttgttatttcagaataatgtagtatttaattaaagttagtgtcttttcattctcataactcacaaatagtagtgttacataaatttatatatatatatataaataaattatggctttgaatgtagtcataagagttaccaatagtaataatacattataatatttaaattctaacagttacatattaataataatatataataattattatttatattttgcaacgtataatttcaatataatagaaattaaatattttagactaaatgatcatttttaattttataactttatcaagttctttctaatcaaatagtaataatatcctgatttatctttttcgtgtacattataattaatatattgttgtaaatatttttaattttatatttttaattagtatttgttgaccgaggttttcnncaaccaataaaataataataatttagagagttgtaagaaataatagggaggttttttgcgtggttggggcgttaatgagcctnnntccacgagtctgtgtatttatgatagtatttaatacagag

SEQ ID NO: 148244 - DNA, 785 bp, Cannabis sativa
tttttttttttttttttatagatgatatctctattatattatttgttggcgtttagttaaaatgaatgaatgggaattgaaataggaatgaagtggaataaaatttaaaatgaataaaagtaattgataaaaaaaaattattaatttttttaaaatattgcattggaatggtctttaatttcattttaaaatgaaatagtcattccaccaaaatggtagaaagatcattctattggaataatatttcaatattttaaaatgccaccaaactaaggaatggaataagaattatttcatttccattctattctatttaattccctccaactaaacattaggttaatgtaaattatgtgctaaacttaagtaaaatgtgagaatatattaagcaatacactcacaaaataagtacattttaataaaaaaaaatatgatataagtgtatttttaattaatggatacaaaatactcttattttatattttatttacaattttacagtctaaaatttttaattacaaaaatacgtttataaaatttttaaattacaaaaatacattttacttagaaaaaataaaatacaactatacaacaactgaacaactataaatcaactataaataaattttaaaacaatcaaaagataatcttatgacaaatgtaatacaactataaataaattataaaacatttgaaaaataacttattatttttacttattataaattaaaaatttaaaaagtaaaaataaaaaattgtctgtgtagacctatttttgtaatttt

SEQ ID NO: 148245 - DNA, 734 bp, Cannabis sativa
aaaagtcgtgcagcttcttcttgggtaacacatctgagcaatggcatggagaatcctcgtctgtacataattccctctactatgatgtaccgtatagccttccttttcatctttcgagcttcatttcaattatctgggagtttcccattattgaggtaagtcgctattggcatcatccagattggggaagtatcaatcatttcaatctcttctgtgccagtgatgctaggttcttcgaggaactggataggaaccagatttgcgctatcacttacatcactacttgcaagtcgagctaacgcgtcagcagttgtgttttcttcccttggaatttgtctgagagtgttgctttttaactgtctagaagatcatgtattttgctcaaatatgctatcatcttttctccccaagcctcgtattctccaaatacgtggtttaccaccaactatgaatcactgaagatttcaacgtgtttggccttcatttcccgggctagttttagaccagcaatcaaagcttcatattcaacctcgttattggatgctttaaatccaaacttgattgcagcgtgcatgtgttgcccccaggtgtgacaagggcgattcctgcaccggatagttgatctgtagccaacctgtccacatgcagtttccaagtcgacttgtcttcactgttgcttggctggggtatttgtactggcttggggttgctttctgatatgctttcttccttgc

SEQ ID NO: 148246 - DNA, 861 bp, Cannabis sativa
tcatcaatagggttccatggtttcataaccataggtttcctatcaaagaacacatagccttgttgcagcaccctatctcgttgttccaagttttgaaacctgattatgaatatgcctttagcaagcagtcccaccttcaccaccatatccttccatagccttttagcaaagccttcgagaatagagattggaggattagccccaattacatagaaaaccagagaaggctgccaatagttcacctcatcctctatatcagcaaaaactgatcttaacttttgaagttgcagaagatcttacctcagtctgctgaacagagtttgcaaaactagtattcaagtttcgaacaataccagaacgcaaaatcgggggagaagtcttcttcccagaattgacatcttgagtagttcgattagcaacttgtaaccaatatgagaaatcatgtctgatctcgcttcgcctctggaaaagggctttagtctcctcaggcgagtatatcttttcagcaaaacactgttccattgattcaaagcattgttccattggtttctcgatctgttcatcttgtaattcctcctctgctatctctaattcctgtaccccaagcactgcatccatggatctggtcttaataaccctatccgaagatgtagtatatgttgttgtaacatttatttaatctttttattattattgttagtacatatattttggtgaatggtatatgtattttatgttatacaatatatcattttttaaaaaaaataatatttaagttctattttatactgtatttttgttgacatgatatataattttattagcatgctatatatttttaaatttattaattttaattat

SEQ ID NO: 148247 - DNA, 857 bp, Cannabis sativa
taataaaattaaaagaaaaaaaaaccctatacatttgcaaaatgggatcaaaattaaggtgactttttatcccacttttttttcaaaaaaagtgggataaaatatatcattttgtcccagttttttcataaaaggtgggacaaaagggtacattttatcccaattttttcatcaaaagtgggaaaaaaattactcttttatcccacttttctctaaaaaccgggataaaatagatactttttatccaagttttttaaataccttttatcccactggcatacattccgtttttcattttagcaaaaatcaggaaagaaaaccttaaaaatcgggataaaaggcctttccttgtagtagtgaatcattttatgttgcatggttcacatgattatatgtttaaatgtataaattctattaaatccaaaacatatagtttttcatgattatagtgttgtcaccaaagtggaatataatcatgattatatgtttcaaaatttatgtcccatgatttgtcagtacagtggatttacactgttaacgtagatttttgttaactatatttgagcctaaattgtgataaacttgcgcagaaattaaaagctcgtaaagaaaaagtaagaacacaaaggttttttatgtggttttacagttaaaattcagcatagtccacgagtcaatcttattagatttctgatacagttctatgattattttctcttatcattttttcatccctttttcagtgtagcctgtctcgatttataattacatagtcaggcagttaattacacagttgactgatatctttacaacaattatcccctgaaatcgttggatttgattacataccacgtaaa

SEQ ID NO: 148248 - DNA, 509 bp, Cannabis sativa
tggaaagcatgcacaaccaaatgtcttgaggatagagtaatcgggcttattgtgaaagagtgtttcaagaggagaggaccaattgagaatgcttgttggtaatcggttgatggtgaaaacagcacaactaatggcatgccaccaatagttcattcccaaaccagcttgtgccaataaagtaagaccgatttcattaatgtgtctatgtttcctctcagccctcccattttgttcatgagtgtggggacatggatgttgaaaatggatcccttgatcttcaagaaatcgtttaaaaggtcgatattcacctccccaatcagcttgtacagacttaatgggtagattaaattgtttttcaaccaatgctttccattttatgaacacctcaaaggcttgggatcgtaaagttaaaggaaagatccaagtgtacctgctatagtcatcaagaaagtgaacatagtacttataaccatcaatagaaagatcatgggaggggccccaaagatcag

SEQ ID NO: 148249 - DNA, 1326 bp, Cannabis sativa
attcattaaagataacataagcatgtaacaccgggattaaaagctgcccagtcagcctgttgtctgtaaaatgaaaaacaattccaagtttaaagaccacttggcctgtcatgatgtcttaaaaaaggacttatggtcgggtagatatataaaaaagaaagataaaaagagaagtatttagacagatggagtcccaggctcttggttcgggtcttctgggccggtaggagctggaggatctgtagtgtgagcggaaggcacatcaacgttctggccagaagtagaagtggtcgcctcgggttcaccataagccacttgggaagcacagtactcgagatacatgtctttggcctcacccaggtaatcaaaattcgattgagggttagccttccaaaagtcataaaaaatctcgagaccggctgtctctaaggcatgcactttctcttccagcctcgtcacctccgctcgctgttgttcagcctccgatttgtacttctcaacctcagttgtaagctcctcctccttagacttcttctcttcttccagccaacagaagacagtccgaagaactcccctttcctcttgaagacaattcacttctgctaacaaggtgccgatggtagcttcaagttggtcagaagcctcgagatccttagtcaacttggttattttcctatcggcaataaaaagcttcttgttgacttcacctagctccattcggacagctacgagttccaccctggcatcattagcatccttcctggccaagtccacttccgccctcatggtgttggacatggcagcgttcttggaggcagcagacttagctcgggaataggtgtaagccaacttcagtccagcctacgcagagaaaaaatattagagtctgagccaagtaaagaaggattaaaggaagatgtcaagaaagacttacccttgtaaattccctcaagactcctcccatcagcagccccagggaagattccttgtcaacgccggccagctgctcactcacttcaagaacaaaccggttcatgtagtgagtgagcatctccttgcctctcttggcttttggatgcactggcaaaggtggggtaggagcccgcatctgctcagatctgctctgggccagctcggatccgctgttcgactattcgggcctgtccgagcttcctcctcgagaatctttgcacttagcagctttcagagcagaagggtccgcgatagttagctccttagaaagatcaataacctccccggctggtgccttttccttggatggggtcgcctcaccgcccctaaatttcttggccagaggagatgagc

SEQ ID NO: 148250 - DNA, 592 bp, Cannabis sativa
  modified_base (529)..(555): a, c, t, g, unknown or other
taaattatgatagtattatttttgagccaaaataattagtggtgtaatcagaattcttaattttttttcatgaacatttttttaaaaaaattattgagtgagagaaatgtttaatcctttttagaaaaaaagaaaagcacaaaaaggaaaaaataaaaagacatctaatggtttctcaattaaataaataaaaaaatgtaaacatttaatgcacatgtttctaggtttttttattatcagacactaataattaaagataggtatttttggatgtggcacgttaaagattgttaattatttgtgtaaggttattattgtaaataattttctaattatgtatattagtgaaaaaatctcaaaaataaatggtaaagtccatgcatagttgtcggccatgggttggataatgggcccactttgcaattttaccattttgtcattttcccatcttattttctcaaaaacgctaattttctatttaaccacttaaatatcaactctaattttttaataactaaaattaattatnnnnnnnnnnnnnnnnnnnnnnnnnnnattaattagacttatcaaagtctattaattaacaaat

SEQ ID NO: 148251 - DNA, 506 bp, Cannabis sativa
tgtaaaaaagaagcaacaaattcaattaattggtaatctactctgataattccttttacaatctttcgattgataaagatgatttcaacgaggagcgaaaaatagttaatgatcattgatttaatagttgttattgcattttgtttacttaattttttattttttaaaagaaaagaaaaacaaaataacttgaactaatcttggattgacacactaatttggcacttaaaggtgttaaataataagattgagcgtaaaattacttctaaaaagaggccattcatactattttttattaattaaggttatgtatataataactttcaattataaggaattttgttgcaattatttcaattatttaagttaaaaaaaataattggtaaaatatctttccttattaaccaatttggtgactatttaatggttacatttttattgtaaccatcgtggttacatttttctttaacctgtaatagcaggttaccaagatgtaaacattcttt

SEQ ID NO: 148252 - DNA, 844 bp, Cannabis sativa
  modified_base (33)..(36): a, c, t, g, unknown or other
  modified_base (64)..(67): a, c, t, g, unknown or other
  modified_base (813)..(816): a, c, t, g, unknown or other
ttcttggcattataagtggatgtacaatttttnnnntataagtggatgtacaatttttgaaacnnnnattatttttcataaagaccgatttgtttaagtatcattcattaacttactggaggacaagcaaaagtcaagtgtgggggaatttgattagtccatatttgtcttataaatatagctaatttatttattaatattcttaaattgtttcgttaaattattgattagtgtgattttaattttttaataatattttttttttaaaaaaaaaaatcagaatactaaaaactaaatctgaataataaaataaaatgatagtccccgacaacagtgccaaaaatttgatgtatgtcgtaagccacaacaatttactaatttttttgattccaatacttccaattattttagtataatcataagttagggtcgatcccacgaggactatgtttattcaattattcacaaattagtaacaaaaattaaaaaaaaggggagttttgatgatcagaatagcaatgataaaaaagaaaaccaatttaaataaagaatacgatatgagaaactagttaaaggttattcgccaccctcaacaatcattcctaatttctattaaagaatgtaattttcagtttccaatcaaattattaatcctgcaaataacgctgaagcagtcaattatcctaatctccctattatatgtaatcaaggtgaagcgcccaataattaactttttacctgaagcagtaaatccatgaagcatccaatttattaaacttagataaagcattgagatttatggagatagactannnnaggcaacaaatcaatgaagcatataatt

SEQ ID NO: 148253 - DNA, 596 bp, Cannabis sativa
ttttgaaatttaaaggttctcgactaaacctctttgacgaaagtggagtcgaatcgttataactccctgaccaaacctttttgacgagaaaggggttgaatgctataacaccttaatcaaacctttttgacgaagaagggatcaaagaactataattttttatttatagcctatttgacgagagaggaaaattaaatgttataactcgcgtataagactgaatactaatggttctcgcgagctaggaaagtactaaacgaggcatcacgatgccttgataaaaagtacttaaacctagaaaatggatacataatatgactattcatacgagcaaattaaaaatatacaaagtgataaaatctttaaagtatatttaagtttgcttaaggcatattataactgtaattgcgaggcagaattgacaacagctcgaaaattgtaaagtttggtagattactaactacttaaacaagaagattacgagcaatggagaaacacaaaagtgctgtatatttgatcaaaatatagttgtttacattgtgaataaaaatgcaagcaaatacaattgtattaagtttgaataaaaacagtacaag

SEQ ID NO: 148254 - DNA, 689 bp, Cannabis sativa
  modified_base (27)..(30): a, c, t, g, unknown or other
actaatcagattgtaaagagttttatnnnnggcataaaacccaacagttatatccttgtgtaacattttagagctgtgcttgtaaattgtatacttgagcatgcttggcataggaatatgtttgaacaggtttaaggattgattgcataaaatttggaagagttttgtgcactttattagagttcttgttaacctgggatttttgcttaagttttgctacagcaaaacgcacagtttctgctaatcatagggggattcaatagttcaaacctttcacatttcacaagcttacaactcatttttattttcatcttccatccacttttgagttagtttgctcattttcttgttcatttagttgaatcattaatcatttcattttagttcttaggcattttgtttggtaattaacttttgcaataggaattttatttttcaagtccttgtggagacaatacttattacttatcattgtttgtgactacgtgcacttgcgtatatctaattttagcacttgcggaaatgtcctcaccatgacattcttcattgcatccaaatggaattattttaattaattaaattttacttgcgtatatcacctatcttgattttcctttgactaattaattaaatttctaataatatattttacttcatttattttagttaatcattaaatgaaaaaatca

SEQ ID NO: 148255 - DNA, 734 bp, Cannabis sativa
tagtcacattgtgaatcactgccatgagttccttgcaaagtgtgactcttcctcagcgcctcctctgcttcactatgaccaatctctaggagcagaaattcggataacctccaatcctttttatatcgcatgctcacgcacccgcctgcggcctcatatagctaaccctgcctctttggcaccatcatctccttaccgatttcaccaagcccctgttattactgaaggccctttcaacgaacctacttcagcctatggaatccaacatctcagccaaccacaaactacactaatgggattgcacgctaatctctcttcccctcacttcaatctcaatcactcaccccccactaccaccttttggccggctcaccaaactgttgctgctgctgcaaccatggcctcacgagcacaatcccctgctgtatcaccaaatatcactgctccatctcacctaccaacatttcctcccatcactactgctgaacaacttgcaacacctcttcttaggcccatttccaccactgccgaggcactagtggccaccaccggggtctctcaacatgtggtgcagatctcacaagctttttctaccatattatcggacctgaacccagctcagccacctcgcttcgctgtgggctcttctaccaaccccactccaagttccacaagggttaggaagttcaagcctcagcgtcccgattgcttgaatgctgctgaatttagaagaa

SEQ ID NO: 148256 - DNA, 845 bp, Cannabis sativa
  modified_base (462)..(470): a, c, t, g, unknown or other
  modified_base (817)..(818): a, c, t, g, unknown or other
gctgaagtggtataaaaattcaagcttaggcttcgtttaaaaagatcaaagggaaagcatcacgaggagtaggatagaatccaagccgtccttcaaagtttgggaaggagggttgaagacgtatcgtacccctagtgatctttcctacacaaaaagcaacgtccatgcgagaatcaagttgattttttatgtaacaagcttcggcttccaggaaggaaggctgaagttgtataaaaattcaagcttagactttacttgaaaagatcaaaaggaaagcatcataaggagtaggatagacttcaagcagtccttccaagtccatgaaggagggttgaagacgtatcgtaccccaagtgatctttcctgcacaaaaagcaacgtgcatgcgagagtcaagttgagtttttatgtaacaagcttcggcttctaggaaggaaggttgaagttgtataaaaattcaannnnnnnnnttgcttgaaaagatcaaaggaaaaacatcatgaggagtaggatagacttcaagaagtccttccaagtccgggaaggagggttgaagatgtatcgtacccccagtgatctttcctgcacgaaaagcaatgtgcatgcgagagtcaagttgaatttttatgtaacaagcttcagcttccgggaaggaaggttgttgtataaaaattcaagcttatacttagcttgaaaagatcaatcggtggaagagtcgctgggagtaaagaagacttcaagaaacctttcccgttcaggaaagacggttgaagacatgcgacactcccaatgatcttccacgcttggagaacaggtnngcgcgcgactttgaatttatatcactt

SEQ ID NO: 148257 - DNA, 600 bp, Cannabis sativa
  modified_base (65)..(72): a, c, t, g, unknown or other
cataacatccatggaggttatgacttatgaatttgaatttcaaatggtgatatcctaaacactannnnnnnnggtctaaggtgctcatattgaagagaagtttctatcaacaaaacattttgctataaatcctaaaaggcttgataattcccaaagttttggacaaaggtgtaatacattgttcaagtcgtggtgattcccactaatttacactcaaggttgtgagtgagtgtatatacatatattattatattacatatgttgcaatcttcttctacaaatatgtaaattttattttaatattataaactacttaaagttttttaaaaatttatatatagtcttaaataattataaagtgatgatcataaaaaaataaattaactaaaaaatatttcgtaatagattaagggtctatcgaaacacctatagaggggtattaattctaggctaattagtaatttttctcccataattttgacatgtactaaatcatgccccctcaactttttagccgttaaaagttcccctcaaactattgagattgttaaatttaaggacttttgtttaatttcattcaattttactatttcagtgatt

SEQ ID NO: 148258 - DNA, 1452 bp, Cannabis sativa
aagtctttttgtattaagagtatccacaagaaaataccgcccgcagaagaaatgaggattctacatactcctagaggatagagctatggaaaagcacctacgaaagataccagaccccatttgaacagtcacctcacatttaatgtcgcatgggagaagacgtattgaaactgctataagcattaagtctgacgccgtaacccctcttctgcagctattacgctatgattaataagcctagtgacaactactttatgagagatcacatcagtcaagaagggataaaggattacatctacctaacccctaatatacctagggtataggccatgcattgcccattttatatctgctgggaatgtgtgcccctactgagatacacagaaagacgagtagttcggttctagggatcaccccagaaaaatactataaatacccccaaacacattaagacgggggtcgaaacattctgggtttatgagaatcaaaaaagagaaaaactaccaaaaatattctctgtaataaatactctcataaatacaaaagacttgtggattaaggctcattaatgccccaaccacgtaaaaatctcatgcactattcctacagttttctcttatatattattaaattggttgccgaaaacctcggtcaacgttttggtgctttcattgagagctgaaggaagcatctgcaaatagacaacagtcttataagctaaaacaacaatggtggagactcgcaacacacgtcagccccatcctcctcaagacgcccaagatcctgaagatgaggaagtggcctcgagagtcaatgtgggctctgaggtaataggagagaccaacgacgacgaatacgaaggaaactttgacgagtacgacgcctatgacgaaggtagttatacagaactagtgctcttgagacaaaaggctgctgatcatgaagctgaaatcacagcccaaaaagagcaaaacaaaaggatgcaagaggtgatgctcgccatgcagaaagcaatggaggcagcagggatccacgtacaccctaacgccatccctgcaggacttggagaaactctggaagagtcctcaccaagcacccaaaagcataagtccagggagcctagccccatacggtatccttctgaagggaaccagcgaaaaaaacctacttccacccccgggaaaaagaaaaaggtgcaagatccgcgaaaggcccgctcagatttcccgaaagggaaaggttcacagaggggcaaactccaaaaagggagttttggccctcaggatcgagaggaccgaaaaagcgtttctgtgcaccaggaacccagagagagaggaaggaggaaccagaaataccctcctgtcgatctaagatatcagatcaacgaaaaacatggtgacctacgggatcacctggaccaaaagaaacatacaccgacggtctccacgggaa

SEQ ID NO: 148259 - DNA, 1239 bp, Cannabis sativa
tcaaaatccatgacacaggcttgtaacatatcttctagtatttggattgtcctttcaaactgtccatcagtttgaggatggaaagttgtacagaatttcattttggtagccatagcctgctgtaaaatttgccaaaatttagaagtaaacttcgaatctcatccgaaactatagactttggcacaccatgtaatcttactatctccttgacgtacaaatctgcatactgatccactataaaggttgttttagctggtaaaagatgcgcagactttgtgaatcgatctaccataacccaaattgaatcaaataaacttgtcgttctagataatccaaccacaaagtcaattgtgatatcttctcacttccactgaggaagtgtcaaaggctgtaacaaacttgtcgatctctgatgttttgacttgatctactgataggttaggcatcgcaatacaaattctaccacattcttcttcatcccgctccaccagaaaaagggtttaagatcttgatacatcttggtggtgccacgatgcaaggagtatggagtggtatgagcctcttcaagaatttcatttctaagtttcgcactatttggaacataaaccatggtcttaaataacagcatcccactatctgacaccgtcgaaactctggcttgatcgactgaaacctcttccctgatcttcactaattctggatcagttaattgagcatctttaattcgttctaacatatcaaattgcatggtcaagttatgaagtttgcctacaacaaactcaatgcttgatctgaccatgtcctctgctaactgaggtgaaatctgaatcataatagttacctgcctgggacccttcttgctcagggcattagccactaaattggccttcgtaggacagtaaaggatctcacagtcgtaatccttaaccaactctaatcaacgcctctatctcatattcaagtctttctaagtaaagaaatatttgaggctcttatggtcagtataaatttaacatctctctccgtagagataattccgccaaatctttaaagaaaacactaccgccgcaagttctagatcatgagttgggtatcactattcatattctttcaactgactagaggcataggcaataaccagatcagcctacatcagtacacaccccaaaccctgtctggatgcataacagtaaaccacaaacttctctttatcaaaaggtagggctaacactcgagctg

SEQ ID NO: 148260 - DNA, 584 bp, Cannabis sativa
  modified_base (519)..(531): a, c, t, g, unknown or other
gagacagaaacgtacgaactactaacttatatattgacgagaaaccatgtgggcgcacacgttcatgacgaggccttaacctctctgcgtgaaagagaaagcgacaatattaaaaatacttagcgtatattgtacgatgtacaaactaagtatagatagtatgacgagccaagataacggacagcgaggcatttatctcgctagaaggtggtatacatgcaaggaagatcctctcagcctccgagagtatagctatcagagttaagacaatattagtctctataagttaaaatgacaaacaactgctcgatatcaaagtgatcttggctccattctcagcgagacattcctatgagataagacttactgtatatctttaattatgcgttcatctagtcccaataaaagcagtatattcacagctttgtaaaaaactcatttatttggcttgatttgtaatcagatcccacaaaaatttagggataatggttgtaaacatattttggtcagctttgtaannnnnnnnnnnnntgcaattataaatagtggcaaacaagttcaaaatggggggacagaaaaaactc

SEQ ID NO: 148261 - DNA, 509 bp, Cannabis sativa
tatataaaaatgtatgagaaaatgataatatatttttttgcacatattttgtaattaattaatataatgtatacaaaattataaaatgccctaaaaaaactatagaacacctagacaacaacataaaaataactataaaataactgtaaaataacaaaaattcagctataaattaatagaaaaataactaggcatcaattttttcaaaatatgcaaatcatttataaattaatctaaataaactacaaaacatccaaaaaaaatatatattatttttattaatcatggaaaagatggaaaaatatagaaagactagtgctcttattttttttttgtaagagagagaaagtgttttaaaaaaaatatgagaaaaatgatgaaagtaaaaaaaatcatattttagtaaatgttaaaagaaattaatgaaggtggtcataagcatagtgttacgaaaattatgatcactacgcaagtatacgcaatcgagtagtaaactcacacaggtgagg

SEQ ID NO: 148262 - DNA, 530 bp, Cannabis sativa
tttgacacgttttttgagaaaaattctttgattagcaaagatttcactgtaattgaaaaagcactatagtgtgccttagcattagggcgttacacttatgttattaatttttgacaataaatgtattttatttttttccaatacaattaatatattctatcacatatttttttttctttggttttaatagtttcatttttttcattaaagaaaaaataaacatagttttctttttataattttattttttctttatgtatagtcgattaattttttagtactttttttatctcctttatactccaagaatattttattttgtatattattttccttttttttttttattatcttgtttatatttgaaatctttttttattttcttatttttttccttgcatatatatttaatattttatgcgtttattttttatctgaggtaaaaaaaaatacatatttattgcacagacaacattttctttatttttctttaatttcttataaccaatttgtttattttaataaaatac

SEQ ID NO: 148263 - DNA, 669 bp, Cannabis sativa
tatatgttcggtcggttctcggtttaatcggttggtttgccattgacactaaaaccaaccatgttaaggtagttttaaccgaaggcggtttttttagtttttgagtttttcggtgttcagacggtcggtgtattcggtttggtcggttttttagattttttgctcacccccaatacataaacctttctttctatacatttatatacataaataataaatgtataaaatataattaaattcattgacgttatttatttgtcctatttattattttatataaattttatttaaatatataattgaacgaataatcaatatatttatataaaatagagtttaaaagtgataatgtggcatctcatatttttttcatagtatttttaccattttgtgagagcttcaagttttgtctaacgaaaaaaatctactaactttgtaaaaaatctcacattgtttagaaagtagtgtggttttctatatccaaactataaataagctatacgttgctacttttattagtccaatcattattatttgttatagtgtagaaagttatatagcaaataaatattttcttagtatgttatttttttttttgactcattaataaaattagtcttatgtaattagctatatatttttagttttgttttaatattatatattttt

SEQ ID NO: 148264 - DNA, 665 bp, Cannabis sativa
catgatctgattcgcttatagattacaaagatggatagctattatagattaacattattgcctaaattagctctgaaactagcaagacacatttacaccaccttaaatgttctagcacatcaccaacaataataatctatatcagatttgataatgcgcttttagtagagacaatctgaaagctttaatacagacaagctacctggatacgtatagacgctcattctggataaacatccgtgactaacaatagactatccgagactatgtctccgagttgataacaagctattcagaagacattacgattacaaaagacaagcttcaccgaagacccatccggattgatcacaactttactaacaaagcttcttctggatgactaccacattttctgtaacttctttccggagtaacacatcttctcggataacaaaatttgtaaccataattaacattattattattagtagtagtagtaaagatctttatcaagttgatttttcgtttaatgctttttattattattactattatctataattgggaatataatttttttgaaatgtatatatagatttatttgaattaataattaatcaatatttataaatcaaataaaaaattaaaaaatgagtaaattaaggagaaaatagataaaagta

SEQ ID NO: 148265 - DNA, 525 bp, Cannabis sativa
  modified_base (465)..(475): a, c, t, g, unknown or other
ccggttgcccaaccggaattccagttctcggaattttcagaaccccatccggaattccatatgcacaaccggaattccggttcctcgcagaaacttttcaaaatttcacaacccaatcaaatccaacccaaatcacacaagaccttccagacctgttctaaacatcctatagaactattctaaagcatcaacacagcccagaaagcacaaaataaaaaaaacaccatgtgagctccaagctttgagttcaaagtcaaacttggataaagatcacttacaagcctcaaaattagcttagaactacataatcaagcataaaaacactgcagaaaataaaccctaattcatgcaataactacagccaccaaatcctcaattttcactttgaaaaccaaactttttaacaagaaaattatcaaactaaagcgagaacaactagcatgcatttcaacctaactaaacatnnnnnnnnnnncattttaaacatagaaacaacaacagcaactagcagcaacaacatcatca

SEQ ID NO: 148266 - DNA, 816 bp, Cannabis sativa
catttaagtcatttcttttagtgaaggataggtggctgccctaggaagtgacacctagctaagttaatttcagcaaggaattgattttcctaacccttatcaaataaaagaaaaaattagaaaataagccaaagtgaagaaaccctctctacccttccctctctcttcaaaccagcctagaacaaggggaaattgttgctgaacttggtgttttcagaaaaggttggaggaggattcaagcaagtaaactctagttactccctagctatgtttttctcaaggttttagttggtttcaacttgtgattttgtgaaagaggggctgttagggtttggttaagttgcaatttgaattttaaagttcatttgagttggtttcaagttcttgcaggtggttttagtgtatggggttggatttatgcaaatttgagttttaaactcaaagatttggtctttaatggcaagttgagtttcattgagtttttctatgaaatactggctgaaatatattggttatgcattgtataggtgttctggaaagtatggttgcatttggtggagttttgagcaagaaatgggggttttgggtgaactggtgtagccggttttggcagagttcccgaatgctccattttttttattctcatgcattccagtgccgtagttgggtgtttccctaattcttgggttagtgtaatcatttgagaatataacacaacctagggttgtgggttcgggtttcccggattagggtttcgatcatgtgatttacccagttttaatatgtgattagggcatccatccagcacgtgacttt

SEQ ID NO: 148267 - DNA, 735 bp, Cannabis sativa
  modified_base (683)..(694): a, c, t, g, unknown or other
aaaacgcactgttttagcgtcttcttctgtgaacgtaataggctggtccattagccggggcctttgagctgggagttgagcaacctcccaagcctcatagtgttttacgacccttccatatcgtttgagctccttacgggtagttcctccgatgtggggtcctcctgagatcatggccactctcccgttgggtcttggtggcaggctaggaatatgctgggcatcttcggggggagcgattggggccagagctcctactgcaccccctagcgcttcttgaggcagagttcccgccgccggaaccggattgagatggggcagccggttcttgatccactcgtagagatgtcccaatcgactcaagttttcgatctcgtccttgagattcttacattcattggggttgtgcccaatgtccttatggtacttgcatctcttattggggtccctccgggagctgtccttatacagagggggcgggctccggtagtgcgtattttgcctggtagcaaaatatacacgttcttgggagtccgttaactccgtgtattgagtatattggggggtatacccccttttctacctcttgtcctccgttcggttgctgccttgagaaggaccggctagacttacggccggagcggagtgcaacggggcctgtccatgttgggttttatgccctnnnnnnnnnnnntttcaatataattagatttatttattaatatagatcagaaa

SEQ ID NO: 148268 - DNA, 508 bp, Cannabis sativa
tagctttaatagccaatttaacattagcactaatgaccttcacaacactacaagtgagataaaaaaatacatctatttcgattacaccacacaaaatagatagttgcagctattgtagcattaaaaagctgctcaactagacaattccgaagcaaggcacgccaatcaatccaagcttcaaaataggcaggccaagagaaacgaccaaaccaactttgaatcttgataatcacctttcttctaaaactgcaatcaaaaaagaggtgttgatgggtttcaatctctgcctcacacgcagggcagcaaagagacagactcattaaaactttgctgagatgatctcttgttaagagatgattgttaatgacttaccaagcaatgaaacgatactttgggatacaaagcctattccacacagccttagtatagcaaactttaacagcagtaatgagagaaaggtaaaaagtttttaccttaaaattttctttccttccagcagctaccaaat

SEQ ID NO: 148269 - DNA, 1003 bp, Cannabis sativa
atgctagttagggtgttacattgccctaagcccccttcgccccgcctaacaaccagccatgaacttcgagcgttccctgtggccatacttttccaatggcctcatatacagagctctcacaaatttcttctcacacccaactcttttttatttcaagagcaacaacatcatatgataatttcttaactctactttatctatctttaatgtgcttttcttgtgtttatatttagcttttctgtttattgtgattaatctaggttgtatgttttggtgaaatttcttagcattttgattttttttctccatacattttgtgcccatctttattaattaggtgttgtcatatgctttggtgtatgttttgattctgaatttgttgagtgctagggctattcgtgtcttgttcttagtaattcataatttttgtctttgcttgttggaataggtgccatacactagacgtctcaaactttgggagtgtggtctgttcattattttcttaaacacatcatttttaccttacctccttaaacaccttgatctatctaagatatgcattaatttgagagaaagtgagaggagtgtgaggatttgtggagtctttggtgccatcatgtcatatattcatattcttagtggcaacattggggacaatgttgggtttaagtttgcgggagagtgtatgtttattgccacttttatatatgtattgattcatgattaaaaaaaaggagagagagagataaatgaaaaaaaaaagaaaaaaaaatcttaaaaaaatgagtgcgccccttttgaaaaaaaaaacgtagccaaattgtataaatataatttgaaattaagtttgggggtatagtaaaataaataaaaaaaggaagaattttctcttttgctttcttgttttgaaagtggcaagcgtggtattcaatgtttgtggggatattcttttgggaaagtgactatatgctcttattaattgggtcctagaaagattgaggtg

SEQ ID NO: 148270 - DNA, 817 bp, Cannabis sativa
tataacactttttaataggtattatttattgatgattattaataaatttaattataaaaattaattttaaaatattaaattattaatttttttttttaaaaaagcattaaattttaatttaaatttatttaattttactacttaattaaaaaaatatatcaaaaataagtctttttatactatattaaaaatatatttattgattttttaagaataataacacaaaacactattttttgtaaaaattttacaattttacattcaagatattttttttttttactttcttacagtgttttataaaaacaatacgaaaacaacaaaaaaattacataaaagtaatattaaaataacatctaaacaacataaaaataataacaaaaaattaaacaaattaacaagaatataacatagaattatattaaaataccgtattttctatgaataaaatcataaaaattataaaaatatttaaaattttatacaatcgtatgtttgtaattttattgttgtttttgtgtatttgtgaaatatccctctcctttatgtattgtcctaagactgctagtagtgtggctcacactttagctaagttaatactgtctttgaatgatcattatattttgtggcctggccacccaaattgtattgatgctgctttgcaaacattaatgttattgtctaagactctttttttctcttgaggtttctccatatgggtttactcttaggttgtgtttggttcacttgaatggacaatggaatggacttgtcattccttaagagggcccagtcaagtgtttggtttctttattaa

SEQ ID NO: 148271 - DNA, 662 bp, Cannabis sativa
gaatatggtattcaaggatttcctcgatatatgtgtaattgtatttatcgaagatatccttgtgtactctcaatcaaaagaggagcatgaacaaaatctcttgatggttctgaaatgacttcgagaacataagttttacgccaaattcaagaagtgcaaattatggctatctcaggtatccttccttgggcacattgttagtaaagacgagatcaaggtggatccagggaagatagaatccttcatggattggccaagaccggaaacagttacagaagttaaaagcttctttggtttggctggttattatcgtcggttcgtagaagggttttccaaaatttcaacacccttaacggatctcactaaaaagaatcagcgtcttgtgtggacggataagtgcgaagcaagctttcaggagctgaaatagagattaatcacagctccagtgttagccttaccttttgataaagagaagtttgtggtatactgtgatgcattaagacagggtctggggtgtgtactgatgcaggctgatcgggttattgcctacgcctctcgtcagttgaatgattaagaacagtggtacccaactcatgacctagaacttgccgcagtagtttttgctttgaagatttggcggcattatctctacggagagagat

SEQ ID NO: 148272 - DNA, 688 bp, Cannabis sativa
tggtcattttgccccattagttttgtcctttagtggacttagtaattgggaattatttggtttatgctatgttatattggctgaagtatgtaattataaaccattttattcttattttacaatgttggaaaaatcaaagaaaagcaaaaaattccatttttttctctcaaactctctctctttcggcccctctttgagtagcaagaatcatggtgttttccttggtaattcaagctattttctcaagatttagtatctcaagttgttggtaagattcttatagctttcttctaggtttcttgaattttaaaaaaaaaaattagttgcatgcttggtaatttgatgttgttgctgctgggtttatgggatgttttctgtagtttatatatgtttaaattgaatggattaaagcaggtttgatgcatgttagttagatttaatcaagtttgagtttttgaactcaaagcttggagctttaatggtgaattgagtttttaattgctgtagttgctagagttgttagatgttgtttacagagggttaattatgagttattatgttgatctatgcttgattttgttgttgttttgttatttgagcaagctttggagttttgaactcaagcttggctcattaatggtggtttttgattctgtgcatgctgggttgttttattgctttggaactg

SEQ ID NO: 148273 - DNA, 594 bp, Cannabis sativa
  modified_base (61)..(61): a, c, t, g, unknown or other
atcaaagaagcaagcaactgttgcgcaatcatcagcagaagcagagtacattgcagcagcnatgactacaagccaagctatatggctcgaaagaatacttgaaggcatgggagaattacaagaagaagctacaaagatctattgcgacaacaaatcaactatagcaatggcaaaaattcggtattcacagccgaactaagcatataagcatcaagtaccatttcatcagggaagcagaagcaaacaaacaaattgagctcaagcactgcaggactgaagagcaggcagcagacatattcacaaaggcactaccaagaggcaagttcgagctactacgagacatgattggagttatagaaatgtgtaccaaggaggagtattagaaattgctacacatttttacaatactcaattaagtctagaattttctgcacatttgtagaaaaacatactctaaacttttagataattgtagaataatttagaatattctagacagatgcaaaatacaatagaacataggcatttctagaaaaatttggtctagaggtttctagttatgcatgcttaagaaatatgtagaaatgtatggat

SEQ ID NO: 148274 - DNA, 516 bp, Cannabis sativa
tggtaaaatatttccaacacttatatctatatgtttgctcttttcatgataaattgggttcttacaaagatggatggatgactggatatccgaatacatagtcactccccctttgatttgttttaattcataaagaattcgtcgaagccataatacttccttgaatatttcgtagttgccatgaattttgtttctgttgtagaaagagtaaccacagactgtaattgagcctttaagcttatacagttctgatttgttaagaaaattatgatagttagtagtcctgtggtctgtaagggaagatattgggtaagttgtgcaatcccacaccgcctaaggaaggtcaagtaggatgattctgagattgtgtaggtatgggactacatagttgaagatggcttaatggattgaatggtactatcgatatcaacaaggtgcatcttatttttcagtagcccatcttgaaagaactccactgttaagcgtacttggcctggggtgattttaggatgggtg

SEQ ID NO: 148275 - DNA, 506 bp, Cannabis sativa
gctgccatttatgaattggggaagaaaatagggctagttagaaaatgtaatggaaagaagatgaaagggagaggttaaagggcaggctgggttttttttgaccaaacttggtggacttatattagcctatcaagattggtcaaattttaagttttagagaatttttttaaaaaaaaattcaggcatatctcgacacgcacacgtgagcccgtcaagtctcttggtcactttctattcactatgttttacagactttgcttggattcttcctggggggctatccatagtatgcatgtggaattgaaagagtaactttaagaagttaatcttatgagcaagtggtttagacacagtcggttcttacgtgtaacaaaagcttacaacttagtgtcagcttttgaaatcacgtagtggctacccctgcgtggcttagcaaagcagaggctaccgttgaagaatggtgagagaccacgccaagaaggtcgtgggtactagcgcttttatgg

SEQ ID NO: 148276 - DNA, 528 bp, Cannabis sativa
ttaccaccagctcctgtgccaatggtgggtaaccaagggtatattatgccgcatcgagactctgtgttcgagcggtttgtgaagctgcaacctccggattttctaggaggtatagatattattaaagtcgatcaatggatgagcacggttacccgcatcctcgataatatgggggtgacgggaactgaaagggtgaattgtgcggcctttatgttttaagatcatgcccgcgtctggtgggatatagttaatcagactcgagatgtcagtgtggtgacatgggaagagttcaagaaactttttgagaaaaagttctataatgtggctgtaaggacttcacaccaagaatattttgtaaagttgactcagggaaagatgtcagtggccgagtatactctggagtttgatcggttgtcaaaatttgctggtgacctggtacctaccgatttcaccagaaaatagaagtatgttcgaggactgaatgctacgatcagtcgggacttgaagattaccacatcacatgacact

SEQ ID NO: 148277 - DNA, 1959 bp, Cannabis sativa
aatatcaaagcaataaaacacttctacaagctcagaatcacaatccaccattagagctccaagtttgagttctaaaactcaaaacttggttaaactaataaacatatattaaaacatgcttatatcaacatatccaaacataaataagcttctgaaaacaaatccaaacacaaacagcacctacttaactcaatcccttaaaatcatgcaaaaattcctaacttcaaactcaagaaaaccatgaaggagttactagaagcttacctaaagcttgaaaccaccaactccttgctgaattaagcttgaatttcagaaagaagaccaaaccctaaatgcttctatggggttcgaacaagagagagaatggagagataaacttgatttttcctctattttgatttttttgtaaaagtgagatgacataagggttttatttaatgaaaactatttctataatcagatttaaataactaagttaatatcacaaagtgacaaaagactacgcggaaaaatgaccattttgcccctcccacactaacaccataaaggatcacttaggggtaccttgggaaattctaaaatcctgactattcccgacatttccaatgtctaactatatcacctcgctatactaaaaaaaaataccaagatgtgattctaatagccaaacaccgcgttctaatattgccgggcactgaatatgcaaaattataaaatttctatatgtgacataaaaatgcattctaaattcaaataaatcaccataaattaataaataatgtccataattaaaccctaattaactgttaatttccaaatttaagctaagcggtctttataatttgggtcgattccgatttcttctagttcttctactagaccaacatttgtggttccctaaggcggggatccacatctttatccccgccttaggcagtttcatatttggcaatgtcttttcctttttctgaactctgactagaggatacttccttttagccttagtcagtgcaaggttataacattcccgtgcaacttgttaattttctctcaggcacccgaccccattctttgttggaaccttaaggcacaaatgaaatatcgatgtaacagcctttaggtcatatagggctagtcgacctaacataacattaaaggctgatggaacatccaatattaaaaattgtgccattacagttatgctctttggaacttgcccaacaatgaggggtaggcgaatttgccctagaggtgcaacattctggccgaagaaaccatatacagtctgaagacagggggttaaatctttgagttggagccctattttttcatatggtgttttgaacaagatatttgtagaggctctattatttatcatagtttgggccaccattttgttggctatctgcacttccacgactaacgggtctttgtgcaggaaattaatcttgacaacatcttcattattaaacgttatggtgggttcctctgcccgtggtatcttttgcttcctttcttcgacggccaagaccacttcttcttgctcgtgctgtaatgtttgggcatacctttctcgggctttgcctgaatctccagctatgtgcggacctcaattgatgacttgtaaatgcccatctactggtggaggcaataagtcttgattattgtctgtctgggcggccctctgattttgatcggtcttgatgtatttttgcacgtgcgagttattctttcttatcaagaattcaatttcccgattcaaattgttacaatcattggtgtcatggccataatccccatgaaaacgacaaaacttggacatgttcctcttacttatgtcctttttcataggagcaggtttctagtacggagctactgactgagtagccatgtagatagtcttcaaatcctctgttaagacaaagaaagcagtgaacttggaaggattctctctagggg

SEQ ID NO: 148278 - DNA, 720 bp, Cannabis sativa
ggtcaaaattactaaaatgcccatagcttaccaatggggtcttaacatggcataaatcatataaaatctcatatattaaattacataataatatcctttcaaaaaaaaaattacataataatataattccttaataacacatcattatctagttagggttttgctaatccatttcataatcctagggtattatcctcgagttcccaagttgcctcttcaactttactgtttctccataatacttttaccagtgcaatcgtcttgtttctcaagactttctcccttctatcaagtatctgcactggttgttcctcatacaataaatccgactggagttctaatgcttcataactcagaatatgggatggatctgagacatatttctgaagcattgaaacatgaaacacatcatgtacaactgccagtgctgggggcatagccaacctgtaccctacttgccctatcctctcaaggatttcaaaaggtccaatgaacctcgggctaagttttcctttcttaccaaagcgtttaatgcctttcatcggcgatattcggagaaataccatgtccccggtctgaaaatcaatatgccaacactttggatcagcataactcttttgtctgctctgcgctgcgagcattcgcgcactgattttatcaactgcctcacttgttctctgtacagcttcgggacccaaaaactttctttcacccacttca

SEQ ID NO: 148279 - DNA, 879 bp, Cannabis sativa
  modified_base (818)..(822): a, c, t, g, unknown or other
gtgccatagcctgacactcacatgtcactgccgcacgtgcctaatcatgcattgctgataggaagaaacctaacaacagtttcagtttatagtcatgacttatcacggttgtctcacaggaacagcccaaatatctctctcggtatccatatatcacattgcctaatcaggcaagctcatgctatagcctggcatccatatatcgcatcacccaatcaggtgagcttgtataaccacattgcctaatcagacaatcttttcattacataacaataataaccttatcttagcctcgatgttaatcaattcttaataatattaattgcattgtaacataccatgctatgcagtaaaatatacttttcttacctcaagttttggttcatgtatgttggtcgacttgcttggagaacaatcgacgatcccgagccctatgtcacaacaacggtaaatcaataagtgtctatcccaaaacactaattaatattcacataagacaatctaggggttttctacaaaatcccacagtataaatagactaaaataaaacttacattttttctctaaaacatacatcatattttagagctcgtcgtaacctttgaaacagtatatagaacgtccaaaatggacacataagtgaaaagttgtgacaaaaatacaatttctgatttctcaagaatttttaaaaatggtagaccttttcttgcacaaaaatcccaaattttacactcttcgaaacactatcgaaacccatccaaattcattccaaacttcacaagacacatatataccatatatactatagtcccaacgtnnnnnaaattaaaagcgagcccttaaacgcaaaacgccattaaagctcggacttaagcttta

SEQ ID NO: 148280 - DNA, 1984 bp, Cannabis sativa
ctgaaaagtcaccattttttgcttgcagtctatactagccgaatacttggacaggaaatccatcccaagtataatgtcaaactccgataattccagctctataagttcagcactcaactcctatcttcgatcccaactgacatagacctaatatgcgcattcgagataacgaactccccaataattattagggttccaaaccctctttcaagaaaatcataaggcctacccaaaagatcaattacccgtgtagctacataagagtgtgtagctcgcgaaacaaataacacaatataaaaggagttgttgacaggaagctgacctgtcaccaaagaaggactggatgcagcatcaccttgagtaatggaaaacacctgagcaggtacgggttttgcctctggcttctgctcttctttctttgcctgagggcagtctttcttgaaatgccccatcatgctgcactgaaagcatgacttccggttgcactctcttggatgatgtttcttacaacgtgggcactcagggtaagtgtaaccctggcatccacctctacctttgttgccacagaaccgcttgctcaaccgtgagccaccagatgccgaggtaacttttctcttatgttcagtggtcaaatcaccaccatccctaccaaaaacaggtgtaggaagagttggggtcccacctacacttggagtcacacgggctccagaagaaacttaattgcaccctcagctcgcaaagctttcttaaccatctccgcatatgatgttgcctcattagtagtgatcaccaaatattgtctaattttcacattcaaaccggctagatatttttctttcttactgaaattagtaggcacgatacccgatgcaacttcgaaagacagtcaaactttgtagtatactcagtaactgtcataccctcaatctgcaccaactcagtgaattctttctgcttaacattgcggactgcttcattgtaatacttgaaattgaataactctcagaactcttcccaggtcattatagtgacatcctaggtgagggagaccaattcccaccacactagggcatcaacctggaactgaaatgttgcgcaggtatcccgatcatttccaaccacccccatgaaattcaaaatttgctctattacagtgagccattgctcagccttcatcacattaggacctcccaagaacactggaggtgcttgcttatagaacctctcatataacagttgccagcaacaggttgttctgctggcaccgctggagctacaacgacctaagcttgatgtggagacatagtaggaggaccatgctatcttaatctcagaatttcttcttcttgttggcggatttgatctcacatctccgcaaacctctactcccaatccagaggagcttgttgtggatttacaggatgaccaccttgaattttgccacggcctcggccccacacggggaattctgggaatttgatttccctgactgcctctagtctcaaccttattaccctaacttcttgtatttttttgggcgtccatttaataggacttagcctgcgagcccataagccaggcaggttagacagcgatcataaaacttaatactactcttatggattttaaggcaatgcatttaaaataaataatcataatctaatatgcttcctaacatgctctaataatctcatataatactaaacaagtatgggcttaccgaatcgtgaaccgagctttctctgatgaagattgtacatgtcttgggaagctttagtagacaaacatggcggctctgataccaaaattgtaacgccctaatcctaaggcacgctacagtgatttttcaattatagtgctttcttcgatactcgacgaactttcttgaaaatcttgtcaaattaaaatttttataataaatattaaactttaaaactttacataatcatttacaagttccatcccgtttctaaacttttataca

SEQ ID NO: 148281 - DNA, 1007 bp, Cannabis sativa
  modified_base (748)..(750): a, c, t, g, unknown or other
  modified_base (936)..(953): a, c, t, g, unknown or other
tggaggcttgaagcggggacgttacaacctgcacgctgcagtcaagttcagattcaaagcatcaaacaacgaaaccgagtacgaagctctaatcgctgggctaagactagcccaagagatgaaggccgaacacatcgaaatctacaatgattcacaacttggggtaaatcatgtatccagagaatacgaagcttggggagaaaagatgatagcatatctgagcaaaatacatgatctactcgcacaatcaaaaagctacggtctcagacaaattccaagagaagaaaatacaactggagactcgttagctcgattggcaagcagcaatgtaagtgacaaggcaaacttggttcctatccggttcctcgaagagcctaccatcactggcacagaagaaatcgaaatgattgatacatccccaaactggatgacaccaatagcggccttcctcgagtctgggaaacacccagataaccgaaatgaagcttggaaaatgaaaaggaaagttggacggtatatcattgtagatggagtcatgtacagaagaggattcttgatgccattgctcaaatgtgtcactcaagaagaatctgcacaactcctatccgaagtacacgacagattctgtggaaatcatgccaccggacaaagcttatcgaagaaaattctaaggaaaggttacttctggccaatgatgattgaagattcaaaagcctatgttaagaagtgtgacaaatgccagagattnnnaaagataccaagagctccacccaaggagttaacacagatgcaaagttcgtggccctttgccatttaggggatcgacctcatcgggcaattacccaaaggaaaaggcagagtgcagtatgcagtggtagcggttgactactttactaagtgaacaaaacctgaaccactcgcaaccattacatcaannnnnnnnnnnnnnnnnnttgtgaagaacataatatgccggtttggactaccgtacaaaatagtctcagata

SEQ ID NO: 148282 - DNA, 647 bp, Cannabis sativa
gaaagcaccttacccagaagacaatattctcccctcaaactaaggaacacatactcatggccttcactctagcgaaatcaccttatgccgccactaccaccaaagggaactcgccgcctgaccatcacctttgtcaggaagactttcgacacaggtcctaacacctatctccatcttgtactgccgtaatcattaaaaggacatgccacttgactacaaacatatcagatagacttttgatacacgacacaatcttcaatggcaggatttcacattgagggcttctctcacacatcgtaaatgcagtctactgtcccaacgctcttaaacctttggctctgcatacaacttgttgggccccagtcttctatcttgttgggttgctacctcatcttgactcccacattagtatgatattatccgctttgggcctaagccctcaaaattttattttttgcaccctcccaaaaggtctcatactaatagtgaaggtagaacacttatatccaagacagctctttcatattcttccaatgtcgaacttggattaataccccaataattactattatataaaataataaatcacataatatacaccactatgcgcacccatgaatagttttcatacaaaatctcttatcctt

SEQ ID NO: 148283 - DNA, 912 bp, Cannabis sativa
aaagtagaaaactaataataatataaaaatctaatacatgttctacaaaaatatttaaaatttaagatattaaatgtatattccatatttacatattaataaaatataatttaaaataaaaccaaatattctttatctatatacatttttttcttctttagattttgttgtttgaatttattgttgtagacataaaataattgtagacataaaataataataaagtactttattttatctatatattttttaattaatattaaataattcaatattctttcaaaaaaaaatcaattattaaaaaagcaactaatttaaaataagtggattggattatattttgctattgtgcatattggagtcaaaatataaaatttaacactacgaatcaaatacactgaacaaaataatagaaattgaattggatgaacactcctaattcaatattatatttgtaaaatttcttaaagcattgcatttatcatttttgaatttgaatcacaacatcacatgtggataatattattagtgcgtttagtaattataactgttttttctttttaattttttaattaggaatcaaaattttcaaaattttaaaaacaaggaaaaatcactttcaaatttttttaagataagtagtagcataagtactcaaaattttaaatttgtaagcggcataaacccaataattttttttagtggcataagtacttgatgtttataaaactttaattttccttcaatttcatcagtacagactttgttagtgacttatacaggagacatagaaagctcaaattctaaattattaggttttgataaaaatatttaatatcagttgcttttaaatctccttataataaattcaaaacaaaatctatactcataaaactagagaaaaattatagt

SEQ ID NO: 148284 - DNA, 692 bp, Cannabis sativa
  modified_base (26)..(57): a, c, t, g, unknown or other
  modified_base (618)..(661): a, c, t, g, unknown or other
ttaatttcattgttttagaaattcannnnnnnnnnnnnnnnnnnnnnnnnnnnnnnnaaatctagatcctagtaaaacattccaacatgactatcacttggtgatctggcgtgcatcaaaggtagacattcgcgacactccaaggcagtcgacatctacattaggcccttcgagtacccatctaaatattagctgggcaggcttccatgtttagacccttccaggtcagggagatgtaacacgccttccgcatcctggaagctaaagcaaggcctagtggacttccatgtattctttagtcttgactggatcctagttctatgaagttactctatgataggatcgtagtggaggactttaattagggtattattaggctagtctcttccattatatgccacaggttacatgctcaaaaacacgaataacttttaaccttaagctttcaggactctttgagattcgggagcttatagtgctcgtccgtttcttaggaatgaattcttgacacgtggttactgctagagtcgtggatgcatcccatgagttatcatcaaataacagaccacaagttgaagtcatcacgggcgtggcacactgttgggaatattttaccannnnnnnnnnnnnnnnnnnnnnnnnnnnnnnnnnnnnnnnnnnntgaatatctctaaaacaataaaataaacaca

SEQ ID NO: 148285 - DNA, 655 bp, Cannabis sativa
tcttaaatgtgaaaaaatgccatataagagtggcaaacctataaatgctatatttttgtagctttttttataaaatctcatatttcatgtaattttcacttattttaaagaaaatatccaaagttactaaaataaaacacaactggttgttcacaaccttatctaaacaagtgagtgaattttgttgggacactatatctctatttttaattaattagtatgtgtttgggtttatattgttagaaaatttgtgcttcgaaaatcaaaataagaaatacaactttaagataaataatacgaaaaataaaattatagattaaaaaatactacaacactaaataaaatattcatataaattaaaaaataatacaaatgaagagaaaattacaacacaaagctataaacaacatgtaaaatacaatatagttaataatatatatctttatatataaaatgtggttatttaacaatttttgtagttcaacaaaatattttaaaaatataaaaatattccgttaaatttaacggtattaggggattcactagttataatttcgctattttatttcataatttatcttaatattcactaatgctatattttctaattttaatgctataaatatcaaaactatttatttaataattataatta

SEQ ID NO: 148286 - DNA, 1494 bp, Cannabis sativa
  modified_base (875)..(893): a, c, t, g, unknown or other
  modified_base (1103)..(1104): a, c, t, g, unknown or other
attttaataactttgcatttaggggaaaattttttgggtaatgtaagtataggaattcaaatttcccttataaattcatcacttgtgtattcccaaagtaactttggcacatgaattacttaatagatttcgaatttcaaagaaatttctaaacatactcatatacaactaaaataaataaataaatgctagaaaggtaaataaataaattactcttttaattaaaattaaataccaaaacacaataaatatattcaaatttgaaaatataccaaactattggaatcgtgttttggaaaaatatatgaaaaaaactaaggttgttaagatagacagtttagggtaaatactattttagatctagtgttttgcaaaagttaccaattggacattctgttttgttaaatgataaaatgaatcatgtattttttaaaattgtacaaataacaccctaaattgattttttgtcaaaataaaacttaataataatctgatctagagatgttatgataaaatttgttacatgttctatatctgttcgtgttataaattgtcttaaaactagttatattaaaaaattaaatttttgaaaattgagttcagggtcttatttttactattttggaaagtatagggtctattttgtcatttaacaaaccagaggatccaattaataacttttacaaaatacagggtccaaaatggtatttactcaataaattatgattataaatatttaagtaaatattttgttctttaattattaattaaataaaacttcaattgtgttggttgaagtctatcaaagatacttttaagaaaataattagtttttttaggtgacatttggtaatatatttttttttttaattttnnnnnnnnnnnnnnnnnnntaaaatttttatttttaaatttttgtttcttaaaaataaaaatgtgttctataaccacttttattattataaaataaaaaaaaaaattgtgttctgtaaatttcattttcatttattgattttatttaagtcagatccgggtccaggtccgagtttcaaggtctaggttggggtgggagtctaaaatattgataaatatatatatatatnnatatatatatatatataacttttcaaaaaaaatttgaaagatacttttttttgttttcaaaattttgaaaattttgattctcaattaaaaaattaaaaagtcaaaaaaagttttatagaacatgatttcgaaaaatattttcacttttctaattttaaaaataaaaaaaaatgactaaaaagtgttaccaaacacactcttaattaatcaaagaattttttttattcaatttaaaaattaaaaaaaaaattgtgacttttaatttttttttttttttaaaaaaatgatagttgtggttaattacagataaagttaagggctatttacaaaaatatgggaaaatgaagatatgttttgatatatggcataaaaacttaattaccctaaata

SEQ ID NO: 148287 - DNA, 573 bp, Cannabis sativa
atctcagtgagggtttgccaccgttttactgagaaatttgtatctcaacattgcaggccttcgagacgagctcattgaaagttttggattttgttgtgcccataaaagtttccacctcaaggttgaggttttgggcacacattgaaaccgctgcttgttccaatatccattatggacattggagattgagatttctccacctagttatgaactcattagcactttcactagttcgtcgcttcgtttccaccaggtgatggagacttatggtcttctttgagctaacaaattgtgccagaaaagctttttgcatgtcatcccaagtatttatcgatcttgggcgtaattgagtgtaccaggtgaacactgcctcttttaacgattgcacaaattatcggatcaatagtgcatattattgggcagattcaccacatgcagaagtaaaataggccaaatgctcatggggagaaccattaattccatcaaacttttcaaacttttgtctgacgtagttcggtggaaatgggtttggtcatagtaagccgggtatggcttatgatatcccaggatagg

SEQ ID NO: 148288 - DNA, 526 bp, Cannabis sativa
tcctcgttgagggtattttgctgctcctcccgtaagattatcttcaaggcctccacctcagcatgcccccggctgtactcatcaagggcgtagttgtattttgctatctgaagattctccctctcctcgtctccagggaccggagtcaacattatgccatgaggcactgtctattcctccgcctcggaaggaatccgtgagtcatggctcggggccggagtgtccatccttcggggccgctttgaaggctcctcctccaccatcttgcccttgcgcttgcgctcgagggcggccgactgctcttcttcacctttttcgacttcctcaagagcctcctcctcgtccaccaggacaatattgcccaaaggggcattggaggaggacatcccgggagtgaccaactgagaagcaacatgaggcggggaagtatccggactgtggactccaacaagagtggccaagagttcatccatgtgttgggttttgtgccctaaataaaacccattttagtataatcagatttact

SEQ ID NO: 148289 - DNA, 1340 bp, Cannabis sativa
tgggccatggaattaagccagttcgacatacactacgtaccgcgcatttctataaaaggacaagccttaggtgacttcataacagaatgcaatgaagcagaggctagtggaagcgtaccagtactgcagaccccgacatggaaggtattcgtgacggagcgtcaaacgagaacagatccgatgctgggatagctatgatatctccgaacgggtttcggctccaggcggccctgcgtttcgaattctcggcttctaacaatgaagttaaatatgaagccctaatggcaaggttgaagttggcgagaaccatgggagccacgagagtagaagtcttcaatgattcacaactggtggtaaaccaagtctcgggagaatatcaaacgcgtggggagaaaatggttgtgtacgtagctattgtccgggagctgctccatgaattcacgaagtacaaagtggatagaatacccagagaaaagaacgctcacgcagactttttggccaagttggcatcagacagcgaggttgagagactgtgggtggttcccgttgagcgcctcatggaaccaagcatcaaagttaaagatacggtggctacaatcgagctggagccaaattagatggaccccatcgtcaaatacataaccaaaggcgagttgcctcaagaaagggccctgtccagaaggatacagtattaagcgcattgatatgtgatgatgaataatattctctatcgaagaggactcagcatgtcgtacttaaggtgtgtatcggaccctgaagctaaacagattatgctagaggtccatgaggggttctgcgaagatcatactggaggtccaagtctctcaaagaaaatattgagacaaggataattctggccaacaatgaaaaaagattgtatagactatgtcctgaaatgtgatttgtgccaaaggtttgcgaacataccaatagcccccctcccccaatgagatcaccctgatgactagaccctggccatgcgcggtgtgggggatagatcttattggctcattaccaacaggaaagggaggggtaaagtatgtcatagtagcagtagactacttcacaaagtggacagaggccgagtcaatgaagactataactgctataaaagcactagaaattgttatcaaaaacatagtgtgtcgatatgtcctgcctcataagatagtctcagacaacgagaagcagtttgactgcgaagaattcacctacttctgccaccaacacagagccatcaaaagcttctccgcggtggcaaggccacaaacaaatggacacgcagaagtcgtcaataaaatcctaaaggtcaccctaaa

SEQ ID NO: 148290 - DNA, 542 bp, Cannabis sativa
tttagaattcatactaggatgttaatgaaacatacttgttagtaaatttagatcctggtaaaatatatccaacactaacccccttggtaaaattaccaaaatacccttttacttacaacctaagcaatactaagcctaggggtaaaatggtcaaaagccataaccctgcttaaactcggtattcaaaatattccttatgtttgtctcgctaagaattaggttctagacttacccgtgtgactaaaacggccatccattgcatttttcatcatcgacgagcaaaaatcataaaaattgcataattcatatataatataaataatacctctagagtttaataaaatctccagaattgagaaactgtaactctagtgcccaattctagaaatgggacccacaacataataaactcacataattataaaaatatcaataataaacgctaattgcctttcctaatctatattataaaatgcggttattttggatgtatggagtatacattgaactgggaccgatattgatcttggtaaagatattat

SEQ ID NO: 148291 - DNA, 997 bp, Cannabis sativa
acttccaagaatagatcagcttgttgatgcaatagtctggcacgagatcctaagctttatggacgcctattttagatataatccaatcagaatgcatcgactagacaaagaacatacacgtttctgaacagatacaggtctgtactcttataaggtcatgccatttggtctaatgaacgctggagctacctacaaaagatttgtaagcaaaatgttcaaagaccgaattggacaaaatatggaagtatacgtggatgacatgcacatcaaatccaagaacgttggggggcatatagatgacctggacgaatgcttcgaaatccttagaaaatacaacatgatactcaatcccttaaagttctcctttggactcagttcaggtaagtttcttggtttttttgttaaggcttgaggtatcgaagctaatccagagaaaattcaagccctaatcaatatgaaattgccaacaaaaactaaagaagtccaaagcataactggtcggatagccgcactcagtagatttgtttcaaaatcaatagataagtgtgttcctttcttcaacatccttcgaggaaataacaaacttgaatggatagaggaatggaagaatgcctttcaagaacaaaaaagacaacttgaaaagcctcatgtactctcaaaacctctggatggagaagaattaggaatatacctagctgttacaaaatatgctttgagtgttgtgatgatcaggaaagagaataacgtagaacatcctataaattatatcagcaaaagactcgttgaagctaaaggacgatacccattagtacaattgcttacttactgcctaatcttagcaacaaggaatttaaggccctaattccatgctcgtcctttttgggtatacactgaccaaccactacgccaagtattacaaaaacctaacgcttcagtacagttactcaaatggacagtggaattaggtcaatacaaaataatctttcaaccccgaaca

SEQ ID NO: 148292 - DNA, 587 bp, Cannabis sativa
ttatgtgcttatttgatgatagtttagaaatcgcaatgtatgttttagaaatattttttatttcgatctggaatcctttttactggaaattagacttaataaattttggcttttacagaacctaatttggaattttgatgaattagttatgattttttgaatttgaatgaaaaaatctgaaatgtgaaaacacacgcgcgcggttacaaggagctgatcgagaattctcggacacagccttgcctgaagggggcacacgccgagtatcctcgaccaacacaggctacacgcagccccttttctcggacattcccttgcttccgcgcgcataggggtatgcattgtataaccctgtccaccaattttattttcttcatatcttttgattcaaaaatcgtttttcattgatacaaaaggcaatttttggtagaattttgtgtagaatgtgaattttcaattaaaaatctaattgtcagaatcaaatcaattttattaattaaaattagttttagatattaggaggctttgaattttgaaaatttaatttctcacaaaattagccttatggttaattttgaaattttaga

SEQ ID NO: 148293 - DNA, 508 bp, Cannabis sativa
aaaagaaattaattaaacaacggtatattctaaaattaattaggtagtgttaaatgtggtattttttacagtattacgccactcagcgtaaatttctcttttttttttgagagagggtgaattctatatttagttacgctttcacaaattataaattattatttttagtttgttgtctttattttattaaattactttgatactaaaaatctcaatttttttttttaaattaagttagaattaaattaatttaagttaaacaagtttttttgaacttcatacatttcatttgggtttgatctaatactttcactatttctatattaaattcaagatttttacatttgcgagttaataaatttaaaacatactatttttggtctaacaaaaaacaaaaacaaattataggtatatatcattttggaccctgtgttttgtaaaagttaccaattaaaccctctgttttattaaatgacaaaatgaactctatattttctaaaatggtaaa

SEQ ID NO: 148294 - DNA, 716 bp, Cannabis sativa
tttttaataaagctattaatctgattttttctaacttagtttggctgaaacaaaataaggaaaatcatttctttatctcattttattcaaaaatttaaaaagttaggaacatcactatttctctcaaactctctttctctctttcgaaaatcctaggggttgctagggtttgatcttttgttcctcaaattctgcaagttttcatgaattctaagtgtaatccaatctaaggtaaccattgtgcaactttcttgttagtttccttgagttttaagaaagaaaattgatgcatgcttatggttttgttgctacagctactgtatgtgtttattgttgttttgttaggcttaattgtgttcagatgaatggattagaaaaggttttagtggttgttagttgattttattcaagtttggagttttaaactcaaactttggttttaatggtgaaatgttgttagcttgctgatattggtgttgtggttaaattatgttttctgtagtttaattatggttttataaggtgatttgagctagttttgatagctatttagtaggatgagcaagctttgagtttatgaactcaaggttagctcatcaatggtagtttttgtatttgtgcatgatgaagctatgttttgttgctttagaaatgttcattggggtctaattagtaggtctggaaagtttgaattggattggggttgatttggtcga

SEQ ID NO: 148295 - DNA, 662 bp, Cannabis sativa
aaaactgaaaaaaaaaaaaaaaccaaataatacacagaaccaaaactgcaataacaattgtcaataatacacattacaggtatatatgcattacatgtatataagcattacaggtatataagcattactggtatataaacattacacgacattttaatgaacacaaataaaaaaaaataaccggttaaaataatatacaaaatcaaggtcaaccgtatgaaacacatacataacaggcaaaacaaatatatactagaaccaaaataaccagttaaaaaactaacttagacaataaaacataaaaattaaatgaaacaggttccaaatacaaaaataaaatcagattctaacaaaacattacatttaacaatgctacaagaaaataaaattaaaacagatacaaaaatatagataacataaaaaaaaaacggttaaaacttaaaaaccagtttagaaacacatacataacaagcaaaacaaaatatagcagaaccaaaataactagttaaaaaactaacttagacaataaaccataaaaattaaaagaaaccggttccaaatacaaaaataaaatcagattctaacaatgctacaacaaaacaaaatgaaaatagatacaaaaatatatatatataacataaaaaaaccagttaaaacttaaa

SEQ ID NO: 148296 - DNA, 810 bp, Cannabis sativa
cgttgttctttgtgttctcaatgaaggtgctgatccaattccgcttaactctactttaattacacttattccgaaggttaagaagccacaagttgtcaaagactttcgtcccattagtctctgcaatgtcatttccaagctcatcacgaaggttttggtgagtcggttcaagcatgttctaccgtatgtcatttcagaaactcagagcgcttttcttcccaatcgattaatcacagacaacatactagtggcttttgaactcatccatggaatcaagcacaaaacatttggtcgtaaaggagtggcaactctcaagcttgatatgagtaaagcttttgaccatgtcgaatggaattttgtgcagttaacaatggcaaagatgggttttcattccaagtggatatctttgatcatggcctgtcttacaacgaatcactttacttttcttgtcaatggggaagttacaggctccctcactccaacgagaggtcttcgccaaggctgccctttatcgccatacttgtttctcacttgttctgaagttctgtctcgactgcttcagcatgaggaaaatcttaggaatcttcatggctactctttgactcgacactctgctcccatatctcatttgttctttgccgatgacagtctcctattttgtaacgctactgagagctcatgcttggctatcaaacgatgtttggacatatatcatagagcatcgggacagcttcttaatcctgacaagtcggtaatgtctttctctcccaataccactttggctagccaaattttctttcatcgacacct

SEQ ID NO: 148297 - DNA, 512 bp, Cannabis sativa
tctcatctattttatattattttatattatttcataacaaatataaaattatagtatttattgtgatgcaaattttacatcatactatatattgtgatacaaatttggattacttttgattatgtgagatttgtgcatcatagtttagcataagtagacttttaacaaaatcatgagctatattttacacttacatcacttatttgcatctccattaaaaattctcttagtcacaacaaaaaaaattacttgtgatcacttcaatatttttagatagatattttaatgagtgcttttatagtatactatttaaaaataagtgtactgatgtattatttttgtactgtagttaatctctcatttattgttacataagtgtaattgtaattatttgagatattttataaaattttgaaaaatttaaaataatttactttaccgtaaggagtttaagtagtttattttatatgtgtataaaataaaaaaataatacacttatttaattgtttaaa

SEQ ID NO: 148298 - DNA, 881 bp, Cannabis sativa
atctgccgagacatgtctgtacagaatgaaaaataatatggttagagaaaacaggcatcagaaatataaggcataatagtcaagaagctcaaaaataagacgaagtagtatgctaggttactgccgaaacaagactcagaagtccatcatcacctgacatcgctcttattttagacataacagctttcccttttccgaacactgaaggggatggccggacatgtgaaatgggctcccttatgcgaatatcatgttcaacaggcctgggaggggccgggagtttcttcttcctcttaagcggagtcacctactcttcctcagcttcatctttaggattccagggctcttgagcatagtgctttgcccttggacctcccttcaacttagcttcacgctttagttgaatcagctcattctccgaatgagctcgttcggtccggccagcactagatttcctcttttttcccgtcacggacttaggaataaagtccttgggatagagctatacctcataaagttatcctcggaggttaactggataatattccggtcttcccccggcagtcgggcaagtttttgagctctatccctaagagcaagagtgtggggagggcggtgataagtcaaaatctactggtactgagtgcgagtgatgcccgtgccatccaccatgaagtactcatcaacaaaacaaccaatcttgttgatggccgagtcgtccgtgcccgtcaaccacttgaagcctggttgagagaaatagaagtaccccgacctaccttgcttggcggtggaaacttcgtgaggagaaggcgtaccccactcctgggaagcgtagaggacgaagagggcagacagatatttaatgcccttaggagtgaact

SEQ ID NO: 148299 - DNA, 731 bp, Cannabis sativa
cgagttgggcattcttctttccaagaaggttcgacaatgtatgtctggtgttgatcgcggttcttatttacaaagagtcattcttacttgccagggttgtaagcctcgtcatcgttagctggatgaagctataggaagtcttcccatagcgagacggtcacctcgcttacttgttcttaagctgatccaacttttacactttgtttgttcgttgtacgctaaggactttcacgattaatacgtgtcactttgtttgctacctctctattcgcatttagagatatatggtttctcgctaatatactaagtgtcaatttgtatatttattcctcgcctaagaccttacagtcagtgtgctacaaatatactctaatacttatgtaattaatgagttattcaataagaagcaattgcatcgattcacattccttttatcttgacacgtgtcctctagccaaattttgagaataataattgccccttaaaaagttattttttttagtaaaaagagcttttcgataattacagaggccatttttgtcaaaacccttcttggaaaaaacactctggcggtggtacggtttcgaggatcattatgaatcgtctcttcatattatgtctgactctcaaccgttagatcttccaatctttagctttcttgtcactggactttgtgtataaaagggctgctcaagcttgtcattttgcacaaacctctagctttttagtga

SEQ ID NO: 148300 - DNA, 662 bp, Cannabis sativa
  modified_base (34)..(35): a, c, t, g, unknown or other
  modified_base (223)..(225): a, c, t, g, unknown or other
attgttttcgagaattcatatttaggatgttaannaacatacttgttagtaattctagattctggtaaaatattcccaacataatgaccacatgattagattatagattagttgggcaattagcattaattattgatattttatgattatgcatgattagatttgtttcgggtctcattttcaaaaatttggcatttgagttataatttctcaattctggagnnnttattaaactctaagtgtattatatatattatatgtaaaatttacaatttttatgagttttacttagtgacaatagaaaatgcgacggatgaccattagagtcacatgggttagcttagaaccattgttaagggggacaatcatatattgatatttggaatgtcaagatatcgggattaggcggggttatagtattgaactattttacccctaaacctaaagattgcttaagctttaagtaaagggtaaaaatgaaattttgcctaaagtaaccttatttgattttagtgggaatttggtagattattccacctatttttaatctgatgttaggataagactaaataaatgagacttatccttttagttataaaaattaaaggaggaaaacacacccctttcactctctctctctctctctctagatcggaagagcg

SEQ ID NO: 148301 - DNA, 692 bp, Cannabis sativa
gacccagaattggaatcagaccaggtctggactagaacccagacatgagacagtaacaggacccaaacctaaacccatactcagacaagaacccataccgagacttgcacccagaccggtacttgtaacttgggacctaaagcaagactgggacctagaccatgaccgagacccggacctagacccagaattggtgctagaacctgagacttgaaccctaaccaggacctggactcggaccagacccgaacccaaaccgaaacacgaacttggactcggaccgggacctaggacccgaacatcgaggggggacccagacctggaaattaggcccctaaactaggaccagaacttgggcgtcagaacttggatcgcgatccgagactcggcatcagacccaaacctggacctaggacccacctcgggacttaagatccaggactcgatgcttggactggacccatagtcggtatttagatctaggacttagctaagaacccgaacccacactcgaactcataccaggacccggacacataccaagacccaaaccgacactcgggaaccaaaactgaaactagaactgtaaccggacaaggatcttggaacgggaccgggaccaagacccagactcgaacccgaaactggacccacccttggaccctaaccaagaccgaaactcagacctgaac

SEQ ID NO: 148302 - DNA, 518 bp, Cannabis sativa
attgtgatatataagatgaatgggatactcctcccattgccaattggttttgggatggaacctcattcatcttattcctcaaattctaacactataagagttatggtgtgtacataagttacatttgagtccataatattcatggaggttatgagtttgaatttcaaatggtgatatcctaaacactatataaagaggtgtaaggtgcttatattgagatgagaaattttctatcaaaaaatcacattactaaaaaatcctaaggcataataatttttaaagctatttcctagagagttcccttagtgcttagagataagagaaaataagtttttggacaaaggtgtaataccttgttaagtcatggtgatccccactaatctacattaaggttgtgagtgagtgttcttagaaataatagagagattacaatggaagaataaaataagatgaataaaagactaagacaattacaactctaaacaaaatattacaagggcaatatattaaataaagag

SEQ ID NO: 148303 - DNA, 685 bp, Cannabis sativa
atgaaactgaaataaattaccgataggaaaattctggctaagtcgctgacaatgtcgctttctttaagacgtttcgcagctctgcccaaagtgtgcacggacgtctagcaaccacgacgtccccaggataaaacaaactcttaatacgtacgatatgttctacaccgaactatatcgctctgttacaccttaaaatttgctctgagaaaaatcgtaagtaaggaaagaaaagtttttttatgttggaaaagatatgttcttccgttgttctgatacgacttacatagaagtcgatttaagaataaacggtaagaaaacggtaatgttatcattcgtggaggagttggatcgtgggagtaaaaagcagatcattaactgatcgcgttttactacttttgatcacgtgttaaaattaattagtaaataaataaataaaaaataaatgtttatttaattaaataatttttttaaaaaaaattaagtgacacctcagccgccaacccaacccggctcggacggacgggtaaatattaataataataatacattcatacatacatacatacgcgtacgggtaaatattattaataataatacattcatacatacgcgtatttaggggtgttcattggatcacatccaatatttttaggcctatccagatccgatccaattatatattgaa

SEQ ID NO: 148304 - DNA, 634 bp, Cannabis sativa
tgtgttcgaaagctgtggaaagcggcgttgggcctttagagagtcatattgtatattttaacctatgttatttgctcggggttttgtgttaagtattgaatggtcgggtttagtaatgaccaaattactcttatgggttagtagctaattagtaaatagctagaggggtaaagtagtctttttgagtttagccttgttttgtcttttatggtgatatatgctgaatataggtttaatattatttaaaaagaaaaagaaagaaggaacctaatagaaaattgagaaaaaaaacctagacttttcctaagtctttctctccttctctttcgaaccaccaagctttgcaaggaaagagggatttctttgctgtaattctcaaggttctagcaagaatttgatactccaatcaaggtatgaacccctaggtattttattgagttttaactaagtttaggttgtgtatagcatgactttggtgtttaagttgctgtatgttctaagggggtttgatttggtaatctggagattgtttgatattggttaaattagtttgaactggaattatgggttgaattgagattgagcaaagtttgagcttaagaactcaaacatagctctctaatggtggaattgg

SEQ ID NO: 148305 - DNA, 1121 bp, Cannabis sativa
ttaactttatgcacttaagcaaggactctatagagagtgttgatttattcaatcaaagtgggggatatatgagatatttgattgattaaataaagtgttagaaggagatatcacaaattttagtctagtggggaatgttatattatttattaaataatataatatttaagattaaaattatgatatattatatatattgttatgaatataatatgattgaatgttatatacatgtaataatcacaatataatgtgattgggagttacatatatgtaataattgtaacataagaggtgaagttattcatattttgtaactttcacatgatcaccaattaagtgtgtaaagagtggttacacaacttaattttttgaaattcaaaactataattcaaatatagttgttggggattgaattttgttatttataatgtgtataagtgatataaaataaagtgagaataatttggaatggtttggagagttgtttgcataaaatgaaaaatttggtaactagtaactagttactgtttctttttcagctttaattcttgaacgtttttcactatggtgatgctttttaacaactcccataccttttaaatcacctatttaattccatttacacccaattaagagatggtaacaaccattgagtgtaggatgtttgaatttcaaagtgtgtggtcctaaacactataaatagagaccttggttcacattttgagacacacttttctcttctatctttcaaacacaaagctagagagttctaagacttgataattcctagaagtatttcgacaaaatcctaagtgtttcatagaggggtaaataattttcttggacaaaggtgtagaaactttgttcaagcttttggtggtccccatcgggtgtttgttcttcttttcttgttttgttctattttctagttttatattgttttcttgttctcctctaaacactcttatttatatatatatatactatcatatatatatttatatcttgactatatagtattatatatattatatatacatattatatacactctctatatgcactttttatatctctactatatatggaagaggtttcaatggttacatttttattgt

SEQ ID NO: 148306 - DNA, 808 bp, Cannabis sativa
aagttgttccacacaccttaagtcaaagaggttacgctcgaacaattgatgatatggtaacaattgacattttgattgattgtattttattttctatttttatattccttgggtatattgtccatcgttgtactttgtagaagaaagataatgaagagggaaaagtatctaggattgaggcttttcagagagcccatactaagaagaatggtgaaccaattaaccccacaacatcggaagtttttgtgagtacttattaattaatttttataattacactagttttctataattctacttcagccttactcatttatatacagggagaattgaataacattatacgtgaagacccaaattctggaattacagaaaatatagaggaggatgccttaacaaaattatttggtgacccaaaatctggtcgtttaatcggacaaggaaggggggggggtaacaagatcaaagttgaatgttattaatatatctaataacaagatctgtaagttgaaagaagagcaacacaatatgaagctcaaaatgacagaaatgttggatttacttaaagaacacttggtaacaattcattctttcacttatacaactcaacatctgtaattttcaaatgaaacatatctttcttttttaatttagggtgataaagcaacaccaagtaagggacaatcccttaatgttacccaatccaataatagtccttctcctaaggtaaattatcaaatttattattggttaaagaaattttttgaaattatggatatgaaaactaatagattatatgtaaaatcaa

SEQ ID NO: 148307 - DNA, 712 bp, Cannabis sativa
  modified_base (228)..(229): a, c, t, g, unknown or other
gaaaaagttagtgtcactgtcaccagaaaaatcacaattaccaaaaaagtcactgaaaaaaccagaagtagatctctcaaatataaacaataatagaattggttttgtaacataatgaataaaaaaataacacaaaataacttaaaccggttataattgaaatataatcggttctgtaacataataaataataacaaataatacaaaataactcaaactagttataannaaaatagaactggttctataatattataatgaataaatataagtaacacaaaataattaaaaccggttataactaaaacagagacggttatataacataatgaatgagtatttttgggatagatatggtatgggtgtaattatttggtgggttggagcatgttgaatgtatatttttgtttgagttattttatttaactagtatttgtgtgtgaatttttatcttagttgctttacggaaccagttcttttgtctcaaattttaaactagttgataaatataacttatttttttatatcatatttgagttattgtgcgttattatttgtgtttatttattttgttatagaaccggctcttttcatattaatgcctcaataatttttagaaatgacccccatgttttttttttaaaaaaaaaattataatcagttttatgaggtattatgtattatgagttattttgttgtggaactagtttta

SEQ ID NO: 148308 - DNA, 550 bp, Cannabis sativa
aaattagtgtatcaaataaagacacgaatatcattcaacatcacaaaataaagtcaaaaacaaaaataaatcccataaaacactgtttacaagaatatatatatatatatataataaatttacttttctattcattcctcttttgataaaatcttaaatttttgaaagaataacaaacggttttttttttaaaagttgtggggtgtatttattaagaaataaaataataagaaaaaaaattaaagatacctattttggtcattttataataggttaaatatgtaattaaatttttgaggtgtagttatagtttgaaggggtgtaaatataacttccctaagcgtataaataaaataatatataaattaaaaaaataatatattaataacagatttgcctttggggacataaaattagaaccatagaaaattaaaataaaaaagtctaaagattttttagaatttttttttgagctttttacatcacatactaaaatttttcacatttttttcttttttaccgtggggcagaattttttcaaaaatactgt

SEQ ID NO: 148309 - DNA, 695 bp, Cannabis sativa
atgagagatgtaaaggtttgtctctaaactatctttgttttgcagatgatgtattgatgttttgtaatggagatttcaaatctatatatcttctactacaaggcttaaagctattttttgaaacttctagattattccctaatgatgccaagtcagttgtattttgtcgtggcatggataaaagtgaggtacaaaggatcctagatacattgggttttgtgagaagtaaaatgcctttctactatttgggtattcttatttgtgctaaatgtttatcagcaactgattgtgaatgactaatagagaagatggtagcccgaatttaaacatggagttctcgctttgtcgagctttttttatggaaaggagtagctattcgtggaggtcctggttatgtttcatggaaccatctttgcagattaaagaaagaaggagggttgggattttgcaaactgatacaatagaaccaggcggctttgggaaaatatgtttgggatgtggcaacaaaacaagacattttgtgggtcaaatgggtgaataatgtttatttaaaagggactaattggtgggattatgaggtagttgctcaaggaagttgctattggcgtcaaatagtaaatgtgaagaacaaaatgaaactttatatgtctgaataccaactaatgcaatgcaaatactgttggaatttattttac

SEQ ID NO: 148310 - DNA, 817 bp, Cannabis sativa
actagcaatggaccttcttgcaccagtttttaaaagctcttgagcagcccaaatgcttctccaaataaagcttggatttggtcccaactcggcattaagaaacgaaccatgcgggtaatatcgtgccttatagattttcgccacaagagtgtcctccatagtaagcaatcaccaaccttgttttcccaaaaaagagagattatagtcccgaaggtcacgaaagccaagaccaccaaaatgtttatgttgacaaagcttcttccaactaacccaactcacacctttgctagatgaatttgattgggatttccaccaaaacttcgccatcatcccttcaaggcttgagcaaatttcttgagttaaaagaaaaacactcattgcataattaggtagcgcttgagccacagacttaatcaacacttcttttccagctttagacaaaaacttagtctcccaactaaaaatcttcttcttcattttttccttcaaaaagccaagaatggcatttttatttcttcccattatacatggaagacccaagtaaaagctatcatctgaagccgcatttaatcgcataagaccacacacatgatcacgaatacccgaggtaacatttttgctaaagaaaacagaggatttagcaaaatttacctgttgactcgaagcaagctcataactatgtaaaagccgcaacacactctgagcctcattgtcattggccttacataacacatagctgtcatccgcaaaaagcatgtgagaaaccataggagcaccccgagcaacacgacaaccagttaaccaatgatgcctctca

SEQ ID NO: 148311 - DNA, 523 bp, Cannabis sativa
  modified_base (482)..(498): a, c, t, g, unknown or other
tatttatgctgacgtggcaatcggtatttgtgcaaataaatttgttgaaggtatttttataaataaaattaattttaggtataatattaaaaaaaccccttatttttatttataatatgattttatttatttcattaaaataaaaaaaataaaaaaatcataaatattaatttctcaaaaaagattttattaaatattttaattaaaaaagtactttattttaagtatataattaatttaagtcaaaaaatagaaagtcataaaaaatgtaactatcattgttatatttttactgtaatgattgaatactcacccatatatcttctttatataaagtgtagctatgtaacataattcttggtttaacaattatttttttaacgtttctttttcttttaataaaaatcaacgggagattaacgtttccgttaattttcatccaccatatatattattaataataaaaaaaagggtaaataccnnnnnnnnnnnnnnnnnttgcaaaagttacagattggaccct

SEQ ID NO: 148312 - DNA, 1550 bp, Cannabis sativa
  modified_base (1130)..(1139): a, c, t, g, unknown or other
ccattttttcaatagctataactattagtttggaaaacaaatttaggtataaaaaatgcataaaaaatcaaatttcccttatactattaaaaaaaaaatatttgtagttgtgctatgaaagaataacagttgtatattagttgtgaaaaaaatttgcgttacatgtttggtaaattataaattttaaaatactatgaatattaagattctaattatattattaaaaatattataatattattaattataatcacaaatatattaaaatttatactatacaaaatttcatttttttatatttttatttatttaattttttccaaaatatgaaaatttatatgcatttgaaaaaaaaaaaattaaaaatactttattttatcacatgtaaaaaaaaatcatagcaaatgctagtatttatcgaaatttttgaaattaatataataagagtttaagaaatagtaaaatacaataataaaagaaatagagatttttatgtggttcagatattaatgagtcttggtccacgagtcagtctattagccttaaaaagcgtatttgatattttaacagtgtatatgcaagaaaccttaatcctgcactcttatttagttacacaatctatcaatgcactgaatttacactaacgtaataatccacgataaggttttcttacttttcttacatttagataagtggagtgtctttttcaaggcattagtaaagtaaactagtatcggatgtatcagctatacattggacttgaccaatattgacagtggaaagaatatcataaattaatgttatatgttttctaattcaatatcacttagttgatcatagatcatttgatctcatctctgagatggttaaacttcagcttagttgtattgcacaagttttttgacttgttcgttactagcttaccgtagaaccaacccaatacttacaaattaggaactcagtattgcagttgagtaggagtgttaatcatatatatggacatttatagcttctataactatttagaagtaaaccgatcgatagttttcttagagcttggcttaatttgataaataataaaggcctcattttagtagttatattagttttctaaaatatcatttacaagnnnnnnnnnnttttaaggataaaatatactgaaggataaaatggtaattttgtccccactcaatgaaaaccgtctatagaggatcaataattgttgtgattaaaataatagataattcatagcatgtctatctttggtatataagcattctatgtaatcagcagtgtaattccgaatatatagtggagttaagaagaattaataagttaggaaatttacttggtaaatttcaagatctacttattaggaacttggttatataggcccatggtcgccatattgtctgggataatatcatcttgtagactcaactaattaacttaataagccaattagaatttgaaaacagactatattttatttgagacttttcatcaagtttgggtaattttgagaaaaaaagagaaatatgggtttattt

SEQ ID NO: 148313 - DNA, 680 bp, Cannabis sativa
gataaatacttgagcttaagtctccattatgggctttaataaataactattaataatcagaacatttattttagaaacaaatacaaacttgtactattcttataaataccactcttttacatattaacagaaatatcattttatgtaatcactacttccacttcgagaaaacaggtaacgtagtaataaaaatatttttgcttatttcataccctccttaaaggaatttcgtcctcgaaatttacttacttgagaataactcggagtaccgattctgcatgtccttctccaactctcatgtcgcttctctataagaattatcactccacaggattttgactaagggtatagtcttatttcataagacctttattgttttttctatcacacgcacagggcgtgccatataactcatgtccagctgtaagttaaagttctcgtatttaagcacatgtgtcggatcaggtatatacttctgtaacatggaaatgtggaaaacattatgcgttactgctaatgtttgcggtagggccaaacagtaagctaccttaccaactctgtccagtgtttgaaaagggcctataaatcttgggcttaactttcccctttttccgaaacgcataatccccttcataggtgataccttcaagaacactaagtcccctacagaaaactcaacc

SEQ ID NO: 148314 - DNA, 593 bp, Cannabis sativa
  modified_base (542)..(542): a, c, t, g, unknown or other
ggtctgaggcaaggtttaggttaaggtttcggtctcaggtagggttcgaggctgggtctgggcccaggtcccggtcccgttcaaagatcttggtccctttcttattcatgtttcgatttttgttcttgagtgtgggtctgggtcttcgtatgtgtccaggtcatggtttgagtttgagtttgggttcgagttctggtctatatgcttgatccagacactgagtactggtcgggtccaagcatcgagtcctggatcccaggttctgaggtgggtactatggccaggtttaggtctggggtcgagtccttcatcctgatccaagttcttagaccaatttctggtcctagttcgggggcccaattcccaggtctgggtcccccatctatgttcaggtcctaggtttcggtccgaatccaagttcgtgttccggttcgggttcgtgttcggtccgagtttacgtcgcgatttgggttagggtccgagtatgggtcacattcccattctatgtctgggctttgagtcccaagtctcagtctggttcntgggtcctgagtttggccccgatgtccaggttcgggtccgagtaccgtgtt

SEQ ID NO: 148315 - DNA, 630 bp, Cannabis sativa
taatatttttagccacagactttttagtcacaacataggaataataatttacactacaagaattgtcacttttaccagcacagttcgctacgatgctggtaaaagtaacttaggcaggttgctaatggatggaggaagattgggcagaatacagtagaagatcctcaaacatctaatgctttcaatgtgttagatgaaatagaggggcacttacaagttgaagggattttgaatgatgaagaatggccgaaagtaggtgatacaagaggagggggagaacctcctcttactcatggatagaatcctaagttagaacgtccggggaatcaatagtctccagaaacaacaagaagtgaagaactttattgagaaacatagaatagggctggttggtctcctcgagacgagagtgaaggctccaaagcttggagccttgtacataagaatgtttaggaattggtgttttacctcgaatattgcttgagctaaagggggaaggatgattgtagcttggaatcctgggagctaccatgtagacattattttttgctctagccagctggttcatcttcgggttactacaatagacaagagaaattgcttctatgtttcctttgtctatggttttaa

SEQ ID NO: 148316 - DNA, 1089 bp, Cannabis sativa
aatgtgcgcgcaaaagtaggtggcgatttttgccggcgcacttctatgcaccgacaaaagtgggaaacgtttaaccattggacacgttgcatcaggatttggcttttgctggcgcatttatgtgccggcaaaaacccttaaaaattttagcggtcaacttcccgcccaaaggaaaatgtgcgtgaaaattttgtgagaacgtttcgtgcgttttcattcaggaaagactttttgcgccgacaaaagctgaaagtaaataaaacctgcagcgaacccttcttccccatttttcctcttctctttctctctctctctaattcccacacccgccgccggcatccccctttgttcccctccaaactccattttcaacctcccaaaacattattttcaaccttcacacttatttctctctttttcttcttttttttttttttttcattttttcgaaaaaaaaaatatttgtaccgagattccgacgaagacgtgtcaccgcacctccgctgcaccaccaccgcacctccgctccggtaacctatattttctctattttagttttatttaatttattttttatttgtgtatatataataatttagtttatttgagtataaagttgtgtttactttttttagtttatagatgtgtgtaattttatatagttttatgtgcatttttataaatttgtgtgtatatgtatatatagatgtgtataatagtttatatatgtgtatttgtatatatatgtaaatgtatatatctgtgtatatgtataaatatgtgtgtatatgtatatatatgtaaaagtatatatgtgtatatgtaattgtatgtaaaagtatatatgtgtatatatacgtatatatatgtatgtaaatgtatgtacatctttgtatatgtatatatatgtaaaaatatatatttgtgtgtatatatatgtgtatatgtaaatgtatatattacatatatgaaatatatatctacataatactatacttttaattttatttagttaatatttatttttttgctaaataggttttaggtattcctttgttcggtgtttggcaaaaattgttgggttttatg

SEQ ID NO: 148317 - DNA, 699 bp, Cannabis sativa
acacttgtaacgatagtatatttaatggagtattaaatttaaataaatagtaatatttagtttatacgtaattttcttcatttttttaagttaatattaaaatttaagtgtctaattggatatcccattaaaaaaccgatctaatcccgttagtaattagactggattagtttggattttgaggtctaattaaattaaatcgaataatgattttttaaatccaattactaattagattcgattagataaagaaaaaaaaaataaaattggatcagatgaccacccctatctattaccttttaacttttaaaaaaaatatatttcccataagttaactttttgaaagaaaaaaaatcttgattttaaagacattgtatataagcccataaaatatataatttaattccaattaaatttggcctaaagacacaattttagttcaaaagtatttaaaatttttgagttggtaagcaatataaatttaataatattttttagcgatataaaaactaatatttgtaaaactgtaattatagaacataaaagacccagattataaatcatagaatttaaacggaaacagataatattagttacttttaaatttcttttaataaattcaaaatagaattataaaaaaaatttaagtaccactaaaaatattattaaaatatatatgctagttacaaactcaaaact

SEQ ID NO: 148318 - DNA, 810 bp, Cannabis sativa
  modified_base (31)..(60): a, c, t, g, unknown or other
gtgggagcgctaaacatagatatgaaatctnnnnnnnnnnnnnnnnnnnnnnnnnnnnnngatgatttccttcgagcttggctcttctccgaattggattgaattggaaaattcaaaatttgtacttatacgcattggatgttgattgacatgtaaaagtaaccaatccaatccaatccacacattttaaaaaaaaaagttatatatataaataatattttaatgtaaataaaatagtaatttaaagtctaatggatataatacaattatttcaaaacttaatatatcaaatgtatattctattcatatatataattttttttttctagatacatcaacattaacatttttacattaatcttctctcttaattttattacacatataccacatgcacatcaaattcatgcacctatcaaccatcaatcaactctcaatcacttccctttcttttttttttcatttgattttttcatttctattcagtttttttttttttgaatcagatcaagtaacctccattgttgaaccataactccccacgattcctcaacaatttttccttctcatttttgttcttcaaaattttttcaactcccacttaaccaatcccatatctgttttccctctttccttttgttttcaatctctatttaaaatgattgtgacccgttcatcctcatctccttcccctgctcagaaaaaaaaaatccaaaattggtttgaaatcactagctaataaagctaagggaaaacatcctattatttgaggaggtagattctgattttgctcctccattaacgaagcgt

SEQ ID NO: 148319 - DNA, 533 bp, Cannabis sativa
ttgccatattttttgttgttttttattggggaattctttgttacaataaaaaaaaaaaattaaatgtgacaagaatagaagatgatgatggtgtaatattagacaatgctttttttttattttgttgcttttttttatttattttaaatattatagatcggcttgtataaaaatgaaaagaaaaatataaaaaaatgtaaagtgaaggaaaaaaatactatttttctttcacatttatgctatttttgggaaagaaaaaatacttttaatattttgataaattgcaaccctattttttttttggaaaatttgaatttctatgcatgcattagtaaataattttttccctaaattaatacatttttacattgaaaatatatgatcactttttcaaaattccaaaaatactcttcttaaaaactcaaaccctttctctctccttccctcaaattctctctgtctctttgtttcttcgcccaaaaccccatcgcaggaaatcgcccccaaccctcaaccatcatcacccacccacc

SEQ ID NO: 148320 - DNA, 503 bp, Cannabis sativa
  modified_base (145)..(146): a, c, t, g, unknown or other
aggacaaacgtcgtcctgctcctcaatctcctggacctcagcgtccccttcatgatccccctcctcctggacggttggatcctgttcggcgctaggtaaggtaccatgccgagccacttgaggatcagacgcgtcggccatacgnnttgttttcttggtacgagccatcattctatggatggataaaagatttgaaggagaatattgttctggaagaaagtgggctagaacagagacgaggatggtcctcgtgcaaaagttgaagcaagtcctggtcgattcgatgttcgctctctcaaaattcacccgggttcatctacaaaagacaacacgcaagatgagtgtttgggtagaatatcgagcgataaacaaggaaatatgccgaccaggagtactcaacagattaaagaataagaatgttcaaagaaaagtcaaaactcaggaagtttgaaatttcctcgagttagggcaaaaattttatgatgcttagaataagcaagatg

SEQ ID NO: 148321 - DNA, 1183 bp, Cannabis sativa
ttgaataataccactgaacaagaagaatttgattctgaaatctgtgaagagtctcttcctgaatcatacaaagtcatgtatgaaaagtggattcaaattacttctgaaaataaagtgttgattaaaatgaataaaaaacggtctcatcaaattgaaacttttgagttaaaaataaaagaatatgagacagatttttgtgttaaagatgaaaaaatcactctttaaagaagggtcttgaaaattttaagaaaaatatccaaatacttaatctcggatcttctatttttgaagaagcttagaatgcaggtcaaagaggctttgctggcattggatcaaattgtatggaaagttctggaatcacaaaatttgtaaaatctagtgttccaacgaattttcctgatgttgcaaatttgaagtttgctgcaacagattcaaaacctgtcgttgcagaagctgtttctgctgacacaaagtctccaggatttgtaaaaaagagtaagatctaaggtaaaaagatttgtacccacttgtcatttttgtgttagaaaaggacatatcagacctaaatatttcactatgcaaaatatgtttaaaacaaattattttggtaatttggaaaaatctcaaaagaaacataaatgtatgaaacaaaaatggattaagaaaaagtgtctagctggtttttctgataaaagtgctgcatctcaaatgtagtattttgatagtggttacttcataaatatgacaggtgacaaggattttttgattaacatccgacctatgcagtgtggggaagtcactttatgcaatgggctagctggaaaagttgttggtatgagaactctcaattttgaagggttgcccagattgaaaaaagtgatgttcgtgttttcattggatattccttaaacagtagagcttatcgtgtttacaacatgagaactcgaactgttttggaattagctaatgtggttgttgatgattttaagatttttttagaattttccacagagagaggtcttcgggagaagacttgttcaagccttacttcaagagaaagtaagcacgcacacttcaaagacgaagcgagttcgctgtttaaaggtgtttttgaagtcaaattcgtaaagtgcattacaaaggactgcggtaataatttagagggagtctaaacttgtttaag

SEQ ID NO: 148322 - DNA, 575 bp, Cannabis sativa
  modified_base (480)..(480): a, c, t, g, unknown or other
gttgagtgtcaggtcagtaccacgtggtaatctgtctttggtccaagtcatttaattttattttttatttaaaaacttctatttaaaagagtaaaaatcatttaaaatacttataataataataaattcaaaatgaaaaaaaaaaacaaaacaaaacaaacctaaatcatttttcaaaaacaaaatctaaatctaaaataatagaaaagtaaaaattaaaaaattattataaattcttatgtataattttacaaatgagagaacacatttttcttcttttctaatcttgtctcatgctaaaatttttacttaggtattactctgtaattagaagataaattttagtatttacgctacaaactactatatatatatattaaaaaacgaaagagttacattatatattattaatggctcatttggtatgtcgtattgtattgtattgtattgagttagattgtattgtattgtattagtatnatttaatacaatattatatttagtattggcttgtagtaatagattgtataaagttataatatattttcaatacactcgaccccaacactaactac

SEQ ID NO: 148323 - DNA, 609 bp, Cannabis sativa
  modified_base (215)..(217): a, c, t, g, unknown or other
gatccatttcagcagatcagtaagagtagttgctgttgtgtgccatccgaaccattccttcacctgtttaaatatacacaatttcttaatgaataaatcagctaacaaaatttaaataaatatatttttcatgaatataaatttgaagatattatatacttataaaaaaatactaatatttattagggcgaacgattttgtgcccagaagtgtgnnncacggattggaatccgttgtacggcaggtaggtcccacgttataattggttttttttataattatttaattaagttgggaaccggttattctaggtttgtttaccggttgtatagttatttttttaattaaaaaataaaaaggtaaaaataatttactgtttacgttagttaatgtacgaaaaagtacaacagctttactgttcgtggcagttactgttcgtggcagttaatagtacaaatatactgtaggcagtgggtccatgttgttggagtgggcttattttgctattttcattccttcatatcatgtatgtaattttgggattgtagttgagcacattatatcacgtaccttgtacattaattgtttctgcatgctgtttagtaaaat

SEQ ID NO: 148324 - DNA, 561 bp, Cannabis sativa
taggatgttaatcaaaaatacttgttggtaatctatacttgttggtaatctagatcctggtaaaataatttccaacaattaattgaattgaccttgctgaataatttagttgctaggtggcacaagactaggctgccacctaactctcatttaacacaaagaccaaaatgccctccaagctataacttaggtatttctcaaaactagaggtaaaatggtcaaactccataaccccgctttaccccgatattttattttctccaaaatatttcccactaagaaataaggttctaaacatacccatgtgatcaaactaaccatcgattgcattttccattttcgccgagcaaaaattacaaaaatatcatatttcacatataagtcaaataataatcctagagtttaataaaatctccggaatggagaaattataaatctaatgcccgtttctcacaatggggaccacagatagttaagttcataaataattataaaaatgtcagaaattagtgctaattgtgtttactaatcccaattactaaagcagtcattacaattatc

SEQ ID NO: 148325 - DNA, 611 bp, Cannabis sativa
  modified_base (26)..(29): a, c, t, g, unknown or other
ttaaggaaagttgtcttgacatccannnnccaaatttcataatcaaaagcggctgctatggaaagaagtattctgatagatttgagcatgttaactggactaaaagtaccctcatagtccacaccttctctttgggtataaccctttgctacaagtctagctttaaaagttttgacttctccaccgacacttcttttcttcttgtagacccatttacatccaattggatgataatcattaggtgcatctacatattcctagactttatttttcttcatggaatccatttccaaatccatgccggttgaccattgtttctgttctagacttgccattgcctatttaaaggttaatggatcgtcatcaataccgtcaccaacaattatattgatttcatcatccaatccataacaagatgtttttgtagaaaccctcccactatgatgaggagttgtgatcttctgaataagaacattagtggtagtttcctcggttgtgtcaacttgcattagttcaaccgagggagtgagattatcctctatttgagtagaagacgatggaacatttgttggagttaattttgaaatcatttcctccaatactactttgct

SEQ ID NO: 148326 - DNA, 990 bp, Cannabis sativa
gttaatttataggggaataattagcatttttgctccctgaacatttgacactacctgatcttgccccctaaaatatacaacttgtaaaaaattctccttaaaatatatcagttacataattatgccccttctgttagattttgattcatttaccgttaaaaattagcatttttcccctgaacattgaccaatacaaaattctaccccctttattaaaaatttaattttaaaaattataatattctactacttctgaaaaaaatcaataaaaattattgaaagatttgataaaaaatattaaattaatataaaaaaatattaagtttacttaaaaaaacctacattattcataaaaaaaataattaaaattttattttatttataaacatatatcttaaaaaataacacaaaatgattgaaaatacaataaattattcaaacaaactaagattttttgaaaaaaaataatcaaacttatttatatttataaactcatatcataaaaaataaaaaaaaatataaaatataaaattattttaaaaaaattacaaattaaactaaaaaaaatattatatttgcttaaacaaattcatatattcttctttagttattactacaaaaaaaaaatgatttttttaatatattcttttatatcaaaatagattttttaataaaaataaataattttttaaatcgctaaattagttttaaaattttaatttcttttttaattttcttaataattcaaaatattttttttaacatttaaattaattttttaagatttactaaaaaaaataatgaaattttctcatttttatttagaggaagtacaatttaatagttgtcaaagtttaggaaccaaagttactaatttacaaagacacgtcaacatttaaaggaaataatgtgacgaaacctaacaaaaggactaaatttcgataaatgtaaaagtttatggagaattcttaacaagtcctatattttagg

SEQ ID NO: 148327 - DNA, 733 bp, Cannabis sativa
ggtttggggtttggggtttggggtttaggcttagggtttacggttggggctggagttggttggttggggtgggtttgtttaggggttagaggttagggtttggggtaggggttgatgatcaggggtttaggggtcagggttcagggttcagggtttagggtttagggaaataggaatgagaattgaataaaataaaatttaaaatacataaaaaatttgataaaatcattaatttttttctcatgttacataattcttgtcgttccttccatttcgaaatagaatattcattccaccaaaatggtggaaagggcattctattggacattctaatactttaaggtggcgtttggttacaaaataaaaatagaataggaatgggaatggtaataggaataggaatagaatggcatggaatttctattcttctatttggtaaagactatggactcaataaccgaataagaattgtgatgattggtatagtatagaatgaaatagaatttttattattttgaccaaaatgtcctttactcttttaaaataatttttgtttcataaaattatcattatggtacaaataaaaaaaaaggatatatatttatgtatcactctcaaatgacaaattatatgtttttagatctaataatcaaataataaaatataaataaatatttaatttaatagtctattttatattaaatatttaagtatcaacataaatgttattcat

SEQ ID NO: 148328 - DNA, 717 bp, Cannabis sativa
gcagatatgtgaagtcgattccacatgtcaccagtatgcgatgccacatcagagtgccaaaattaggataacattttccccccacgtctgtacgggacttccagagttgtatgtagacttcatccgagctgcctttgtgtttgaatgggtgacacgtgttaggcgcgtctgttcgtgattcgatgtgaggctgaccaggcgtctcctctgttttcggctaattaatgctttgacttaatagttgaagtgagctttgttggttggtatccctagaggaacatctagtcaccatactcttttcgaaacaagttagggtttgctttgggaacccttaccctgtcacttctagctttctttgggaaggagaaaggcgtcctacaaccctcatctaataaaggatgttcattgatctcaacaggccccctgttgaccttggcagttgacaaggattacagtcggaggccaaatcagtgtgtctcctactaattccctcgttccaagagggtttggtgtgggtgaagtttttgtccccctcctaccttttgttgccttcctacctctctgagcttgagaagtttttattgccttagttcccttcgcggagataaccatcactaaggcgacagtgggcaagaaaatagcaatggaaccaatcaagatacattcatggccccattccttttggatcgttatgggggagccaatctttgttggcct

SEQ ID NO: 148329 - DNA, 1069 bp, Cannabis sativa
agtgtgagtcatgttcaatgttctggtcttaatttaggtcttttttcgggtcttgagtcctggttcgggtttggatttagattttggacccaatcctagagtggctctttgaccgagtctgggtcttggttcggttacagttttggctctatgttcatgtcttggtcattgtttattcttcggtcctaatccgcttctagttccgattccagtttcaagtcacgggctacgggttttggtcgagtttcgatccgactctgggttcgggtcttgatttgagtctgatgcaaggttcagtttcgagtttcagtctctggtaggcttcgaggctgggtctgggtccaggtcctggtcctggtcccagtcccgttcaaagatcttggtcccgttctaattcatgtttcggtttttgttcccgagtgtgggtctgggtctttgtatgtgtttgggtcttagtttgagtttgagtttgggttcgggttctggtctatgtccttgatctagacactgagtagtggtcgggtccaagcattgatcccggatcccaggtcccgacgtgggtcctatgtccaggtttgggtctagggttgggtcctcgatcccgatcaaagttctgagaccaatttctggtcctagttcaggggcccaattcccaggtttgtgtcccccatctatgttcaggtcctaggtcccgttctgggtccaagttcgtgttccggttcgatccgagtttaggtcgtggttttggttagggtccgagttcgcatcccaatcctagtctttgtctgggtttcgggtcccaggtttgagtctggttcttgagtcttgggttcggccccggtgtccaggttcgggtcggagtgccgtgttccgatttgggtctgggtttgggtttaggtctgattcctggtctgagtctgggtctgagtctgggtccaggtccggatcctggtctgtgtctgggttgaggtccaggttcgagttcgggtcccaggtgcggttccaggtctgggtctaggtcagggtctcgttacagatctagcttccgagtttcgatcctgttctgggt

SEQ ID NO: 148330 - DNA, 1126 bp, Cannabis sativa
  modified_base (1061)..(1065): a, c, t, g, unknown or other
aagccgacaagagatccaggaaaaaggttgcgcaagctgatgaggtcacgaattctactaaagaacccaaaaagagtaagactaaggcctacatgaggaaatccccgaaccagcttatcattgatgttgataaatttcttgaagctgggaatgaggtctctactgcagggaacgaggtctctactgcagggattgtcgaggtgcatcctatcgagttagcacgccaggtcgagttctctggttcttgtccagagatggttctcctcgagccctactttcccctataaaatgtagactcggtcttgtatttatttattttttttaggaaaatggcctaatggttggccccttgtggcattcttgtaaagacaagtttgcaaagttagtttgccaacttaacttttatttatcttaaatgcctcgtatcttcacattcaaacttaattatttatgtttgcttgcgtttttacccacaatgtaaacaattaaatgttgatcaaatgcagaatactcttggtctttccattgctcgtatttttcctatctaagtagctaataatctactatgtgcgcgagcagtttattatcttctaggcttttgatttgcgagcagttatcaattctaccttgcaataacagttataatctatcttaagcaatcttgaatatactcttaatgatcttatcactttgtacatttttgattgcttacatgaatagttatattatctattcatacattaggtttaagtacttttatcaagacaccttgatgtctcattaatacttcctacatcgtgcgagccgttaatattcaacttcacacgcgagtcatgagttatatctcatttataacttttgattttcctttctcgtcaaacaaatttttaatgaaaaagttacaatggtttgatccatctctcgtctgaaaggtttgatcaaaaaactttaaaaaaatttcaaaaaaaaagtcatgggtttgcactatatcatgtatttctggataaattccggtttatcatacacctatgccccttaagtaattttaaagagtaacactnnnnnataacttgaaaaaagaaatgattaactttattcataacagaagttcaaaatattacatcag

SEQ ID NO: 148331 - DNA, 1034 bp, Cannabis sativa
  modified_base (330)..(333): a, c, t, g, unknown or other
caatgtgtttgcttctcttgtggctttgaggctctttactgttggcttctctgatgatgtggtactgttctcacaaagtaaaacgagtattttttccattctaggaacaacaccaagttctgtaaagaactttcttagctagaccaattctttagcagcctcagcgacaactatgcctccatggtagagtctgatattgcagattgcttgatacttctccaaacaactactccacccccaagagtaaataccatcttagatatagactttctatcatcaagacaagcctggaaatctgagttagcatagcctacgggatttaaagcaccnnnnttgtagactaacacataatgccttatacttttcaaatattttagaatatgcttaactgcagtccaatgttcctctcctgggtttatttgatacatgttcacaattcctagtgcatagtaaatgtcttgtctagtgcacaacataacatacattagacttctaactactgaagcataaggaacctttctcatgtcttctatcttttgggattcagtgggacattgttccttagatagacggataccaggtttagaaggcataactacccctctggtgtcagtcattgagaatcgctctagcaccttatcaatgtaagctgcttgcgagagagtaagtgatctgttcttttggtttctaatgatttgaataccaagaacataaccagcttcacccaaatctttcatttcgaattgagtgttaagtcattctttaatgtcagtcattatcttgatattgttaccaataatcaaaatgttatcaacataaaggactatgaatactaccacttgattatccttgagttggtaaacacaaggttcatcctcattttggtgaaagccgtaggttttgattatttcatcaaatcttttgttccatgaatgagaaacctgcttaagtccataaatggacctatttaggttaaaaactttctcttcctgtcctggaagcttataacattctggttgctccatgtagatggt

SEQ ID NO: 148332 - DNA, 545 bp, Cannabis sativa
ttatgatcaaacagataagattttgggatatttttaattatatacgtatatttgtaaataattataaaaatatctttaatctaaataatctcctatgaaataccgctggtgctgctgtgcttatgccgaaatcaatgtttatgccgaaatcaatgtttggcaatttgattctcaattgttttgttttttttttttgtttttctttaattctttcttataatttctataatttccatcgtttcttttctctctttctttctctctcttattctttcttttcttttctaaaaattgtctctctttcctcaaattacactttgtactttttattcttattatttttattttattttttaagaaatatgaaaaataataccaccatgttctactttttaaaatatgaaaaatataattttcttatgtacggagaaatatgaccaacattaaaaacaactttttagtttctttaataatttatttacgaacaagtaaccaaattataaatttaaaaaaaaaaattaaaattcaaattaaagttaatccta

SEQ ID NO: 148333 - DNA, 1717 bp, Cannabis sativa
tgacactatatagcctactatgatatgttcaagataggaactttatttagaataaaactaaaaaaagttaatctaaacattcatatggatagtagtaacttatcagaattatgaggataagataggaaatttttgcaatgtctattcgactaactcaagcaaaattcttaatccttatgaaaagttttatggtatctctatattgattacttaatcttaagaaagaattttacattaatgttaatactagaatgctatgttgatgacttagtctagaaggaacttaatgtttccagactaagataaaatgtcacaacaagaggtccctaagaaccaatggtaagaggttaaatgcatacttgtgtaaaaatttaaccagactcctactgttgagtgggagctgtcaaagatgtaatcaaacaaggaacattgagagacaatcaagaaagaatctctaaaagtgacctatatgttatatgggtgtatgttagaatctttttatctacaccaactcagaatttaattttagagatggtggttactctgggggtggagggattattctataagagtgtaaaaactaatctgtaataatttagttccaccagtgaagctaaataacttagttgttttacgaaaagtactagaagttattcaaactaaagaaaattattaactgtttttatctctattccattttgaatagaattaaagatgtgtcttctatgtaataattatgtaaagtttataaagtttcatagttaatattaaagttttaatttgacacaacttttaagaaaattctttgattagcaaagatagcattgcaattgaaaaatcactgtagcgtgtcttagcattagggcattacaattttggtatcagagccgccaggtttgtctaccgaagctcgccaagacatttacaatcatcatcaaagaaagtttggttcacggttcaataaacccgtacttgtttagtattatatgtgattattaaagcatgttaggaagcatattagtttataattgtttattttatgcgttgccttgaaatctacaagagcggtattaagtttgtttgatcgctgtctaacctacatggcttatgggttcatagactacgtcctatgaaatggacgcccagcgaaatacaagaagtcagggtaatagggtcgagaccggaggcggtcaaggaaataaaattccttagaatccttgtggtcacggtagagaccggcagggttattacaaccattagcccttcctgagtggaagtgggaggagattgcaatggatttcgtggttggtttgcctggaaccacgggaatgtattattcggtatgggtcatagtggacagattcacaaagtcagctcattttctgccagtgaagactacctacacagtggatcagtatgttgaactatatgtaaaggagatagttcgtctccatggagctcctaaatccattgtttcagatagggatccaaagtttacatcaaaattttgggtgagtcttcaaagggctatgggtacaaagctaaaatgtagtacaacttttaaccctcagactgatgggcaatgaaagagaactattcagatactagaaaatttactgtgagcctgtgtcatggactttaagggttcatggagtaagtacttacctttaattgaattctcctacaacaatagtataatatccagtttatatacata

SEQ ID NO: 148334 - DNA, 693 bp, Cannabis sativa
aaaaattacttttatactgccttagaattttttttttcttttatactgtagacaccaaatatcaagaacaatgcctccatcttccacacccatgcacagaaccacccgacacagaatcaccacagcaatacgagaatacctgaaaacaaccattaattccggcaagatggaacaaaatagagaaatcgacatcaaataaataatcatagcaaaacacctgtaaatgtaaaacaaaaaacaacattaaaacaaatcaaaaatcaaagatcaaagaaaaaaaaaaacaaaaagaaaaaaggattaaaaaaaattatcttctacgcatcctcaacaccagatgctatagtgactatatttgcaaggccaatcttggaaaattagaataaaaaaaccactaaaacaaaactaaagcaacacaaaaacaaatgtaaaacaatgaagtagatataaccacttaaaaaaacataaaagaactacacccctcaaaactcttttgccaatgagctcgtcaaatgtatttataggaaaatcagaataaaaaaacataaaaacaaccgtagaaaaagaagaagaaaggtatttgttgacttcgcttttagccaacgacaatgagtcttttttataagcgataaacgatatgtagtaacagatatatgataaagcaataataagacactggaattttatagaggt

SEQ ID NO: 148335 - DNA, 545 bp, Cannabis sativa
atcatatgtggtactatattaccactactactattattatgatttattatataacaatgtcatccaatcttatacttctaactattataataccgtaatttaatttaaatgattactaccattcataacacttttatttctaaaactatccaagcttgtaaatttatttttttttagaaataccactttttaataaattgaagaaaattagcttattctatgaaattactatctccacctcgagataactatactaacataatagaaaacaatattaaaatattttggttattacaattttctactttgacgttgtaaaactttaccattattggtaatcttagttttttacaaccatcgaataggggtttatcagcatcacttagaaaattatcaaattttccaggatcattaagaaattcctcatgtgcttcatttagcaagtccaatggatggtcatcgaaatcattaccctcgatatcatctacccccgctttcctaatggatatggatcagcagctaaatgttcgccatgccaataccaa

SEQ ID NO: 148336 - DNA, 1072 bp, Cannabis sativa
ggactcaaacctagaaccgaactcgaacctagccccagaaccaaactgagaccgaaactcgggccagacacagttgtgtacccaaaccaggaccgagacttggacccagacctatacttgggacttgatcctagacccagacttaaagctagatagggatttggatacgaacctagactcgaacccagacccagacctagaccaggatcgaaacttgggacctagatccggattgagaccctgacccagacctagacctggaccaacacccgggacctgaactcggacctggacccgaaccaagacccagactgtgatccgggcctggacccagacccggacccagactcaaaccaggactcagacccagacccaaacctgaacccaaacaccgaatcgaaatcaaaactgggactaggacccaaacccaaacatggacccagactgagacctaggacacggacctgaacctacgcctcgcaacccagacccaaatcagaactggagactcaaacccgaacctggaccaagactcgaacccaaatcaggacccagaccgagatcggaacctaaacccaggactcgaacaccaggagttgaaaaccccaaccggctcttagactcggaccgggacctaggacctggacccagatgagggacctggactcgagaaacgggcatcagaacttggaccgagacccaagacccaatcccggacccggacccttatcttgtactcggactaggacctgggactcgaagtggaactgactgggacccggggcttggacatgactcatagtcagtgtttggatttgggacccatactcggactcaaactcagacccagacttggacctagaactaaacccaaacccagacccgtaccccagacctaggtccaagtctgagtctaggtttgagtccgggaactagaatttgaataggacccagacccaaacccggaccgagacacgaactcaaataaaaactcagatcgggactcgggacacaaactcgaacccagacgtggacttggacccagacacgaacccaggacccagaccgggat

SEQ ID NO: 148337 - DNA, 715 bp, Cannabis sativa
  modified_base (418)..(434): a, c, t, g, unknown or other
acatttgttacgggcggaacgacagtgttgggaatgccctgattagctgctgaactggtatttccagtctcttgcacaccaggcgcgattccactcacaagagtcgtcatgacgtgacctacaattgatggttgttcaggatttatggttggtggaacccttgtgttctctgggttctgcaatgcaggatccaccgtgtgtggatttgccggatcaaccacgcctctgcgagtctgtaccaccattgtatttgtgattagatttgagaacgatcttgagttcaactctcaatgaaagtaccaaaatgttgacctcgcttttggccaacgacagtgagtctagattgtaagctacaagtagtgtaatgtgtatgtaatataatcaagtaaatagagacacaagaattttatagaggttnnnnnnnnnnnnnnnnngtaatagcctaatcctcttagtttgtattgacttaagaacaaggaatataatcccttttcttagagctcttacaatagtatctctgaatatgaattcttagacaagtttttcgacctttgcccagtgagtatgaatcactatttatagggctataagcttgagagggaagaattttccttctgaatacaattgatatatttggaaagattgcatattaaatacagaatacactaatcaagggattcggacaacttgccatatctctgtgatctgatccaaa

SEQ ID NO: 148338 - DNA, 1491 bp, Cannabis sativa
gttcaatcgaccattttatcaatcttctaaaagcatctggttttgataaaacttgtctcaaaggttgatcggttaacacttttatggggtgagcctggaagtatggcctagcttacgagacgcattgactaggcacaacgcgaagagggggatatatggattctacccctagtaacctcttacttacgtagtaaataggttgttggtgcttgccctcttctcgcactatagttacacaaatcgcatctttcgagatggctaaatagagaaacaacgtctctccagttattggtttcgatgaaattggaggcgttgtgatatatcttttcatgttctgaaaggcgtcatcgcactcttttgtccactcgaacttcttgtttcctcgcaatatgttgaataatggcacacacttatcagttgacatcgaaatgaatctgttaagtgcaaccattcttcctgtcaaggcttgtacctccttaggctttgtcagtgaaggaatgtctattaatgccttgatcttttatggatttgcctcaattcctctcgcattaactatgaatcccaaaaactttcccaaggagactccaaaggaacatttttttaggtttagcttcatgttatacttctttaatatttcaaagcattctgtgaggtctgaggtatgatccttacttcttatccattttactaacatatcatcgacgtaaacctcattttgccctatttggtttgcgaacatttcatttaccaatcgctgatacgttgccccaacgttcttcagtcagaacagcatgactttaaaacaaaagagtccaatgttggttacgaagcttgtatgttcttgatctgggacatacatttttatctggttatatccagaatatgcgtccataaatgacataagcttgtgcctagcaattgcatccactaattggccgatcctggaaagtggaaaacagtcttttgggcacgccttatttagatcggagaagtcaataaaagttctccaagttccgttggactttgggacaagaataggattggctatccacgagggataaagcacctcacgtataaagttgttggctaacaacttgtcaacctcctgttttagtgctgattgcctctcagaatctaagggcctcattttctgtctctttgccgggtagtttggatcattatttaattgatggtacataatcttagggtcgatccctatcatatcctcgtgagttgaggcgaattgatcctggtttgccttcaaaaagcttagtagttgctatttgagcttctcgtctaggttcttcctaatgtatacacattttatgagatttcctgggtcgagaataacctcttccaattcttcgattggttttagtaggtttctttcatcttgaactcaaggatcaagatcttcatctttcttctccttttcttttgccaagatcgtcatcaacatatgactagctttttgttgggaattattttacc

SEQ ID NO: 148339 - DNA, 538 bp, Cannabis sativa
gttgcactgatttcgaacctaggtatttcctttctcccatttcatcccaatgaatagcagatttgcacttcctgccatataacatctcgtaaggagctatccctacagtactattataactgttgttgttgtacaaaaactatatcagtggcaggtacttgctctagaagccttcaaaatccattaaacaggcttgtaacatatcttctagtatctaaattgttctttcggactgtccatcagtctgaggatggaaagttgtactgaacttcagtttggtacccatagcccgctgaagactctgccagaattttaaagtaaacttcagatctctatctgatataatggacttcggagcgtcatgtaacctcattatctctttcatgtataactcagcatactgattcatagtaaaggttgtttttaccggcagaaaatgtgcagactttgtaaatcgatctaccacaacccaaattgaattgcacattctcgtggttctaggtaacctaaccaaaaaatccatagtgacatcctccca

SEQ ID NO: 148340 - DNA, 674 bp, Cannabis sativa
tctcaaacactttggcaacactttgtcacaatacactttaatgctttcttctagcattggtctcacaattgatatcacctctctctattatatttttgttacaaaacaacacatatattcattaataatgtaaaagttaaaaaaaatcacaaaataagaaaattacattacctaaatcttctattatatatatatatatatattagattaatgttacgtgtaatgcatgtataattatttttctttttaattaggtttaattaggtgatgttaagtataatatatgtatgtttatttttttttttaataaataatgtatttcttttttaatttttaaaataagatttgagattttaatttttgatttttttttttgttaactattgcgggaacattaattagtctatatatgcctcctattaattattagtacttcatataatcatgatatatcaaatttgacttaccttacaaatatagtttgacttaaaatactttccattttgatattagaaaataatttatataaattatatttctagatcatgtgcctttaaaaatcatgtgaaatgtgttgattgataaaatcataaaaattattaagtttcatttcacttatatattgatcgaaaaaaataaataatataaacacactaaatataaccagaagacta

SEQ ID NO: 148341 - DNA, 966 bp, Cannabis sativa
  modified_base (302)..(319): a, c, t, g, unknown or other
agttctcttggcttttcttcttagttccttattcttactatccattacttatttgaactaacaatggattttaatcacaagtgtcttcaagtcaaagcagggtgagttccttaaaactctcccactacgacaaggtactgtgactttctgtttagtaacattaatggtattgtcctcatcggttgtgtcaagacaatagaggcagtgggaccatcttatagaataagatgatagaacactatggaattgaatatatctcctctactttgctactttcttttcagatttagtcatattcttannnnnnnnnnnnnnnnnnaaacaaacactttcttatcttaatcaacttaattattaattcttatttagtatctaagaaaaatattcctatttaagtgggtctaaaattaataaaattaatttttaacttaaatatattttctttatttaattaaatttcttgaaagagaaataaataattaagtgtcttgaaaaaaaaaatcaacttaattattaattctaatttaagtgcttaaaaaaatattttaatttaagttcgtctaaaattaattaacaaactaattttcaacttaaatatatttttctacttaattaactaattaagtattagaaaatatagattagatactaaaaaccactatctagaatcttttctttaaactaaatgtatttttctaaattaattttaaaataatctaatgaaaaattaattctatttatttcaaaattaattatgttactaatttaatttttaattaggataaactagtataattagtctaatacaattatttaaataagacaaatgacccttcacagttggagttggtcatgtgaggaaggacaaagttgagtatgtcgtacctaaaactattggtcacctaactctcacacaagttccaaaagagagaaatttaacctttcattaaataattattattcatt

SEQ ID NO: 148342 - DNA, 600 bp, Cannabis sativa
  modified_base (99)..(99): a, c, t, g, unknown or other
taagttgattttagaaatattggggtattttagggtactcgaagttggccaaataccctaaaaatagagatttcttaatggctaaaaaataataagatnactattaataataaaatttttattggtattattattaatattatattaatattatattattgttattatatatatatataaaacgaaacatcagtttcgttttcttttaaaatatatatatatatattaagttttaagttaacagtagtgaagaacgaaggaacgaacgaacgaaccctcgttctccttttttcgataaaattttctccccctatatttatttttcatgattttcaatccaaaacttagcgatctaagctccagtagtagcaggatagcaaatccttgaagaggaaaagcttaaggtatggtttaattttgttttaagtttaaaaacaattagtttcatatagggattttgtgaattagaatagttatggagattctgactgtagaattgttctttggtacgtatgggactagtatcgatgtttacttgttgaatttgaggtgattttgagttagaaattgagttttcaactttttaaagcttagtccgaa

SEQ ID NO: 148343 - DNA, 883 bp, Cannabis sativa
aacgtaactaagaatttcaaaaaaaataaaagaaaaatgaaaagaagatgaagaagaagaactgaacaagaaaaaaaaaaaaataatttatatgttaatggagaaaaatagggagaacttgaggaagtagagagtgaaaaaaaaggaaaaagatgatgaatagtaagacaaaataattgggaagtgagattaaatgaaagaaatagctaggtattaatttagggtatcatatttttatcatcaattttaattaaaagaaaattaaaaaaaaaatatatgtcactaaagtgacaacacaagtcacatcacacttttatattatttaaaatataatataattttaattaaaagaaaataaataaaaaaatctaccactcccacatgttttttacttttgtttagtttatatatatataatatgtggataatcaattgtgaaaagtaacaaaaaaaaaacagtacacatatatagtatagaaaaaaaaaaagtaaaagtgtaatatttcccttacaacagtaaaattgaaataaaataggaaaaaacagtatgtggtgtaaatttcccatctttttcgctactggagcttgcaaaccaatagccaagattggatcatcttcacgatcttgagattcaaggattgaagggggtttcgatctagtcatgggcttttagatcactttccttttcttcgccatgggagaaataaaacgagaacacacacctctaaatatttattatttctctgctattttttgattgtttaagtttctagttttttgttgaattaaattgtttaggggctttttcatttttacacctcaaaacagtttttttttttttgcatttttacgaaattctgcatagaaacccctattgcaacta

SEQ ID NO: 148344 - DNA, 645 bp, Cannabis sativa
gcattaaacttcctacagctttctcatatatattattaaattggttgccgaaaacctcggtcaacagttgtaataagaaattgattgttttctattttaattatagtaaactgattcacacaccatatttttcataaagtttgcgaatagaaaacttttatatcaaatttacgaattcaacttatatatagacacacttgaatttagttatatgagttttggttaagaatatagtaaattattagatacgttacttaattaaaaaaaatttaaaatttttaaaaatacgtatatatatataatcatattcaaatgacacactaatgtaacaatagttagctaattttatttttaaaagattaaaatctataactctattttaaaaattaaaaaaaaatacattacctaactaaaaaaaattaaacatacatgtattgcacttcacatcacctaattgaacctaattaaaaagaaaactaattataacgtaacatcaacctagtatatataaatatatagatagttcaaaaacttgtaagggattgaaaagttcaaggacacaataatacatagggtgattctacaattcacccatttaaaagggatgtactgatgcaccccctatttgtttcggtatctagaaaa

SEQ ID NO: 148345 - DNA, 677 bp, Cannabis sativa
gaactgaaaatctcaataagagctcattattcattttttttttaaaaataaaactaatcaaacaaacatttaaaatttcaaaagggtgatattagggatttacgaagtcttattattcggcctataatacattttaccactataaagaaaaaatctcgttcagtgattgggtgtgattacatatatattttatataacccatttagattggcttacgatctcgttcgagcgagaaggcgagcccaatcgttcagcacccaggtaagccactccttccattcttcttttatctaaaatttcagttgaaattttgattttcttttttagaaaaaatcccgttcagtgattgggtgtgattacatatatatatttttatgtatgtgtgtgtgtggcaccttcgatcaaaaagtatagaaatttgatttgcgattttcaaatgattctcttattaactaatttgagcatttgggtattctttttgtgtatagcagttgctaatcttgagatacctggctagatgtcccaaaaattgtaattttctttatagaggacggtagaaaagtgctagttgcttaacgttgtattcatggcagatacagagtgaaacttaattatcttcctcactgttattgcgaccttaatcagactcactctactctgagaagtacagagccagc

SEQ ID NO: 148346 - DNA, 658 bp, Cannabis sativa
ctacagatcaactatctggtgcagggattgccctcgtcacgcctggggggcaatacctacacgctgcagtcaagttcggatttaaagcatctaacagcgaggtcgagtacaaaactctaatcgctggactaagactagcccgagagatgaaagtgttacgaaaattgtaaaacaatacgcaagtgcacgcaatcaagtagtaaactcacacaagtgatgtcgaaccacagggaattggattaattactactaaattatacttatgattctatctggcaaatcaatactttttaagatttaaaaagaataagtaattcaagaaacttaaagaaacaagtgaatattaatcaagatgagaaaatagggaggagaatcctgttgtttgtttacccaattgttaatgcctaattgccatccttttcttgatgtgaatgacaaattataaattaacctaactcttttttagatcttttagattctaaaccacatgttctctaattaatctcttaattaaactaacatgtaatcaacattaagtaataatctaagtgtcacataggtcatacaaatactctcgtttcacatagaagctcgattattcaattttagcatttttaattctcactttttagattttgtattgagatcataaaacatg

SEQ ID NO: 148347 - DNA, 630 bp, Cannabis sativa
ggttatatctatttgaccattacaacaacatgatgaagttgtcatgtaccttttacacatcattgaattgatgatagtgattcttgaagaattttaaggtttgttaaacataatagtgactcctgaagagtatatatattttggagaataatatagttattttattcgtgtatataaaaataaaacttgtaataattacttatatgttgtagtgatttacattaccttatgaaagtttcattgaaatacaaattattgtgaacatgaagttcatgaattgagttattttgacatgatcaatcatatgcaataaattatcaaatggtttgactacattttattgaagaactagaagatttttctcattgttaatttataaggctaaaaaaatgtgcatatatttggatatagaaaaaatgtggatagtgagacatttctcttctttttatattaattctcttagggttaggattgaattatttaaaataaaaaaaatgttaaaaagagagcaaaagtaggatctagtggccgaccctatgtgggtccatcactagttagattttttccacttttctcaataatttctctatttttcacaaataccacttttgcacttttaatcctataaat

SEQ ID NO: 148348 - DNA, 500 bp, Cannabis sativa
cttaaatgatcttttgtttcatgcgttatgtttctcgatggtttttggacatgttctattcctggtcaatttttatacacttagtttaaacatacaatgattaatatgtgaaatgttaaaaagcactctagtacttttttaagtgttaatatcattattagtttaataaagtatcagatcttatataatttaatgtaacagtttttataaaatatcaccaaccaatcataaggtgacacatctagaaagtgttaagcaccactggtgcctaatagtaacgcttaagcaccagtaatgtctaacaccacctagagatgacaaattacaaatagttagtaatgctctataaaaattattataataaattatatgagacatgatacttaattgcaatattacatctcggaggtcttttagcatttctcttattttttttaattcaattttagctaaaatagctaaaaagttagtcatttttttacataacctattagtacacc

SEQ ID NO: 148349 - DNA, 925 bp, Cannabis sativa
caaaaggagagtgaggttggacaatattcctcgtcttcagcgccgcctgtaggcaatatacaaccgccaccactcggtgtgcaaccaacactaactggtgttcaacctcaacaggacctaaaggcttttatcatggagagtattcgggaatatcaggatgcaacaatgcctattctaggatatcataagccatacccagcttactatgaccaaatcccacttccaacaaacaatgtctgacaaaagttcgaaaagtttgatggaattaacggttctccccatgagcatttgacctatttcacctctgcatgtccaatcagatgcactattgattagacaattcgtgcaatcgctaaaagaggcagcattcacctagtatactcagttaccccaaagatcaataaatatttgggacaacatgcaacaagcttttctggcacaatttgtgagctcaaagaagaccataagtctccatgacctggtggaaacgaggcagcaaattagtgagagcgctaatgagttcataaccaggtggagaaatctcaatctccaatgtccagaaaggatatcggaacaagcgataatttcaatgtgtgccaaaaacctcaaccctgaggtggcaacttttgtgggcacaacagaacccaaaactttcaatgggctcgtcttgaaagcctgcaatgttgagatacaaatttctcggcaaaagggtggcaaaccctcatcgagattcgaaaacaaaaaaccatttaagaagggagaatcaatggcaatttttatcaatatcggcaacaaagataaagggagggcatgagagccacaaaaaaaattaactctcaaagaaaggaaggaagttaaatattccttcgacgatgatgacgtcgaccaaattttcgatgagttgttaaaagctaaggcaatacga

SEQ ID NO: 148350 - DNA, 780 bp, Cannabis sativa
  modified_base (752)..(754): a, c, t, g, unknown or other
taaaattaaaccccttcccctttcttccctctctcattctcctctctctctagaaggtcacacacaccttttactagagcaccatttgtcggaatctatcaacttagtttgacaaccaagtgtgtaggaacaacccaaattcccttatcgatataattcttaaaagaaatattaagtatgtaatttatttagtaattattattagattttattgtatttaagttgatatgaataaatctacacatatctttcttcttatttggttgttttgttcctaaaactttatctgttcgaattctgcattttttttttttgtagttttagcgatttttagtgatgtcgttatcgatatctagcgacatgagagtgtgctagaggtcaagaatgacttttaacgacatgtagcgatgaaatttacaacactaggaaagatttgttatctacttacaattttagtgatgtcaatcgatattgtttgtgatatgtgtcgatagtttttagaaatagtgtttggtgaagtagaaaataaaatctagcgactagtagcgatttgttgcaatgcaattgtcgacatggttcacgacatgttgcgacatcttttgcaatgtttcttaacatatttttttcttgcctaatttttttcattttatttgcagattcaattgtatttgtagttgtactgtattttttccttccccaagacatacatcgcaacatgtcgacaaacgtgtcactgttgggttttatgcccnnnataaaactctttacaatctgattagt

SEQ ID NO: 148351 - DNA, 2025 bp, Cannabis sativa
  modified_base (1520)..(1529): a, c, t, g, unknown or other
aatctgattatattgaaatgagttgtatttagggcataaaacccaacactatctccatcacttcatctcgactcaccgttgggtgggttagcttatctacaggaattacatcgagcaattcagcttctgttgttgaggccaagcgggccaaagcgtctgcgtgtgaattatgagcacgcggtactcgggagacaaccactttcttaaatttctgcaacaagttgcatgttatggcaaggtacttagccaaacgaccgcctctggccagatgttctccgtttacctggcatacgacgatttaggagtccctaaaagcctgtaagtgttcgatcttcatttcaagggcgagctttaatcctgcgatcaaagcctcatactcggcttcattgttagatgcagaaaattcaaatcgtaaagcagcgtgtaccttaaaattgcttggactgatgagtattatgccgccaccggagccttcgctattaaaggccccatcgacgtataaagtccatccctcgccatttggtacatcagtatcaaccttttcttctacgagtgctacatcaatgcttgggaacttgagaatgaaatctgccaaggcctgccccttaatcgcagatcttggtttgtacttgatgtcgaactggcttaaatctactgaccatttcaacaaccttcccgatgcttctagctttgctaaaacttgcctcaaagggtagttcgttaaaacttcaacgctatgggcctgaaaataaggtcgcaattttcttgacgatattaccagggaaaatgccagtttttccatttgacgcgaacgagtctcatcgtctaataaacgcttactcacatagtacactgggtattgcaaaccttggtctttgaggattagtactgagctaatcgcatatttggataccgccaaataaatggataaaacttctccaggcattggttttgacaggattgggggctgtcccaaatgcgtttttagtgcttggaaagcttcttcgcatttttcggtccattggaattttttgttgccttttaagatttggaaaaactctttgcatttgtcagaggatcgtgatatgaaacaatttagagcgacgactttacctgtgagactttggacttctttcggcttagtcaaagatggcatttctactaatgctttgatcttcgcagggtttgcctcaattcctcgctgattcaccgtaaacccgaggaatttccctgagctgaccccaaagacacacttaagaggatttagccgcattttgtatcgtcgtaatatttcgaacattgcttgtaaatggttgatatggtctttcacatgttgagattttacgagcatatcgtcaacatacacttccatggtgtccccaatcaaatctgcgaacatcatattcaccagcctttgatacgtcgcacctgcatttatcaaaccaaaaggtattaccttataacaatacaaacctcgatctataatgaaggaggtatgttcctgatctggttcatacatnnnnnnnnnnttatatcccgagtatgcatccatgaaactgagaagcttatgacctgcagtggcatcaacaattttgtcaatgctaggaagtgggaaattgtccttgggataagctttattcaaattagtgaaatcgacgcatgtgcaccatgagccgttaggcttgggcacaagtacaggatttgctaaccagtttgggtagaacgactcccttatgaagctgcatgccaaaaggcggtctacttcttccttcagcgcttggtacctcgcggggtctattttgcggagcttctgtcagacacctcgcacttcggggtcaatgttcaatcgatgacacatgacctgcggagatattccgaccatatctgaatgtttcctggcaaacacatccatgttttgtttgagaaaagtgacaagcttttctcgctgttgaaaagttagtttagaaccaattttcaaaactttattattatctattggatcaataggtacctcgatagtgtctt

SEQ ID NO: 148352 - DNA, 633 bp, Cannabis sativa
tttaaagtttttgttttaataaaaaggtcggttgtgatgtgggctgtcacaaaagtgacaagttctctacttttatattttattttaatggatttaaaaattattctttataatttttaatatttaataattattacataaatctcactctcccatgtcctattgttcatctttttcttctatttttttttcaggcagttattgtgaagtgggtggtttctatttttttttccaaatttgtgcagtttttttttgtttttcatcttaaatttccctatacatttcccacttttttggttggtattcttctataaatattggttttcctcattaacaatggcgatgacttgatcttcctcccctgttgctaaaaagtccccaaaacaaccccagaaaaataaaacacgagcatcaatgggtaagaagaatttaaaagataatcatcctagccctacttctccagttcttgctaaaagaaaactaggtgcttgtacttcaaagagcactaaatcaaaataccctcgacgtgtgttggagaacttcgactatgattttgagttggagtcagagtttgtaaagtctcccaaatctgataaggttttttttctattgatcttgtgttgttttaggatt

SEQ ID NO: 148353 - DNA, 701 bp, Cannabis sativa
  modified_base (30)..(42): a, c, t, g, unknown or other
ttacaggttaaagaaaaatgtaaccatatnnnnnnnnnnnnnatgtaaccattgaatagtcactcatatatcctatatatagtattataaataaacccttttaattctttatttaaaataaaagtaaatatctaatttgatttgaattagaatctaaattcaaatataaatatctaataattgaataacaaatatcagttagatcttttattttaattagttaacttttaattaaataattatccaataattcatttaattaataactaaaagataattagcttaatttaatttaaattattttaactaataacattattaaactaatttaatcataggcctttatatgtcaccttacacgtgtagattgagcctacacgtggccatattttaagatccaaaattgattttttattttttctataaataagatttattatttattctaccaataaataataagtgattaattctcattaatgtcttatttcacaaggattgaaataaacattattttttctctaaagtataatatatatttttctctttaatattatttaataataatattatatttaattaaataatatagttttatccaataatactaaatagttaaatactattaaatatacaattcataattgccataattaatcaaaataataatttcacgaattactatttttcccttaagaatt

SEQ ID NO: 148354 - DNA, 1257 bp, Cannabis sativa
cactatctcttctctcattaattctctcatttttttttaattttttattaagtttgtaaatattaattgaataaaatattcctataaaattctaaaaaaaaaccaaatatattatcaattctaaaaatcaaataataaatctactgatatttatttatcaattttattaattgacttattctattaaaaatgttaactatagaatcatttttttgaactacacgatttctttatcagtttttttttttttttttcaaatatcacataattttaaatatgataattcacacattttctttttatcacttactaaactctatttgtatcttaaattatttctcttaatttcataactttactactattatttttttttaattttagttctctctactttttttaattttagttctttcttcttttctaattttctaatgatagagtattcttttctcagacttaaaatataaaaattagagtttatagaatgtgggactctctcaatacaaagaataatggagaactcataagtcttaatatgatttttattggtgagaaggtaatttttatttttattcatattttctctctattactctttttttttttttttatcaatttatcaattattaaatactcaatgtgtctactatttatcatacatgaaaatctaatgcatgcgacaataagaaaaaaattaatttataagtttaagaagttattgagtgaagattatttatactgcaaaatttgaaaattgtagcaactacatgtaagtacagacaattttcaagtgaatataaaactttatttttagttgcaactttagtgaagagactagaagaagaaatagttaacatttcaatcaatgtgtttcaattcataactctaattttgattgattcacgtgttaatgataacacaatactcttaagtatttattcaattattaacttttattcatatttaataaatttattcagttatttgtctatataatattctaaacatctttttattattttaaattatataagtataattatatttattctagagtttcataatcaaatctaccgttttaatttattttctcatttttaataacataaatcatttgaatttcatttattatttattctagagtttcattttgtctgagcattgtttagttttaaatttttctttactgtaaagtacatttgaagatatttctttatattttctttttttatataagaaatcgtataataattt

SEQ ID NO: 148355 - DNA, 576 bp, Cannabis sativa
  modified_base (512)..(519): a, c, t, g, unknown or other
aattaactaatgaattgaaatattaatataatttttcaaatagagcataccaatatatagggacatcaaatgcgtatcttggaccgtggccaggaatttcaaaagcaaattgtccaagacaacctaaaaatcaagaatgtggtttttatgttttgaaatacatgactaacatggtcgcacgtgcaaaccccaacagttatatacaagatcaaaaagcagtaagttttaactattgattatagtatttattataataacaaataatatatatataaactaatataaatttttactttttttttttcagtttggagacaagcaacaatacaatctaaaaaccgattattactagtagagcgacagtggatagaacggctgatggcggtgattcacgaagacttggaagattgatgctgaaaggccaaataatttttcttccctagcttatttttttaagttaacttgtggttagatttacagtagaacctctatctaagaatactctattcaannnnnnnntctaatttgttataaaaaaatcaagtcccaatttgggccaattataaataagaataa

SEQ ID NO: 148356 - DNA, 506 bp, Cannabis sativa
tgaatcccttggtcagataaaaactgagcaaatggtctatattcaccccccagacagcttggacacttttaataggtagattgaattgtttttccacaagccttttaaactttatgaaaacatcaaaagcatggtttttttgagttaaggaaaaatccaacagtacctactataatcatcaagaaaatgaacatagtatttgaaaccatcttttgatacaacatgggaggggccccatagatcagtatgaatgagagctaaaggttggttggccctactggtagtcaaagaaaatggcaatttatggcttttgccttgatggcatgcatcgcaaaagtgtaatgcttttaaagaacctgtatgagatatatgaggtaaaatgtttgccaatgtagaatgagcagggtgccccaattttaagtgccaactatttacatcattaaactttgagacagagaaagcttgtggagaaacatcaaaaccatcttgggtagttttattaattt

SEQ ID NO: 148357 - DNA, 725 bp, Cannabis sativa
  modified_base (30)..(44): a, c, t, g, unknown or other
ttcagaggacatgatttggtacatgtcaannnnnnnnnnnnnnnaatcctaattagcctatatatatagataaatttatatactccatctccatgaagtatatttctttagtaagtgggctatattttaactttacatatttgtttatcctagttgttgttactttcgagacgatcatcttgttttttttgtcggtaataataggatataaagaaaaaagtagtattttttagagtaatttacgacgaaacactttcatgttttaatttttatacacttaatccttttatattttttagaagcaaaatccccttaagtttatttttctttgcaaatttgacacgccagttaaatattatcgttaaatatcaattgacggcaatatctaactgattgaaaaaaaaaaaaaaaagtaaacttaagggagttttgccataaaaaaaaagataagagggttaagtgtatacaaatttaaatataaggggtttcgctgcaaattactaattttttttttttaaactaaggagagttctatttgctccccataaaatgataaatacaccccattattaaaaaaaaaataaacttagttaaataatttttaaaaattactcttaatattttttttaaatgttttttcttacattatttgatgttaattatgattttatttttatattttttttttctaaatcatgtatataattatttttttaataaaattt

SEQ ID NO: 148358 - DNA, 721 bp, Cannabis sativa
tggtattttgcctggcgtccatctagtctgaacagcctgcgtaaccaagagctagcattgtcagaacttaccttggctcaagaacactaaaaccttgttgtataaagcttgaattgaggaagaaaacggcaatccctagctgctttagcggttcaaaaaagggggagagagtttgatagtgaatttttcttttccttgatttttttccttatttttgaataaatgaagtaaaaccttgttttattaaatatctcagccgaaaagtttaataaaaatttgattttattacttaataacaatccactaaagacaaaagaccaatggggaaaaatgagcattttgctcctcccgcactaaaagtcataaaatgacactaaggggtgttttgggaaattctaaaatctcgtctattcctgacattccaaatatctaactattgtcccgctatactaaaaatactaagatgtgattcaaaaagccatacaccgcgttccaatgttgctgggcaccgatcatgcaaaaatatgaaatttcactatatgacatataaaatggattctgaattcaaataaatcatcataaataattattttaatatcaataaataattttcataattaaaccttaattatctgctaatttccaaataaaagctaagcggtctttacatggtttgtagatccaaaatcaagaatccaaatggatttatcattctctaaaa

SEQ ID NO: 148359 - DNA, 538 bp, Cannabis sativa
tatatatatattaagcaaataatagttatttttttaatcactatttgcctataggtgcatgttaccccaaaattttacaaagtataatctcgaagtcataataaaaaaagagaggtccgaagaaagaattgatatccaaataagaccctaatcttgagaaaaaggccaagatcacaagaggatccccatggtgtcgtgttgccccctccaagaggggaccatggtttcacgccacccctccaaatgaggaaccatggtgtcgcgtcgccccctccaagaggggacccttggtgtaagttgcccctccaagaggggacctttggtgccaagtcgcccgctcggtaccacgttgttgagtttatggtactaaatcaagtacgcagcagaataattgtttatctgattatcatcgtaccatagtgccaaagatctcctgatatatataataaatcaaaacataaattgcatgaaaaaaataaatacctcttgaagcctattagagtgtccatggttcttttcgtaaattgtatccttccag

SEQ ID NO: 148360 - DNA, 723 bp, Cannabis sativa
ggtgtttctaaaccatgtgggactataagtttatatgtgtagtagtttatttcttaacaaaatatgaaaatatcacaaaattttaaaaatacactaaaaaaaatctagtatgccacctagactcctttgtgttttcctttatatttatatatagattatacaattacagtttaattacatggtcagacaaacatgccaaattgtataattatccctaattacacacaaatctaattacattgtggctttctaaaggtacccttaaagtgtatgtgtttactcatagattcaagataaatatatatgtataaacaaatatagtttttcttgggaaggaggagtcacgtgggctcttgtccattttaattttttattatcaattttaaataataacaaaaaaaactgtcacaaaactgatatgcccaataaatcaacactatttacaaacttaaatataataaaattagttataataaatgttgaactgtcaagttttaacaaaatggcacaaattttttttaataaaaaaatacagtatatacagtataataataacatagtaaaatgtaattttaaaattgtacaaaaattgagaaatccagtcccagatgtaaatttctcttctaagagcatctctaaggatacactaaatttagtgttacattatcactaaatttggcgtcaaaaagtattttcactccaaccacaacactaaaaattaca

SEQ ID NO: 148361 - DNA, 848 bp, Cannabis sativa
attggcaatgggaggagtagcccattcatcttatatatcacaatttatttccatacattagcaatgtgggactaactctaataaaaatacataccggaatatttttaattttttttcataataatattcgttatagttataatatataattattgtaaattttaaaaaatttaaaataatttataatgtcgaaaacagagtttcttggaattctaatttatcacacgtgttcaaaatacttcacatttgttttaacactgtaaactattcagaattttttaaaaatttataaagataatattgtaactataacaaatactttcattaaaaaaaaactttagcatgaattttcggatgcaataataaaaaatattgtaattactaattaataattaatactgtatacaatatatagatcactataaaaaaaattatttttagtcacaacgaaatttgtgactaaaagtaaaaaagttgtgactaattattcttatgttgtgactaaaaggtccgtgactaaaagtattagtcacaacaattacaatttgttgtggctaaatgtgtttttagtcacaataagtgttgtgactaaaactaaactagtgacaacttgtagctaaatactatgttttagtcacaagtaagtttttgttgtgactaaaaaattgtcactaataataacagttttttgtagtgagatgtactaattagtaattacaataaaaaaaataattcactaaattgtgcccggtgagtaaatatctattctatataaagtgtgtctatataactaaaattcttggtttatgagaatttcatgggtgatttttaatttttatttataaaat

SEQ ID NO: 148362 - DNA, 550 bp, Cannabis sativa
cttcagacagacatcttttaatgaaatgagatgagatccaatgctccgtcgagttagctctctcagatagaagctgacattcaaatgatgttgactgatgaagctcaccttgtcatcaagaactaagattctcagatggagcgttatctcttcaatagaagaaacgacagtgttttcattatcaacctcagaaagacatgggaaaagctctagctcgctgctaggattattgttactattcaagttcccagcgagatatcccaacgagatacatttttcagcgtatctaaacccacgtcagcattgacccagtaaaagcagataaatcacagctgtgtgattttcaaataataaccgcttttattttatgtgggaaaaaaataaaatcccacaattttaggagattattgttgtgggatattaatctgattgtaattaattgcattcctatgtaactattaataggtgcaggatacacttgaaaaagggacggaaaatcctttattgaaaaaaccctagttttgttatcagagaaatctaataagataga

SEQ ID NO: 148363 - DNA, 709 bp, Cannabis sativa
atacaatccattctgcactattttaagcacattcatttgtactaagtgcggattttatattttggattcaatccaatccgtaaaagtacaaattgggttggttattttagattagttagtttttaatattgaattaattaatatttattattttttcacataactaacagcaaaataaaaacaattattgttattttatgtcgccaacaacaaactaaaataaataaaataaaaaataacaaacacaagggaagaaaaaattatatgtataaagaaatgtttagttttattttactgcatgtgtgtacttgcatagtaaataaattaccattgtgtgtacttacatagaaaataaattttacaacaataaattattatatttggatgatattaatgtcttaccacacattttataattatcgaaagttatcatagactatcaaatttaaatgagatcgatggtaatcaagatcgttcagatattttttagtgtaaaatttttcatttatttattatgcattttaatttgacaaaatttttcatttgattattattattgcatgtgttattttattgttcactattatactttatgtaatacaactatcaatgtataataataaataaaaattgagtaaattgcgacatacatacctaaggtttcagattttatacacttaaatattttacctttatttttagaggtaaa

SEQ ID NO: 148364 - DNA, 744 bp, Cannabis sativa
ttgtgcaaaatatcttatgcaccttcataagaaatttcgtccaatttcaagacatgtgaaaaagataccattatttatagggtaaatagtagtataacccaaagttttaagtttgtaagtggcatgatttcaatgtttatttttagcggtataagtatccaatgtttgtaaaactgtaatttttctctaattttgtcagtgcaaaatctattattttcttaaacaagctagccacatataaggttcatattcttgattattgggtctagacagaaacatgtagtattagctacttccaaatgttcttttaataaattcaaaacggagtctatgataaagctggaggaaaattacagttttactaacattaggtacttatgccactaaaaataaacattagatttatgccgcttacaaacttaaaactttaagtacttataccgctatttacccttttatatataatattgtttggtagtggatgtagctcattcaaaataaatagagtgtgtaccataacatatttttagagaatttactagaaacttttcgataatatatataagtactagaaatattgaagggtacgtctaacatttttatgaaatataatattgttattaatctaatttaatatcgtgttttatttattttaatttaataaaaaataaaaaataagatagtatatactttaataaatatatatatatatatgggctttctatgtaatttctgtcctctttc

SEQ ID NO: 148365 - DNA, 523 bp, Cannabis sativa
aaagataaatgaagctcaattaaaattagtttaaaataaacatttcatgggctttatcatacacgtgggacatgaattagttaaggtcacaagctatctattcaatttgagagaaattttctcttcaataacaaatgttgaccaagtatggtgggaagttaggaagtttattcatttattaatttattttaaatcttaacctaggttagctagaggcctatatatagagctttaggtattcattcttcactaatcacttaagctattacctatcaaagttactctctctgtctcatctcttactactacttcctattttgccttttatgtcataatattcattgcttattacctcacgccaccatcaataccatcatcctttatcattttctctatcatttttttttcttcaatttctttttctatcattttaccattctctcaacactattcccaactgattattcttgtcatactcacgtatcaccaccaccaacctcttaagtatttatatatatatata

SEQ ID NO: 148366 - DNA, 656 bp, Cannabis sativa
  modified_base (154)..(154): a, c, t, g, unknown or other
ttttttttttttccatatattatgatacagaatgagttatatattaatagataaaatcatttataacatattattttttggaatcacacaacaactaacacgtagattaaattattgaattgccttcctccacaaaaaaaaaaaataataatanaaataaataataaataaataaatgatgcaaatgcattaattgatgttggtagggatggacccggggccccctaacaaatatatgggcacatgtttttaggaaagttttgtaagtatctcactatgatatgatttatgttttacccattttaatttgagtaatttgtgacataaatacttaaatttaactttgagttacaaataaatacaaaagtttattttttggcgataataatacttaaattataatttcggaacttttgtatgtacctaaatattaagtgaagtaaattgccatgtggcgattcttgattagttcaagtcattaaatttttacttttttaaaaaaataatttaaaaataccaataagaacatgacgtgtggataataacttaatatttaacggtcaggtagacatataacttaggtagagatagagattggttggttaatgtatggggaatgcaattcccgcccccatccctgctatctatttatactc

SEQ ID NO: 148367 - DNA, 562 bp, Cannabis sativa
ccccctgagtgacatgaaaattatttttagggcactcagttttataaactttaatttagtggttgcatatacttgtccggtacaactttactttacagggtataaacttatatttttcgactattggtaatactttcagaggtgattagtattccaggccctaggtaccatggttccgtccattatttttagcttgtaggtcccggagccgatttcgtactcaatttcgtatggtccttcccaattaggcccaagtacccccactctgggttcttgggtggctgggaagacccttcttaggaccagatcacaatagtgaaatttcatttattaaccttcgagttgaagtgtttagccaccttctttttataagctaccatgcgtatttgagactcatcccggagttcgtcaatctgatccaacgcttcttgtaataaagctttgtttgttgctggatagaaataatgtttctaccaggaccattgcctcacaaccatatgccattgagaatggtgagtggccggttgtggttcttggggttgtccagtaggcccataacact

SEQ ID NO: 148368 - DNA, 630 bp, Cannabis sativa
tatacatttttttttaccgattttgaaaaattccacatttttttctaagataagggcccaaaaaaaaaattcctatggcccactttgtttcagggccggccctgtatgggactaaacacaaacccggccctgggcataagcgggctaggcctgtgcctagggcatacccagcccatgggcccgaaaaaattctcccttttaaaatatttttttatggcccactaaatttcaaggtcggtcctgactacacagttgatgatggcttaaatagattaattggtactacctatattaacaagatgcatcttctttgcggtattccatcataaaagaactctaaggttaagcgtgcttgatctggggtaattttaagatgggtgaactcttgggatattttcctaggaagtgaacaggtgaagacaaagcactacatggaaagaagtctgagagtatgactgatgaagattagtaagagttgcaggcaaaaatagtaagcactattcatttaagtttggctcctgaattaaagtataatgtcttgaactaaacatctccctctgagttatggaaaaagtgaaaaaagttttatatgtcaaaatctctaagaaatagattatatttgaagaagca

SEQ ID NO: 148369 - DNA, 578 bp, Cannabis sativa
gcaatgtcttttcccttgtctgaactctgactagaggatacttcctttttagcctttgttagggcaaggttataacattcccgtgcaacttgttgatttcctctcagatacctgaccccattcttcattggaaacttaaggcatgaatgaaatatcgatgtaacagcctttaggtcatataaggttggtcagcctaacataacattaaaggctggtggaacatccaatattaagaattgtgccattacagttatgctcttcagagcttgccaaagagtgaggggtaggcgaattttccctagaggtgcagcactctggccggagaaaccatatacgggctgaaggcagggagttaaatctttgagttggagccccattttttcatatggtgttttgaacaagatactttcagaggctccattatctatcatagttcgggccaccattttgttggctatctggacttccacgaccaacagatcgttgtgcgggaaatgaatcttgacagcatcttcatcattaaacgttatggtgggttcccctgcccgtggtattttttggcttcctttcttcgacgg

SEQ ID NO: 148370 - DNA, 583 bp, Cannabis sativa
tatttttctccttgactaattgattaaattagtttattcatttaattagttataatttttttaaaaaataaacacaaaagtgtatatggctttctataattatatgatcacacgattgcacaataaacttcatatggtatttatcattttaattattgcaaaacagtaagataaataaatatttccatataagaagtaattagtcatatgaatcgtgatcttcattttatcattacaatttaaggcatatatttcacatccacataatttattaaaattaatcctcttattaaatattttatttagaccaattttatcattaatattttgggaaaaaaacaggaaaatacaaaaaaggagaaaaaattacaaaattactatgggccggcccattcaacatttatacagcccagaaccaaaaaattacaaaaataccacttggtctataccttaagtcgcacggaatgaacgaagaagacaaacataccttcatcgttcaaatcaacaacacaaccataatgaaaccaaaacgagagtaatgcaaccatcaattccggcaaaaattaactggaaaagaagaact

SEQ ID NO: 148371 - DNA, 911 bp, Cannabis sativa
tagatttttctgagcaatctaagtatttttcctaattaatttaacaaataaaccaaataattcataataaatcaaataattgcaagaaaattatgaaactgtaccaaacaccctaaaataatatatagaatctaaatctacaaaaaaatatgggaaaaacaccacataactgcccaaaacacggtcaccggcgttacgccggcgtagtcgtcttctctggcgacggcgagtatcaaactccttctacaacccgtttcgatgcgtcttttcaattggaaaatgttcccattgatcccagaacctcaaagaagccaaataccactgatatttcatctcgaaatggccagttttggatcgtcttctccaaacacggtacaccggcaaaaatggtgtccaaactgtaatttcacgttctggactacttcaaaccgtttctctacgtccaatctactccttagggtctcctaaaatcaaatatgaccttccaagaactcacaacacgaagaaaccttgtcaaatccgaaatcgttctagaacaacaaacttgaacgtgaataatggtggattttgaaacctactatcttagcgtgtttggtcacgaccattagcttccttagatcgtgcaaaatctatttaaagtgatcaaacaaacccataaactctctaagtgttttaaaatcaaaatctctctttctctctctaagtttcacatgaaactctatcgatctctctctctgcacacaaccgcctcccttcaacttctttatgcgttttaaacccttaatatatctcataagcatcctatatatactcctaaactctaatctcaaccctagatcaacaacgtaaaatttaaaaaaataataatatatatataatagttaccatattccataataataataataata

SEQ ID NO: 148372 - DNA, 772 bp, Cannabis sativa
  modified_base (414)..(420): a, c, t, g, unknown or other
  modified_base (547)..(550): a, c, t, g, unknown or other
gcctgggataccgcaatgacgactatctaatgcaaacgcagatattgagggtaataataataatgagaaaatgcctcgaatattgtagagtatattttatgtagcctttcagtttcccatttgttggattgacattatgttttttcaaataagttctaggcctttaattcaaaagcatgtggatcaacatcccataatataaattcaagaaggggagacccttttattacttttatttttttgccatttcaaattcaggccttaagagaaaaattagaaagaagaccaggatctagatttactaacaagtatgttgaattaacatcttaaatatgaatatctctaaaataatgaaactaaacacacaggagtttagaaaaccttacattggttgcaacagaatataatgactcnnnnnnntcagatctctaacccttgtttcttactatcgcagagtattatcaaaatctgagcctggatctctttctttccttcgcgtttggttaccactttcttactcacgatgattgagtacttgacttgctannnntgggcatggcactctatcactaagggtttggatatgaagaaaaatgaaggaggcttgaaaactgtatagaaggtgtctctcatctacaagctgtcagataaagaaaactagatttttgcaagttgaaaatcaagtgttcaggtggatcagatgagagcatcatgttccttatatagtgtttcaacaaggggttagggctaaattatatggattaaaaaagaa

SEQ ID NO: 148373 - DNA, 556 bp, Cannabis sativa
gagagagagagagagagggagaaagagagagagagagaggcatgcgattggtgagggagagagagagtgtaaaaaaccatgtaatttttcaacaataattcttctatgaaatgtattgcttaattcacttgtttcaaattataggttatttgttattctaatatatatcatatatatatatatatatataaggttaaacctacttatttaatttaattcgaattcaaatataaaaattatataactgattaacagaaattagtttatcctttaattttagtattatcttttaattaaatagattatccaataatatatttaattgaataattaaaagataattaattaatttattttaatttaataataaaataatcaaacaaaattaccatggtcctttatacgtcaccctacatgtgtgggctaaatattaaggtctaaaattaatttttttaacttcaccacaaataagatttattatttatttttccaataaataataattaattaattctcattaatctcttatttcacaaggattaaaataaatattatt

SEQ ID NO: 148374 - DNA, 541 bp, Cannabis sativa
  modified_base (505)..(516): a, c, t, g, unknown or other
agtaaatacagaatacaccaattgtgggatgtggacagcttgccatatctctgtgatacgatcccagatttatagggattgctcttgcgtttcacgatgcaaattctggaattgctaagttttgatatgtggctcgaattgtccactgctgagctaggaggacctcgtccgtgtaggcatatgagatgttctactcagaacatctcctttgggcaggtatggagaattaagtccacgtgtcaccagcatgtgatgtcttgtcagagtgcaaaaattaggataacattttccccccaagtttgtacgggactttcgaagttgcgtgtagacttcattcaagatgacgttacgtttgagtgggtgacacgtgtagaatgtatctgttcgtgattcgatgtgagtatgaccagcagtctctttggtttttgggtaattaatgctttgacaaattaatacctcgagacacgtttctgttggaaatattatttatccaggatcttagatnnnnnnnnnnnnatgttgatttaacaacctaatattg

SEQ ID NO: 148375 - DNA, 533 bp, Cannabis sativa
gttaaaaatcatgcatcaattagaggggttcaactaggtcttacttttccaagtaagatctagcttgctaaatgttaaagctggccaaaaattaatattcaatcaacattttatcacatataattgaacaaagacaagattactcaatcaatgcaaaatcaaagtactagtccatacaagagttcataaccacccaaatctcaaagattttagttcatagctgaaattaaaaactctaaacgagaaaatgacatgttcatggggtttaagagaatactaaagagtagaaaatgatacaaaatggaagaggagagcaagagaaatgagtttgtgtgctcaaatcttttctttggaggttgccttcttctccttcttaatcttcttcttctattctttgtactctcttccttttattttttttttctgtacttagatctgaaaaatgtactcccttcttctaaattgcaaccaccattttctaatgtccttctttctcttatgccccccaattagggtaccaaagtttaccctaa

SEQ ID NO: 148376 - DNA, 590 bp, Cannabis sativa
tttaaagtataaaaataaaaaagcccctaaaattattatgattatcataactattaattgttatcatgattaatgtagaaacggaaattgacacaaattctcacaatgagaaataagttgtaaaataaaaaagtgtaattaattaatccttaaaaagaacatatacatatatatatacatccaaaaaatttatatagtgtaataataatataatagtgatatatacacaacttaaatgatactatcaattatttaaaaaaaaaaaatgacaccatcaataaatctcacctatggacatgaattaaatttgatgtttagtataaaatgatatatatataaatatacataaatacaaattatataacacaattaactatttgattcaatatgtagaatattagtacgttattacatgttaattttttattttctttgaatgttctcaacatttgcaaataaaaaaataactattcttgagatggacctttagttttataattagttttgagaaagttttataatttaatgaacaaaattattgttgagaattttataaaacacaaacatttgtatccttagtattatattta

SEQ ID NO: 148377 - DNA, 1021 bp, Cannabis sativa
  modified_base (42)..(42): a, c, t, g, unknown or other
gttaaaaaggctgtgttccagctctcgggagataaggctccnggtcttgatgggcttaatgcctatttctatcaaaagaattgggacactgtgggtagtgatctagtgcatgcagtcttagattgtctaaataatggggtagacttttctgaggttaattctactttgattgtccttattcctaaaaaaaaaaaaaagagggctagatctcttagagactttagaccaattagcctttgttccaccttttataaggttatttctaaagtcttagcaaatagactgaaattggttcttcacaaaattatctcctttccagagtgcgtttgtggctggtagagtcatttttgacaatattttgattgcacaagaggtggtccatgatatcaatgctaggaagaatggtaaaagtggttgggcagccttgaagcttgatatggctaaggcttttgacagggttaactggcactatttggaaagtgtaatgctgcattttaatttccctgtttcttttgttgctttgattatgaaatgtattaccacttccaatctttcatttctgatcaatggctcaatcactggatcggttaagccttcccgtggtatcaggcaaggggatccgctttcaccctacctttttcttctttgtgctgaaggattgtcttcccttctctgtgctcatcaaaattctggttctcttaagggtgtagctatttcaaggagggctccttctatttcccatcttctatttgctgatgatagtctcattttttgttcagctgatagggagtcttgtaattctctcagtcacatttttaatctttattcccttgcctctgggcaagttattaattttgctaaatcctctattctcttttcccctaatactcctcaggatgttagaagtcttttctttaccacttttgaccttgaagataggccttttgttagtaagtatttaggtttgcctcaatgccttgctagatcaaagtatcagtcttttgcctttcttaaggataaa

SEQ ID NO: 148378 - DNA, 748 bp, Cannabis sativa
taaaatccttaccttgtaatgataatctatatgtgtgtactgatattatgacactgaaagactttcagttctttgtcttgtctcctctaggaaaagtttggcattgcaggaatcaagtattacatcatcagtcggatcaagatgccccaacgctcattcagtggacgaaagattatctactccaataccagcaacacaatgaaagaaacaaaccacacaagcttcaagatgctagccattcctcatcccagtggcaaccaccacctactggtcatcttaagctcaatgttgacgctgcccaaaatatacaacagatcaggatgggttttggaatgatagtacgaaatcataacacagatgttgttgtagccttagctattccctgaaaaggtgttcaccagccgcttataatggaagcgcatgctctttaactcgctctcgaatggtgtcaagagaactcacttgcggttcaaaacattgaattgtcaaactcttgtacatgatattcgctcgggtcacaccaataacattcatctgcaagaattacttatcaaaatcattagcttattgtcttctcttcctcaagcttcgattagctatatcccacgagaggctaactctgccgctcatcatctagctaagcaagctttacgcttagaacaacaggctattttatgattgtaatcacttttctctctgttgtatcctgtactatttggtttgatctttggatacagatttccaagtt

SEQ ID NO: 148379 - DNA, 636 bp, Cannabis sativa
ctctctttctcactttctctttcacgagctccaccatagatgatagtctgttgaagctccaccatgatcatccatggtaccgagctccatcaagagaaccaccatcattcgtctctctctctctctctcatccgaagataaacgttcaaccacaagccaccatgagcattgattagtcttctctctctcgtccactctttctcataacttctttattatttttttttatattgggatttaggtatttttgatattttttatttcacaaatcatcggagatatcgactattcggggatcttaatgccaaacgaaactcccatctttgtttcgaggaggatgaaggcgataattttttttttggaaaatccgctctagcgacagtttaaaaccgtaggctatactataggccagggtttaaaaccgtcgcctatagtataagagactgttttaaaccgtggcctatactataggcgacggttttaaaccatggcctatagtctcgactatagctgacagttttaaactgttgggaattctttatactgacatctttctaccgtcgcctattctacccaatattcgtaacgctcgtatatgcgacagttttataaactgtcgagaattctttacccgac

SEQ ID NO: 148380 - DNA, 798 bp, Cannabis sativa
aaaaggacgactcaagcttgtcatttttcacaaacttttggcttttttggtgagatccatcttgagaatggatcatctctttcttgctagaatgtcccctctgagttcagaagttcactttcccaaattcataacttccggatacaccaaccattttccttctccatccgttcccgaggacttcaaaccttaattggaaccagaaacgatggattccaaggctgaggagcttccaaccaatccaaaccaagggaggcccatagataattacgggtgatcatcacaagtgattctggagggtgagtattatcccttgtaaatggtggtctgagttggatcattatatttattattatttttttactccactgacctctttttctatgtctccacaggaatagacatagatcttgtgagcaatcttagaggtcctcctcaggctgacaaggaatcccgaaagaaagtcgacatggttttggatggacccgggagagaagttggcgtggtttctatcagagaatccagccaacgcaagatctaaacctgcaccagaagacccttatgccaacctctttttggtatcgaggaatttcttgaggctgggaaagaggtcttggcttcaggaaatgggatctgatgatgagaatggggtctgtgcagagatcaaggctctctacatgcagacgctctctctcaagctacgtgtacctgatctttctccaagctatgtgtagacggtctttctcaagctatatgaagacgctctttctcgattttatcgacttcccctctcatcct

SEQ ID NO: 148381 - DNA, 695 bp, Cannabis sativa
caaaatagcattcaaatctgtagtcagatttgtacttaagaaaatgagaagatgaataccaaaagacaatgaaggtcatgatgcgtagatgaagagagacgtccaactgcgctggtgttgtttccgtccaccattgatgtcgacgaagagaagggagattggcagaggaagacgcgcaagagaaggaaagagggtcaggggttctaaggatctctgaagctcatggtgagctttattttctttgacaatagtcaaagatggcccaatcaaatatggaagtggttcctgcgattgaagagagaggaagaagaaattgaaggagagagaaagggtgaggatgcataattttagggttcattttttttaaaaaaaaaactaatgattttttaaaattataatttttttattataaaattatgattttcttaaaattataaaatcattttttacgttaaaattttgattttttttaaaatatatgtttattttttaattatttatttattttttaatttttaaatatattttttttaatttttaaaaattgttagaaaaaaataaaaatgaaatgatatggacctatcaagggctgccacgcaggtattgatttggcagttaacggagaggtatctacggaagttccaaaagtgtaacggaagatatttttaccgccaaaaatatgacttaggtattta

SEQ ID NO: 148382 - DNA, 510 bp, Cannabis sativa
tcccatctcctacatgattctcgctagtttgaaagtcttgtacaaaattatgaattggggttgtcccacacccgtagagattgagtatctttactcagtcaaggccattccatcaaggaagaattccacagtaggctttttctatcttggtactcacgctagcgagccaaaaattattgttgacttgccaaataaggtgtctttcaaggacagcttcttctggacgtctggtctctcccccattggcacaaccacgtttcgcaaactccgtaagtgattgttctcctcttacttatttacatcagtcttcctttttcaagtacttgactaatgttttgttttttctgacagctcttttgacgagacctactcctacccctgagatggttagtaggcacaagctcctgatgacttcccttacagttgacaaagcatacacttgcaattacaagattcccaagtatacttcttggtagcaaataatttttccacccgaagaccaggcctggg

SEQ ID NO: 148383 - DNA, 588 bp, Cannabis sativa
tggtgtatataattttgttaacatgatacatatatttttgagtaataatttagtattactatacgatatattaattttcagtgatacaatatatcaaatattgttgtatatatttaatgatctaatatattttttcgtttttgttacaatataataatatgcaatactaaaaaaattacaagaattattacatagaaaatataaattgacactttatttacaaaaatacctctattaggtgtggacaacatttgtaccttttatgtgtttttaattaccaaaatacctcttacactatcacttacacaatcaaacgatgattgttgggtagttggccaaaaattgcattagacgaaggtttcaatcagacgaaggttgttgggtggttgaccgaaggttgcatagacgaaggtttcaatcagacgaaagtttctgggtggttggccgaaggttgcatgatacgaaggtttcaagcaaatgaaataattgttatcaaagtatttatgcaactgttatgaaacattaaaaattagaacagtgtttccacgtacataactctatctgcatgtctcttcatgatttaatatg

SEQ ID NO: 148384 - DNA, 830 bp, Cannabis sativa
  modified_base (492)..(496): a, c, t, g, unknown or other
ctcgaccaggacgggtacctgggcgagctggactgttacattcctgcccacgacaatcgtgccacaaaccctgataagggaatgtgcgcctggtgggggcctcatggccagcagggggcactgattcccctacacaagtactttagggatgtggcatatttctttggtctctgcccgactcagatcactgctaagggcatcaagtatttatccgccctcttcgtcctttacgcttcccaaggatgggatgctccttctccccacgaggtcgcctggttctttgacctgaagtctacccctaagcaaggcaggtcggggtacttctacttctctcagccaggcttcaagtggttgatcggcacggatgccaaggccatcagcaaaattgggcgctttgctcatgagtacttcgtggtgaaggatccgagtattacccggactcgatttcagcagattccgacatatcaccgtcctcccctcactcttgctctnnnnnatagagctcaaaaacttgcccggttgtcaggggaagagagggatattatccagttgacctcctgtgataatctggtgaagtacgggctttaccccgaggacttttctcctaagtccgtggcggggaagaagaggaagtctgatgctggccggcctgaacgagctaataaggaggatgagctcattcaactcaagcatgaggctaagttgaaaggaggtgtcagggccaagcagtatgctcaagagcctttgaatcctgaagatgaagatgaggacgagcaagtgaccccattgaagaggaagaagaaactcccggccacgcccaggcctgttga

SEQ ID NO: 148385 - DNA, 646 bp, Cannabis sativa
ctagtgtaaaataatttggaaacaagatataaagaaaatatgtaatacattttatgagtgttttggtaactcttttgtttgtttttcaatctaggaaaattttttaattttttttttattatagtgtacttatagttatttaggattatttgtaaattttaatttttttttttaaatattttacaataccaaaaataaggatcaaatagttgtttaccacacgtataagaaaaaacagtgacgcgtgcaacaaaatatttgaatcttatttttgatattataaattattcacaattttttgaaaatttacaggttcgtacacaattatggaaaaaaaaattacactaaaaaactcatatatgtcgaaacagatagggagctaccgaaatgtccctgtaaggggcgcactatagacttactgttggattaaaatcctcaatatgggctcatatgtattggtgtattgctacttgaagtttgacccaaataaagtgattattttagtaattgtgggtcatgggtattaaattgtcatgggctgtagataccttaagatatatttttaatttattgatgggctaaattaaaaatacttaaaattaataacctagctatgaggttatatattggtagtggtccccaagaa

SEQ ID NO: 148386 - DNA, 569 bp, Cannabis sativa
aaataatcaaaaattaagctcagaattttatttttactattttgaaaaatacaggatccattttgtctattttatcatttaacaaaacacagagtctaattaataattttcgcaaaatacaagatccaaaatgatatttaccccaaaacaaattatacagtgtaaacattgaaacgtgttggataccatttttgtcagtgtgtttaggctattatcggtaaagtagttacatatcccgcgagaaaataccatgtgccattagaataaagtttactgctgataaaaacttggacgaatcgataaatttagatcaataatgtttcatcagcatttttccaattaattagtttcatcgctattactaaattttgttgggaagagagacttttgttgtgcacttcataaaacatgagcaaaacatttatgttgcataacttttgtctgtgctttattttttaaattaattaattaattataggtagtttttaagttaattataattgtcattagttacaaatttacaatatctttaagagatatgttaaagggcactagtggtgtctagcacc

SEQ ID NO: 148387 - DNA, 547 bp, Cannabis sativa
ggatgcaaaaagaatttttctaaaatttcaaaaagtaactcatcttcaaaaaaatgtgtgcataacaataaaggagttgttcattgcagagaatgtgatggttttggtcacatacaatctgaatgtattaatactttgaaaaagaataaaaatagcttgaatgctacttggagtaacaataaatttgggatgcaaaaagaatttttctaaagtttcagaaagtaactcatcttcaaaaaaatgtgtgcataacaataaaagagttgttcattgcagaaaatgtgatggttttggtcacatacaatctgaatgtgttgatactttgaaaaagaataaaaatagcttgaatgctacttggagtaacaataattatgaaagtagtgatgatgaattagttgctctaacatctgctctttctagcatatctcattttttgcagaaaaagagaaatcttgttttcctaaacaacattgtttcagttaataaaggtgttgacgatgttatagaatctgaatttgatgagtctgaatcggacaaagattcttta

SEQ ID NO: 148388 - DNA, 859 bp, Cannabis sativa
aaaaagtcaaaacacaccccgaggagtccgagaacatgcatagccgacctctgccatttggccatggcagtgctcgcaactgatacaagtcagcataaacttccttgagtaaaatatgcataactctctcaatttttatccaaatgacccgattcaacatgaattggaaatataattttgagacggatcaaagtgtgtctcacagccatgactcaattctgaggttgtcgggtccaaaagtagcttacaaggaaagctagtgcattttacttgagaattggaaaatgcacctaagcgagggttggtggagcacaccgccacagcctatgtagcattgtgcgcgagcatccgcagtccaaaacacatgtgttcaacactccatttcgaatttgtgcatccttaaccaaaaataacccattgtccaatattggtgaatatttgcctggatacaaggagattgttattgatatttatttatttgtaatattttattcataaaaaagagtggtatacgagatttgttaatgagatatctgatgtgtgagggatcactaacaaatgttctagcttatatatacatcaagtaggatgctgagaaagggatctctttttttttttttttgagcttcttccttttgagacccttttcctttctctcttttggatcttctactctgaaaccttctcctagaaaattacttgaaggcaaccaagtgcaccacattgattccttcaccttctccattgggtccaccatactcaggcgacgccaaactttaaaacaccattgatgcacacttttctttacaaattattggtttattgttcccaagaactttacaaccattaatttagatca

SEQ ID NO: 148389 - DNA, 515 bp, Cannabis sativa
aattaatatagtatgtagaccaatgtaggtggaccacgtgtacaatagtgcacacgtggaaatgccatttaattacattttgagtgacatagtaataggagttgatctggccctttgtcataggcaaatagggcactgagataaacagaagtggaattttgctaacaatattttatttggattccttgtcaaaaattaagcaatttttgtttttacggaactcgattcagattaaaattagaaaagttatgaatttttgaaatttgggagccatggctgtcgagtgggtgcatcgagtgcaccaggcactcggacaagccaggcatccgcgcgcgtgacacgcctgtgtcacccctgctgtctgcccatatccgcccgccacagaccctgccaccgccgagttttctcggcgccctgtcgcttattccgcccgcgcatgggctgcatgcagcctcctggggctgcacatgcagccattcctgggcagccaacccaaattgcgatttttggggttt

SEQ ID NO: 148390 - DNA, 530 bp, Cannabis sativa
atttagggtcatttgctatatttttttgaaatgaggacataaagtatgatttgggaccatttactataattttcgataaatataatagttctttttatatattgtcctttaccacatacaaaaattaataattttttccatatttttttagaattagaagcaatagttttgaaataatgacatttacttatataatgctatgattttaggacatttactataatttgttaaactaaaaacacactattttgattgacgttttggatgaataataaatatattagctctttttatatattgtcatttaccacataaaaaaaataataatttttttttcatatctttttagaattagaagcaacagttttaaattaatgacatttacttatatagtgctatgatttgaggtcatttactataatttctcaaactaaaaacacaccattttgattgacattttggatgaataatatattagaatattttatttatggaaattattttctaattaaggaaatgattttctattt

SEQ ID NO: 148391 - DNA, 671 bp, Cannabis sativa
tcaatagttcgaggggaatttttaacggccagagagcacgatttactacatgtcaaagttcagaagaaaaaattactaattagcctacataaattgttggtatcaagccccatcatataaaaaatataatttgaaattctttgtattgcagttgtagtttatatttttaccaaatggcacaatgcagtgcgattttaaatttaataattacagtttaaattgcgccacactaatttttataatataatttttattttttcataaaaaaacaaataatataatggtattcataaattaaccaatctaattcaatccccactatccaatctaatccaattcacaaagtgtggatatccacacttgtatatattagattagattggaaaatctaaaatctgtatttgtgaatgttgattgacatataaaagtaaccgatctaatccaatccatacatatttatatatattttaaaaaaaattatatttacaattcatattttacggtaagaatattaatttaaaaatttaatacgtataatacaaatatatttaaaacttcatagatataacgtatattttattcttatttataagaaaaatataatcttaaacaaaattaaatatttctttatacatgcaatttttttcttcattctttgaatttgttatttt

SEQ ID NO: 148392 - DNA, 1236 bp, Cannabis sativa
cacgtgtaatttctaggtaggtttattttcattattgttcagctaaggcccttgtactggctctgggttgccttttgaaatgctttcttctttgctcgtgcactcaactacaaagtctgctaaggcctgtcctttaaccgttatttgaggttgaaagattattttgtattaacccaattccactgcccatttgagtaactgtcccgaagcatcagatttttataatatttggcgtagtggttggtcagtgtatacccgaacaggatgagcctggaagtagggccttaacttccttgttgctaagattaggcattaactaagcttttctaccaacgggtatcatcctttagcttcaacaagtcttttgcagatataatagaccggatgctagacgttgttttcttcccttataagcacgatactcacaacatattctgtcacagctaggtacattcctaattcttctctgtccagaggttttgagagtacaggaggttttgcaagttgtcttattagttcttggaaggcattctttcattcctccgtccattcaattttcttatttcctcgaaggatgttgaagaaaggaacacacttgtttaatgattttgaaacaaatctactgagtgcagttatcctactagttaagctttggacatagtttttgttggcaatttcatatccaggagggcttgaattttcactggattggcttcgacacctcacgattaacaataaaaccaagaaacttactcgaactgactccaaaggagcaccttaagggattgaatgtcatgttgtattttttgaggactttgaagcatttgtccgggtcatctatatgccctcagccttcctggatttgatgagcatgtcatccacgtatacttccatattttgttcaatttgatctttgaacattttgtttaccaatctttggtaggtagctccagcgttctttagaccaaatggcatgaccttataacagtacagacccatatttgttcggaaacttttatgttcttggtctggtggatgcattctgattgattatactccgaataggcatctataaagcttaggatctcgtgcgcggctgttgcatccacgagctaatctattcttgttgaggtcggtaatatcaatacatactcgccattttttgttgggcttgggtaccagtacgaggttagctacctaggctggatagaaagcttcaatgataaacttgttatt

SEQ ID NO: 148393 - DNA, 774 bp, Cannabis sativa
  modified_base (737)..(748): a, c, t, g, unknown or other
tatattataattaattataatataccaccaaagttgccattattatacaagctacttaattttccttttattattattattcatttattcgggcgaagaactgtctctttacataattaaattgcaaaagtaagcctatggcaataatctcaaatattttcctatcttaagaaaggagcaaaatttgtaggcttttttttttcttcaaaattttaatttagagctgatggtatattattatgttttaatatatccaataagaacataatatgtaggttaattaggatttttgtccctgaactttaatatgcattaaatcatgccctctgaacttttctggccgttaaaaattctctataaattattggattgttagatttaaggacttttgtataattttattcaattttattatttcagtgattgtttatgtactaaacaatgctccctaaattttaatatctaccaaatcatgtctctcgaactttaacatgcatcaaatcatacctcatgaattttcatcaatgttagacttttttaattaatattgtacaaaagttcttaaatctaacaatctcaatagttcaagtagtatttttaactacttcaaaagttcaaaaagcataatttagtacatgtcaaaatttggggaccaaaaaatttaattagcttaggtgccgtttggtaatacttttttaatcagttttctgtttttaaaattgaaaaagtgaaaatannnnnnnnnnnnatgttctataaaactgtttttatttt

SEQ ID NO: 148394 - DNA, 1050 bp, Cannabis sativa
  modified_base (339)..(341): a, c, t, g, unknown or other
catagatgcaacacaaatttgaatgtcatttcgagaaatgatagaaccagaactcgaaaaaaatcaatttgtattgttgcaactgaaagcatgaaacaaagatcaagtttctactgaaatttggaatgagtaagacattgtctaaatccaaaattgtgttctgaaacttgatcttggcttttcctctagctctaatcgataccatttcaccattaccaactttaagttttaactctacgaattttaaataattttagttttcaagcaattgcaatgaacaacagacatggttcgtagatccagaatcaagaatctagatggatttatcattctctaaannncatgattcaaaaactaaagcattgtgatcactgcttaactgtttttggattgttcttattgctggttcaatctgttgtgaaggagaatctgaggaagtggaataactttctctattcttctcaactgagcctgaagtagtaggattatcggaggaattattctcaatatcttcagctttcctttgcccttatttgcatcactggagaaggatctccatgcaagtgacagtgtccattcataagcacgcaatcagcgtccagcttgtctatgtcggacgagtttcagttgttaatcacaaataggtaaacttaggtgataagttgttgagaataaaatgaactcttctattcagataaaataattcccagcaaagctgctttctagaatttcatgttcttcatgagcaagtgtgaagtgatactctgaccaggagtcatcttcacactttgaagttcattcctaaaggcatatcctagatgaggattggggtgtgggttgtacattttgacactacaaatatcaataaatagaaaaaaatcattggttcaataaattcatacacaagttcaaaaaataataagcaaagcaaatacgtttgcaaaaatactaaaatctaaacatatttattattttccaaggtttccaacataatgaaatacagtgtccggtaggcgagagtcaaagatagcatcagttgtatagagtagt

SEQ ID NO: 148395 - DNA, 636 bp, Cannabis sativa
ccacaagtcaatcttattcagattattctgatacaaactagggttcttttctctcaagaatttttcatcccttttcttgtacattctacccctatttatagtagcatagggtgccagttaattacattcagatatgaatcccataacaatatttccccaaaattatgggctctaattacgcctcgcgtaaataaatgcaattattatttaaaaatcatacagttgtgatttaatcgcttttaatgggtcaatgctgacatggatttagatacgctgcaaagtgtatctcactagggcatcttacagggaacttgaatatcaacaataaccctagcagcgagatggagcttgtcccatatctttccgaggttgataatgcaaatcctgtcgttcctgcaattgaagacttaacgctccatctgacaatcacagttcttggtgataaggtgaacttcagtagccaacatcatttgaatgtcaacttcgttctgagagagctaactcgacagagcagtcatctcattcaaagatgtctggagtgtattagtgaaggtaccaagagtataccttcctatagcgagatgggtgtctcgcaaatcgttatccatgttcttcaagctattatacttagttagt

SEQ ID NO: 148396 - DNA, 1101 bp, Cannabis sativa
  modified_base (214)..(235): a, c, t, g, unknown or other
  modified_base (1066)..(1066): a, c, t, g, unknown or other
tcgctctaggtgaggctgttggggttgtgattctggagccgtttcaactactggtgttggtagcaactacggagtggttagaattagggttagggttgtggttagaattagggttagggtttggttgcatctatagcagtgagaaaaagaagaagaagacgaagaagaggaaaagaaagaaaaagaaaattatttttaatttatttatttattnnnnnnnnnnnnnnnnnnnnnnataatttggaccaataatattttgacacgtggcaatttaaaaaaaaaataaacggagcagttaacattaggattaacggacaaataaaaattatgagcttgaggactatcaccgctatttttcgaggttggggacttatctgtattaaactgaactttttgaggacttttgccgcaaatttcccttttatagttttggcaactatttttaacttaagttagtggttggtaaaagtagaaaaaaaatttcttatatataaagtgataatttttattcatatacttataatttctatagttaccacaaagcaatttttttcagtcatgaatatagtgaagactacattttacaacaagatgaaatataaatttttaagtaaatttttgctatagtctatattaaaaaataagttcttgaaagaaattgtaaaagatttatttatagatgacgttcttgatatgaaaaagagacgcttatattttaattttaagtattaattaacggtacttttcaaaaaaattgttacttaaattttaatatagtttcggccacccctgatatttgatcctggctccacccttgcatatatgatacaaatatatttaaaaatataataagtcaaatgtatattttattcttatttataagaaaatataatctaaaacaaaattaaattattttttatacatacaatttttttcttcttgctttgactttgttattttttattttatttattttaatttgttgtatgatacataaaacagcaataattttctttattttattgttattaatgtgatattaattttttttttaataaatattaantaattcaatattaaaaagtaattaattcaaaataa

SEQ ID NO: 148397 - DNA, 1049 bp, Cannabis sativa
  modified_base (662)..(670): a, c, t, g, unknown or other
  modified_base (899)..(904): a, c, t, g, unknown or other
aaccactacctccacaggctggccagccatagcctcatcaaactagccaaacaatgctccctcagcctggccagccatctggtctgtatcttggccgacttgatccaccaacagtctgctctcatacttttggtctactatgaccaagaagtaaaccacatcttgctagcaaaatcccttgacgaaatagaagaaaaaagggaccaagccaacttaaagcagcatgtctgccagtaaaaagttgtcaagtacttcaataaacaaatcaaggagaagaaattcttcatagaagacttagtgcttcgaagaatattccctaataccaaagatctacagcaagtatgtttggacaaaactgaaaaggtccgcatcaagttataagataacaagtaaaggtgcatacacgcttggcgagtacaatgagaacatggagttagctctcctaccaagatactagaatggagaacatctcggtaagtactgtcactagccaacttgtacaaaacactactctttagtagtggttcctgtaacgtttcaacgtgcagagattcagaaaagaaccaagtctccatcactctttagtgatggcctttgcacggtatgccttgtagaggtagccaaacattaaagagctatatgttggaacttattttactagnnnnnnnnnttactaacatgtatgttgattaaccccctaaatatgaattctctaaaacaatagaattaaacacatataaagtttagaaaactttacattaatggtcgcggaataatatgtctccttccgcttagatctctaacccttgttcctttctgtcgcagaataataacaagatctaagcttggatctccttctccttcagtttgattaaccaccgtcttccgcactatgattnnnnnnttgacttgctatgtatgggcatggtactctatcactaaaggcttgtagattgatgaagaacaacaagaagggtcaaaatcactatgaaatgagtctctcatctactagttgtctaacagagttagaaaattaggtttagattggt

SEQ ID NO: 148398 - DNA, 629 bp, Cannabis sativa
ttaagatactttgtacggtctaatcaataaataagataaatataattttatttgataattaattataattattaaatagatagatttgatatttatagagttagaattgaaagattgcctttgtgataagaaagatgagtttaaataaaatagcaaaattgaaattctaaaggcccattaagggttcggccaaagaagttaaataaagtcattattttatattttttaattttattttaattctaaacctaaccataaaagctaccctataaatagaataagatggtttttatttttagatgatgatcagactcctttatgagacaattagaaaataatgagagccaccataatattcgaatccctcttcttcttcctctgttattttcaaagcctatagtggttggggagttgtccatacaattaaagtcaatatttagacctttgtggaagaccgtgttaaacaccatcgaatgaggagaagattgaggttcagatcttgatcatactctaccacagttgggatcaagggttagagatttgaatggaaagagacattatattctgctgccaccaatgtaactttatatgtgtttatttcattgttttaagaaatttatatttaggat

SEQ ID NO: 148399 - DNA, 762 bp, Cannabis sativa
aagtggttttatggttttatgtgtttatgtgtttaaggttctttaaggttccaggaggttccagggagttccagggattccagggattaggactgactttaaccgtcgtcctagtacgtcgcgtaattctttacttagtcaatttttgagttatcttatgaatttaagctaactcgctctttttattgtcgcagatagaccagcttgacctatacttgacgcgactcgcagagaaactgctgaagttcttggaagccttcctgtacaagatcgcgactgcgattactgtgcacgacgtcaaagctgcgagaacacaagttgattccagagaacgcaagacttcaaagggagccagtgtacaaggagccatctgagaagcaacaagagcggatagacaaatgcctttccaagcaaacttctcggccaacgtcaggtaacatatcgcatgttataaactagtgccttgaaatttatttatacttatctttatttgtcctcgcagagatgacttttctgaagtccacacaggtcctcaaccgcaagccaaaaattggaacagtgacgacatctcccattgttcctcaaaagagaaagagcgatgtggtggtcacccttatcgcggattcctccaagaagtcaactaagggcacgcaagacaaggggaagaaagtggtgatcgattcggctgtccgagctcgcaacatcttgactctccaagagaagttcgtgggtgatgaatttatatcaaaggtcgataagacc

SEQ ID NO: 148400 - DNA, 591 bp, Cannabis sativa
  modified_base (354)..(364): a, c, t, g, unknown or other
  modified_base (487)..(492): a, c, t, g, unknown or other
taatggctacatctatagaagcttttcgacttctagatataaattttatttatctaaggaaaagtttcaactattccaaaaaagataaggccaaagaaagtattccttaggatcaatagtgagaggtctcagatatgctttagtatgcattagacctaacacatgctgttgagtgggagtaatgaataggtatcagattaatctaagaaagaaacactggaagacaatcaagtaaatcttcagatcaagaagagaaactatatgttagtcgataatggtggtattttaatactcttagactacaccaaatcaggtttccagacttgccttaatgctagaaagtctactgatgannnnnnnnnnnctctgggggtggagcagtgattttagagaagtgtaaaaaccgatctgaaatctctaactctaccagtgagactgaatgttaaagttgaaggaaatatacttattcagcctatggaaagttctnnnnnntttttggcattgtaccaataattcaataactaatagtgttatttcctgactaacacaaaagtagttgccaaaaagtaaagaatccagtatccctagagg

SEQ ID NO: 148401 - DNA, 675 bp, Cannabis sativa
aagcccaatccatactgcccttggccagaaaaaagtgcaccatccacattaattttgaccaaaggaaaatcgggagctgtccattgctccactggtaatgtcaccgtccaggttaagcttgcatctgtgacattaactttttgagcattaaaccactcaacataatttaactattacctaaaagtttttactgttacttaaaaaaataaaatgaaaatttgacttgaacaacatatttggacaaaggtttcacatcccaaaaaattttaatcagtctcagttacaatactatatacttaggactataaatggggtattttttaaattacctacttcaaaaaaaatcatataaatatatatatatatatattaattattagaaaatttgtagtacacccaataaaaattgtttcggtaaattttttatatgttttgatatttagatcgggcaactatttatttatttattttgtcacgaacatgtatgttatagttatttagaacaacttgtaaattttttaaaatttttaaatagtttataatgtcgaaaataaaatttagatacttacttactacaaatatataaaataatagttgttaggatttatcaaacactcaagaaatatatatcacagatctaaacatattcctaaaagtgctttaatatagaaaacc

SEQ ID NO: 148402 - DNA, 818 bp, Cannabis sativa
aacttaatctaaaattaatactaaaaataacctaacagtattatgtaagtaaatatttttattttaaaatttgtaaaaaaaatgattttttacactattaattatttagattattttttgccatagaaaaaaatattttttttcatatttttttaagagttaaaagcaaattacttaaagattatgttatatttgtattagttttattaaaatcttttttattttaaagttgtatcaatttttttaattttttatgggttgttggtatatagattttgtagtatagtatatttctgttttgttgtatgatatgttattattcttatatgatatttattttttattttgttatgtataatagtaatgtataatttggttagcataatacaaatattttaatgtatgtgttatacccaaaattttgctgtacttcagaaagtgacttgtgtcaattaagtggaatatgaaacaccagatataataataattaaattattaaataaaaatagaataactcattaaatatagaattaatagagtatattcataactcgctgactgttatagtcttaggcgagataaggatacacaaactatctatcaattcatatattaacgagataccaaccatcttgcctcagaaggcataatctcgagggaactacaaataatacatagcgagacacctaccttgctacatatacggaagcattgacgagatgaaccagctgttgaaacacttagtgtataatccacgttataataactaagtgcaacaacttgggagcatgtaggacatgattttccagtctacgagg

SEQ ID NO: 148403 - DNA, 843 bp, Cannabis sativa
  modified_base (631)..(633): a, c, t, g, unknown or other
tgccacgtcagcataaataccgaaattcaaaattattaccgaaaatagaaaaaacttaaaaattctcgcttccagaaattttagtgttttgcaggtttaaaaaaaaaaagagtaatcttttagttgcttttgatataaataatatatcaattagttactttttattaaaaaaaatatttcaaaataatttttctcatacacattcagttgcttatttgagatcaaataactttaaaactatgatttttttttttattattattaggctatattatatgatattttattatttaaaatactttgaggttacttttttttagcaattttaaaccatattttgagttgttagaaacacatatttttttcgatataaaaaaagatgaacaagataaaagtaacatttccctttcttttataaattattaacaaagacgtaactaaatattatatttgaataaaataagtatacaatctaattttatgggttactacaataaatattataataatttatatttaaaagtttgctagcatctaaataaattcactttaaataattaacaccaacacatcctatccagtagggaagagattatgtttaaaaatttgatttcttataagttattttagnnnttagttgatatttaaaaattcgattttctagtaaagaaactaaaattacttcttattttaattatttttttcgacaacagtaataaaatatatgtttctcatatgttaaaacgttctccttgaaaagtggatcgtggtgatataatttttgagattaaataattacgagtgtaaccaaaaaaattgtttaaactttttttttaaaaaaaa

SEQ ID NO: 148404 - DNA, 554 bp, Cannabis sativa
  modified_base (44)..(56): a, c, t, g, unknown or other
gggcaaaattaggggcaacaataagtaaatttgattatattgannnnnnnnnnnnntagggcataaaacccaacattacggtacacgaggcatttcctcatcatcaatattctcttcaaagctcgtgttgacataaaatagttgtcattacgatatctcaggcctcacactcttctcaagaacacgtgaaattcacgaattagcaaaataatgacatgtgtaaagtgcaggatgtaaccctaaagtgctcaaagtcatccataggtgagactacaagcttcctccatcccaagttccagaagcttgggtcgtaaatgttatccatatttctggatgaataacacatgacatgctaatagggtctccaatccgtataatacctgacctaggcctttcggtatacgaaggctcaatccaaattagagaatggccccaacccatcgtatctccatgggcctcccctccagaattaagatcctcctattctcggaagccaatctagccttccaagaaaatgagtgaccctactacaaatatcaaaattcgcgacggtc

SEQ ID NO: 148405 - DNA, 571 bp, Cannabis sativa
ttattccctcaaatcatgagatttgattacaaattatgctaagtaaatgcagtttttatttagaatccacacaactgtgagtatcccgctgttattggatcaagatgaatgcatatttaaagatatacggtaagccttatctcatggggatgcctcgctaggaataaagccgagttaactttgatggcgagctgttgctcgtcatatgacttcccgagattaatattactttaattctgataactatattttctgatgtcgagatgatctttctcgcatgcattccatcttacaacgagatagatgactcgttgtctgtcatttgtttatacttagtttgtataccatgtaatatacgctaagtgtttttatcgctttggtttttcttccacgcgacgaggttgaagcctcgtcgtacacacttgcacttacatagcttctcgtcgatacataacgtagcaattcgtacattttttgtctcgcagaagacgttcagccagtcgagttataaacatactctacaaattgtgtttctaacgagttgttccatgccaagtgtacttacgattgc

SEQ ID NO: 148406 - DNA, 800 bp, Cannabis sativa
  modified_base (726)..(734): a, c, t, g, unknown or other
ccagttaggttcgagtacacctactgtactgtctttggtgtttagaaatacccttcttaggaccatatctcccacaaagaattttcgagccttcatttgtttattgacataccaagctactttttgttgatgggctatcaactttaagtttgatgtggttcgcttgtcttcaattttatcaagtgattcggccaggagtacgtgattgatatcatggttgtacgtcaatctcatgtaggatggtggctcgacttctacaggcagcatagcctcatatccatatgccatggcgaatggagtttgtccggttgctgttttctcagttgttcgatatgaccataaaacttcaggaagttcttccggccaatttcctttggcaccttcgagtctattctttagtgtatccttcaaggtcttgttgagtgcttcaacttgaccataagcttgaggatgtgccactgcggagaaacttttgatcataccatcgttcgcacaaaaagcagggaaggattggctgtcaaactgcgtgccattatcctaaactattttgtacggcaatccgaaccggcagattatgttcttcacaataaagtcttgaactttccttgatgtaattaatgcaagtggttcggcttctgtccatttagtgaaattatcaacatctaccactgcatattgtactcctcctttgcatttgggtaattgtccgatcaggtcaattccccnnnnnnnnnagggccacggactttgcatctgagttaactcgttgggcggagcctgaggtatcttcaaaaatctct

SEQ ID NO: 148407 - DNA, 584 bp, Cannabis sativa
ttaactagtaaatttgattatattgaaatagattttatttagggtacaaaacccaacaattatgcacattgatacttggctaaattcaaagaaaatgctcttgatccaagacaaataggtcataaattactccttcatccaatcttcttacatcaatttgcagcaagctactaacagtattctcttccattataggataccgagaagagacgtatggttcttcttcaactggcagcaaatggtctgatattatattgattgtctcacctatccctgccgcggcccgtgttggagtttcacgtttcgacggtaatttttctactgcattgactgatagtattttagccataactctctcaatattgctcaaaattagacgattcaagatgttctgtaaagataaaagagagatctagaacttttatgctttaaccttttccaaaatctaatcagaagatagtcgaattcaggcttgaagtttcaactttattttcttgcacaattttctcaaattcaaatatcatctttttgtgagatatttttatcttttttcccatcttttttctctgatatttttctaatct

SEQ ID NO: 148408 - DNA, 702 bp, Cannabis sativa
gcccactcaagagggtttcccagctgccgatctaccaaaccccgaagttcggtcacctgaatcctcgcgcgggggcctcacgcgccacctgaaggttttacgcactttcccacgcgtcgatgtgtggaggcatgtgtgatgacattttcgacaacattcttttgccggttgtttaatcggttcttctaagcccacttgcatctgtctaaggttgtaatttgatattttttttgccttcttcgtgtttgggtgttcattctttggtgttctttttcttccttttctttgtcaattgttttttacttttgacattacggcagagataaaatcaggttcgaaatcaatcgttgtttctgatgtggttcccgtgatgtctaaaattacggaccataaaattatcggttcgaattatttggaatggagtaaaacgatttgactgtattaggagtattgacaaagatgtgatcacatgactgacgatcctcctaaagaaaaaaaaaacgattcaagaaaaatatggctccgtcaggatgctcgcttgtttcttcaaattcaaaattctattgataatgaggtaattagtttgattaatcattgtgaattacttaaagaactaatgaatttatcagcttttgactgaatttgggtttaagacttctattccagtaaaattgtggtgtgataatcaagctgctcttcata

SEQ ID NO: 148409 - DNA, 580 bp, Cannabis sativa
ttttcaaagcaaacactacagcggccaattctaggtcatgagtcagatatcgctgctcataatctttcaactgacgggaggcataagcgataacccgatcggcttgcatcaccatgcatcccagaccatgtctagatgcatcacaataaaccacgaacctttctttgtctgaaagtaaagctaacagtggagctgtaatcaacatctactttagctgctgaaaactagcttcacacttgtctaaccatacaaaacgctgattctttttagtaaccccagttaagggtgttgaaattttagaaaacccctcaacaaaccgacgataataaccggccagacccaagaaacttctaacttctatcactgtttccggtcttggccaatctctgatggattctatctttcctggatccaccttgatcccatatttgctaacaatgtgcgctaaaaaggacacctaagataaccaaaattcccacttcttgaatttagcataaaacttgtgttcccgaaaccattgcagaaccatgcggatgttgggttttatgccctaaataaaactctttacaatctgattagt

SEQ ID NO: 148410 - DNA, 882 bp, Cannabis sativa
aaattaattagttgttttattttaatttaggtaaaattataaaactaatacagaaaaaaataggagaaaatatagatttttctgcaattaatggtagaaaaaattgcaatttttctctttttttttacattttcgacggtttaaaatcgtcgcctataccctgttataggtgacggttttaaactgtcgggaagtccacattagtgacgttttttaactgtcgcctattttgcctgttttgcgacggtcgtataggcgacggttatagaaaccgacgggaatactttaaataactgtttaaaaacgtcaggaaaaactatttttgtagtagtctttcccaaccacgtgtccaaggaatgacacttgtgattgccaaaattcacacttcttgaatttcgcataaagtttatggtccctaagtctttgcagaaccatgcgaagatgttgcccgtgctctgcttctgtccgagaatacacaaggatgtcatcgataaacataattacaaagttatcaaggaaatccttgaatactctattcataagatccatgaaagttgctagagcattcgttaacggaagtacgacctctataccatatgcactgaagtacatctctcatactagtgttggtagggttgaaccatactctccgatactactagatgttgtaccacatgcattatgtactcacttgtactagtgttggtagcactataacataccctcaaatactatacgttgtaccaatacactacgtgttatattattttataatataataagtgtagattaaaatgtagtaatatatattattatgtgaataatatgtattaagtgtttggtaaataaattgtgtaccatataatttatttaacctaaaat

SEQ ID NO: 148411 - DNA, 851 bp, Cannabis sativa
  modified_base (457)..(464): a, c, t, g, unknown or other
  modified_base (655)..(660): a, c, t, g, unknown or other
aataatttgaaaataaaatataagcgtaagtttcgaatctagaaataaaataataaaaaagtaacttaaaattaaaaatttgtaataacattataaaatagagcaatcccattacacaactctcaaaatatgtaaaccagtttcgaacaataatttaaaaaaaaacactaacaaaaataatcaaaaataacacataacaaaaatttaagaacataatataaatgtgaaaactagttttaaatatagaaaaaaaaaatataaagaaacttaaaataaaaaaaataaaaaaatcataaaatgaagcaatcccattacaaaactttcaaaatccgtgaaaccagtttcgaccctataagaaaatcatataaatttatgaaaccaatctcgaccttatgaaaaaaaaattatctacaccccaaaaacttttaaacacccaattttaataatttttattttnnnnnnnntttatatatttaattgtactaattttttttttaactttttctatttcatattcttaaaaaaatatatctattaaaataaatataaattatattttaaatattatgacagaaaattatattcttagaaaaaataaaacgtatatgtatacataattaagaaaaaaagatatgaaaataaaatcaaaataagnnnnnnaattaacataaaataatgcgaggaaaagtttttaaaaatatattaagagtaatttttaaaattatgtaagtattcttctaatagggcgtacttatcattttatagggtgcaaatagaactcataaaaacttataaatttagttttgactctataaaaagataatatgacaaacttaaaaaaaaaaaaaaaa

SEQ ID NO: 148412 - DNA, 547 bp, Cannabis sativa
  modified_base (333)..(350): a, c, t, g, unknown or other
tgtgtgtatgtgcctatatgtttggtttgggcctagatgcatatagggagctcatttaatttttgtaattaaaatggactaggttgctaaataaaattgtcacatgtgatagattttatttatcttcaattagtattgggcctattcaatgaataacagttatttaattaaggttagattcctctcatttgggccttgtgtgagaattagggggccactagtagtgtgtacgacatactgaacccagcactccctcacatgaacaaccctaattgtaaaggcccatttaccttatttgaataactgtaataggttaattacactagtttaacnnnnnnnnnnnnnnnnnnaacataattaatttcgaaatacatgatttttttttcatcagattattttgaaattaatttaagaaaaataaacttagtttaatgaaacacattcaagataaactagatgtatttttctgtatttaattaaataaagaagttataactaattagatttttctagatactaagagcttgtttggttgtgtttttagttt

SEQ ID NO: 148413 - DNA, 663 bp, Cannabis sativa
  modified_base (310)..(315): a, c, t, g, unknown or other
aatttagagggcacgatttaatgcatgtcaaaatatgggagataaaatttctaattagttttttatttgtttttttttctaaaaaaaaaaacagttatacatataaatatatatttgtttactttatatttatttaagtccttgatcgcattcaaccctccttattttttttcaagaaaatactattttggaccctatgttttgtaaaatttacttattggaccctctattttgttaaataacaaaatgaaccctgtattttctaaaatggtaaacataggaccctaagcttaatttttgacaatttttnnnnnntataatcaacttgaagacaattcctaacacgaatagatattgaaaatgtaaacagttttatcataacatcttcaaatcagcttattattaaattttattttgacaaaaaattagttttgggtcctatttgtaccattttgaaaaatacaaaatctattttattatttaatataataaagggttcaattgataatttttacaaaacacaagtccaaaataatatttaccatttgatattagtatatattattaaggaataattacataaggcactattttttgtaaaacatttatatttttacgttcaaagaatgttttttacagatttacggttttctaaaaaataac

SEQ ID NO: 148414 - DNA, 916 bp, Cannabis sativa
aaggcaaaaactatattttagctacgtaaattgaaaaaaaaaaaattaagtcattattactgtatctcacttgtagttgccactttgttcaaagttgtttttatcaccgtatctcacttgtagttgccactttgttcaaagttgtaatcatcaccgtatcttacttgtagttgtcactacattcaaagctatgatcatcagtaccacatctcacttatagtcaccactatcaaacctgttgtaattaccgcatctcacttgtagttgccactatgttcaaagtcgttgtcattactgtatttcacttgtagttgtcactacattaaaattataattctcagtaccacatctcacttatattcattactacatttaatatcgatgtcattagcaaagaacattatcaaaatcaatagaagaaaaaaaattaataaaatcgtttgaattaattttttgattatacatataaatattaaaataaatgagatattttactttcattatatatttaggactcacatttatttatttaaacaaatatataatttaacaaaatacataaataaaaaattaattaaaaacaaacgtcaaaactaaaagtatttaaaaaaacatacatatatcaaaaaactagttaaatttaaattcaaattatacaaattgttaaaataaaaaaaattaaatataaaaatccttagtattacacactacaagactctaaaatctctatgttaagattgaaaacatatattacatttcaattgcgctaaaattaaaaatcttaattgattacatgaccctatattattaagagaaatgatagtaaatgaccccaaatcataggactatgttagtttatgtcctcattttaaaaaaatatagcaaatgaccttaaatcataagattatgttagtaa

SEQ ID NO: 148415 - DNA, 509 bp, Cannabis sativa
tgcaacagcagggcatgaaatctttagcttcatggatgcttactcggggtacaatcaaatcaaaatgcatccaccagactaagaacatacaagtctttgaacaaatatgggtctatattgctacaaactaatgtcgtttcatctaaaaaatgctcgagccacataccaaagattggtaaacaaaatgtttaaagaccagatctggcgaaacatggaactgcaggaactggaattctattggtccctaggaaccccaccgaactaatcttcttattggtgaaccggtctgccgattgggacagttttgggaaccctagtttttcttgtttttgtgatatttatggtattgccaagttgatagggaaacttttagtttcaattttaagtctctggaaagtaatttagcatgtaactcatcagttttctaaataatgtgatttaagggcctataaatcgtcgagcagcagttccaccggaccacagacgacagcaccacctatgctcagatg

SEQ ID NO: 148416 - DNA, 541 bp, Cannabis sativa
  modified_base (484)..(510): a, c, t, g, unknown or other
agtatgatgaatgatatggctagatacgtagcaaggtgtttgacttgttagcaagtgaaggctgaacatcaaaggcctgcagggttgctgcaaccactgaatctttcaaaatggaaaagggaaagcattgccattgatttcgtggttggattgcctagaaccacgggacaatacgactctgtatggacatagttgacaggtttactaagtcagtggacttcttacctgtttggacgaacttctccattgatcagtatgctgaattatatgttagagaaatcattcgtcatcatggtgtcccaaagtccattgttactaatagggatccgaagttcacctcaagattctgggagagtctacaccgagctatgcgtacttaattgaaattcaacacaacattttatcatcagatggatggacagtccgagaggaccattcagactttagaggacatgctacgggctgttggaaattattttaccannnnnnnnnnnnnnnnnnnnnnnnnnnttattaacatcctaaataagaactttctaaa

SEQ ID NO: 148417 - DNA, 568 bp, Cannabis sativa
aaaaaaagtgaatagtcagccacctaattgatccatctaccatgaaatattttaatctcatttagaaataaaataataataaaaaaaattgccttaatatacactatttgtaagtatcacccttatttctgccacaagagtttcagccattacatgctgaacttttagcaactcgagcgggtgtacaggtaggcttacagagaggatttcctagcttttgcttagtcagattgtttacaggctatacagttaatttgtattaaggatgagaggtgttgggatgttgatgggttgttgaaaaatattaggactgtgtttcttaatgattgtgaaaaatattagcttttgtgcatagagaagctaatcaggtagctcatgtgttagttaatcgagccttgtactacaaaactagtgcaatgtggattgggggttaatcccccatgtgatagtcaagatttacagctagacttgcctaatcctttgtaattgttgctatgaatgaatgaatgaatccatttcaaaaaaaaaaaaagaaagaaaaaagaaaacctgccacattagtgtgtaa

SEQ ID NO: 148418 - DNA, 772 bp, Cannabis sativa
tacttgttaaaacgatacgtatacttgcgtgttggattgatcacaacagatttcgaagcttgagagactttaattttggtcttttggggaagcaatattgacgtttgttggttaatgctgattctttggttagtaggctttataaggctaaatattatgctactggtaatctgttttctgctgtattgggagacaatcctagtttcatttggcgtagtattcttgaagcaaaagatcttatccacgcctgtgctcaaagaacaattgctaatgggaaaaatgtatccattcttaatgatccttggcttccacataattcaaacaacaacgttatctcactacaccctgctcttgtgaataagtcggtcagctgcctctttcaagtcggtactcgctcgtgggatgaggatgttgtgaaggacctgcttgttgcctatgatcatgaccttattttatccattcagcttagttattcggccgctaatgatggttggagttggtgacttgagacttgtgggaattattcgtgcatataaattcttgcaagtatttaagggtgcttggtgccgagatgccaatactgatttttggaagtgactttggtcattaaaaattcctcttaacatcagtaattttttgtggcgagctgcttcgggtgtgcttccaacttgttttcaactccacaagtgaaacaccctaactagcataggcgtattacgtgattttgaaacgtactgtgcagctcgctgctaatcaacaaggtttatggaaa

SEQ ID NO: 148419 - DNA, 595 bp, Cannabis sativa
tttgtaaaaaaatgtgtacatccacaattcctctctttgtctataaattgatctatattgcatgcgttcataatacttgtcaggcactcatgagactcatctcatcaactcctttaacttcttttgataagaacataaaacccgagatagaagagacactagagaagttgaagtttcttctagaccataaagatcttggtctggaacgtgtgagaaatcataagaagccagagagggtatgtggtcctttggtggaagaatctgatgtttatggaagagatgttgataaagaagctattgttaagttgcttcggtcagatgacacaactggtggtgacaaattgtcagtgatcccagtagtgggtatgggcggtattggaaagactactcttgctcaacttgtatacaacgacgacaaagtcatcaaaatgtttgataccagagtttgggttactgtgggagacgatgacaaggtgaatagttctaaagtgatgaaaacaattattctgaaggtcgcatctgccaaatgtgaaagcgaagaggagtttgaagttttaaatgaagttaagaaggttttggctgggaagaagtttct

SEQ ID NO: 148420 - DNA, 904 bp, Cannabis sativa
gtgccccatccaagtccggttccttggtcctagtctggttccaagttcgggttcaggtcctgagtcttggttttagtcgaggtcgcggtctgggttcaggtctagggctcgatccctatctttgtctgggtttaggttagagtccttgtcagtgtctagatgctggtctgggttgcgagtgtcaggattcggtgagggtttaggacaaggtcaggtccaggtcccgatgccggtcctagtccaggttcaagtcttaggtctcaggtcccaatttggttccgggtctgggtctgggtcaaggtttgtgtcagggtccgagtcttagtttgtgtctgggtacgggtttttcggatctcggtctgggtccaggtctgagtcaaggttcaggttcaggtcttggttctgggtcccaagttcgtgtctggctgggtctacgtctgcgtctgggtctaggtcccgtgtttcaatccctgtctaggtttgggtcagtatttcggtctgggtatgggttcgtgtccatatctaggtccgaattccactttaggtcaaggctttgtcttggtctgggatcgagtcccgagttcgtgttgaggttctggttcgagtcttagtcctagtctaggtctagaactgggtttgagcccgagtttcggttctaggttcggtctagttctgggtccgggtcgaggtccaggtcacactcccggccatgttccaggctcctcatcaccttcttgttcaagtttcagttttgggtcccacgtttgggtctgggtctaggtccttgtcgaacttcgagtctttctctgagtccctgatcaagacatcgactatgggtcttgtccaagccccggttctctgatcacgggacaagatttgcatcccaatcacgggtcccagtctt

SEQ ID NO: 148421 - DNA, 932 bp, Cannabis sativa
ttttgtttgaaggaacccgcctagggccgtgtctgaagccccatccgtgtgggggaattctacttgcagcctcccctgtgcggcaaacctcggccatccctccttgcttgcgcgcgcggatggtatgcattacataccatccgcacccaatgcaaatttttttcattttttcaaaatttcatgttttttcatggaattaatttcaaaattttttgtgtaattttgtatctagatttttattttttcaaatttcaaacctaattatcagactaaaattaattaatgttagatattagtagtttttgaacctgaaaatggataaaatctgatattttgcttaattggttatcttatttgtaaaattttgattattttatcttatttttaaattttaagtcatatattttatattttgcattatttaattaattttataaaatgaccttatttgaaatttaagataaaattattttaatctagaaaatttaaaaatttgtcaactttcaaaattttgttattttattcaaattaaattataaaattagataaatgatatttatttatcattttattttattagatatttaattttcttttaaaataacataaaagtttgaaaagttagttggcaattatttgaatagatattaaggtttgttaaaaaccttatttttctaatttataggtttatttttaaaattaattatttaatttatttaattattttcaaaattatttatttatttattaatttttgaaaattaatttaattaattttaattcaataaatcctgtatccatctatccagtttgttgcatgtatgtatgttttatatattatatattatcaaaacttgttttataaaacctattattgtttgatccaaattgctatggttaacttgttgacaaatccaatgatctaattttaa

SEQ ID NO: 148422 - DNA, 548 bp, Cannabis sativa
tcgatgtaggtttcttttttttctcaaccaaagatccactaccacctctaccataattggtaataaggggagtggtgacccgaccttccgtcataccctcttaaggttttggaacaaattccttagggttctcaattcaaagggcgcttttcacatctaaatctccttaaagggctagagattcttgcatctaatttcccccatgcaatggtcccacttgcttaccagccatactccgcttcactagtaaaactgaataaaaaataattggcatatgaggtaatggtactaccgaaaacctttgttgtttcaacctctgaatttcctcttcatgtcactgaattatagcttttatctctacgaacctctgctccaaatctagcagagtctgtgactgataatcatcacacccgccaaaatccctccatcggctttcacctcggttacgaggataacttggactccattttctccaaccgttactagcccttaccgcactattgtgaccttcactattgcaccaggtgtccattctatggaacaaacct

SEQ ID NO: 148423 - DNA, 514 bp, Cannabis sativa
cttgtttttcattaacatcctccctcaaacaaaatggtgtatacaccatttttagtttggttttcagataaagaaagtgttttgttgtgagaacttttgtgagaacatcaacagtttgatcatgagctaggacaaaatgaatagccaatttcttgttgacaatttgatccttcacaaagtgaagatcaatatcgatgtgtttagattgagcatgaaagcctgggttgggtgccaatgctatggcactttgattatcaacccaaatgacagggctatgaagaacaaagacatgtaattcttgtagtagagactggatccttattaactcagcagcagcatttgccaaggctcaaaactcactctcagtgctggatcgagccacaacatgatgtttctttgctggccaactgattggattgccccctaagaacaccaaataacctcctgtggagcgtctatcatctacacaactggaagctagccagcctgtgtaatacctggaattaagaaatgg

SEQ ID NO: 148424 - DNA, 734 bp, Cannabis sativa
attatttcatcatcctcatcatcaaaatctgaggaagatgatgatgttgttgctaatgatgatggagatgatgatgttgccgttgttgttgatgatgatggagatccacctgatgatttatttatttattgtatacaattatatgtggtcaaaacatttttttctctttctctcactatctctctttcttccccactctttgtgtggctttttgatattccttctaaatgtgtcctcccattctttctcatcatcatcattgtaatcatcttcttcttaaataaaagttgatatccatatcttcttatttttatttttttgttctttggattctaatttcagaaaacttcaaagaaggagataatagatttggtataatagatgtattcatggtatcaccacacagtgaaaaccttctgttatccctattctcagataggttctacgtggaagtagcaaaaagggtgcacatcagatcgtatgggaatatcccagatttccctttgtttcaagataggattaaggaaggcatcgaagtatccatgagaccgcacccattgtgaaggaggaattgatccttgaagttgtaacctaatacttcctgtattcgaaggcatacgcaaaacacgggtcttccggaggttcttaagaattggctattctaggaggtcccgagtagggctgttcatccgatccaatccgcactttttcggtcaaacaacatccaatccgca

SEQ ID NO: 148425 - DNA, 518 bp, Cannabis sativa
tatctcgccatagtatgtgagctgatgcagaaattcaagaaagtagtcgtgtcctgagtaccgcgtgctcgtaactcacacgcaaacgcattggcccgtttggcgtcaaccagagaagctgaattacgcaatgtaattcctgttgacgtattggctcacccgacgataaatcaagaagcgataatggaaatagataccgcccaggaagtcacctggatgactccaatagtcgcatatctaaagaggggtatcttgcctgatgacaagatagaagcaaggaagctgcagcagcgagctgcccgatatgtcatgtatgatggaagattatatcgcagaagcttcagtcaaccgttacttaagtgtattgacggggaagacctggtggccgatgcaggtcacaaaagactacgactacatactacgtgaggtgcatgggggtatttgtggcaatcatgcaggtggtaattctcttgccctaaaaatcatgcgacagggatattactggcctaccttgcgac

SEQ ID NO: 148426 - DNA, 707 bp, Cannabis sativa
attttactatcacacagaatttttataaaaatactgtctttttgtaaaatataaaacaacaaaacagaacaattaaaacaactgttgaacaactaataaaaaacaaccgtggaacaaccgtgaaaacttaacacattacacggtataaaacatacacagtatttttgaaaaaaatttcacctcacagtagaaaaagtaagaaatttcagtatttggtgtaaaattctcatattttttttacttagttttttttttttttggaaccaattgtaaataaattataaaaacaaattgttagcgtagtttttcgtcaactaatctaagaagatcataaaaataaagaggaccacgatgaattaatttaactaataaaagcgtaataaattaaattgacaccagggatttatagtagttcactcccatgtcgcgattgtaatggggctacgtctatttttatttttattgattagatccgacacaccaaagttacgttcccaagagtgtgtagataaaagtacagcaaaagacttttaggtgaaatcttaatcgattgatttatgaatataagtgttatacccaaaattcgactgcacttcacaagttgacacatgtccaacaaaaggaatacaaaaaaatctgaatgatacaaaatgcatattaaataactcatttattaattaaatattaaatagataatattcaaaact

SEQ ID NO: 148427 - DNA, 626 bp, Cannabis sativa
gcctgcgaacccataagccaggcaggttagacagcgatcataaagcttaataccgctcttatggacttaaagggaacacacataaaacaaataattatattctaatatggttcctaacatactttaataatcacatatagtactaaacaagtacgggcatactgaaccgtgaatcgaactttctctaacgaagattgtacatgtcttggcaagcttcggtagacaaacctagcagctctgatacaaaaatctaatgctaaggcacgctatagtgttttgtttttcaattacagtgctatctttgctaatcaaagttttttctcaaaaaacgtgtcaaatttaaactttttataataaatagtaaactttataatttacataattatttacaaacaccgagatcccgtttctaaacttttatacacaatataccaaaatacgtaatcaatcgcacagcgactacaaaataatatccccagatgtctcgacactgaacactccaggtggcgctgcctcgacatgtacaatctcatctcagccgaggctcactcctgttgagccttcgcctttcctttacctacacatgcaagcagaactgtgagtcgacagactcagtaagaaaagca

SEQ ID NO: 148428 - DNA, 581 bp, Cannabis sativa
accctgacctagaaccaaactcggtcccagaattagaactggaactatgattaggacctgaacctgacacatgaacctaacctaaaccataacccaaactcggactagaacctagattgcgaccttgactaggactcggacctgacacttgggacctgaaccttgaccgggacctggacttgacctggtcctaaacctttggtgggacccaaaataggatcaaaaccctgacaggggcccaaacccgaaccaggaccaagacagggaccgagacatggacccgaactcaaactgagtcctagacacaaaccaagactcgggacacaaacctgaacctggacccagaccaagacctaggaatcaaacttggatggaagacctagatcccagaaacaagacccaaatcagaacagggactcaaacctgaactaggacctcacctagacccaggaatccgaagtcagacccatactcggacccgaaacctgccccggacccaaaccaggatgggaacctagacacggaccatgaccaaacccgaacttgaacacgaaccaaaaattgcacccgaacttgggacc

SEQ ID NO: 148429 - DNA, 542 bp, Cannabis sativa
  modified_base (123)..(140): a, c, t, g, unknown or other
  modified_base (203)..(208): a, c, t, g, unknown or other
tttttttaaaaaaaaaattatatctttacgtttaatgaattttttttttatatttttactgttttttataaaaataataaaaaactacataacagtaatatgaaaataacatctaaataacannnnnnnnnnnnnnnnnnataacatacagataataaaaaatcaacaacaaattaacatgaatacaacataaaaagaccgtnnnnnntgtaaataaaatcaaaaaatttgtaaaaatgtttaaaattccgtgaaatcgtatttttgtgtatttgtgaaattattcctatattaattatacattaaattatatatatgttccaagatttcaatttctcaaagttggagatagagactgcataggaattttttataatatttctttttgaaaatatgttagtcaagtttgaatttttcaatttaatttaatataaactttactttaataataatctttctgacaatgtacaaataatacaattaagtaagcatcaaacttattagttgtcattttccttaaatcactactacaatgttagcct

SEQ ID NO: 148430 - DNA, 881 bp, Cannabis sativa
  modified_base (428)..(429): a, c, t, g, unknown or other
acatagttcttgttttagtgagtaatcatccctaatggatgaacgttcattagcaatttaacaccatagaatctcgaaagataagtattatttgtaagtgtttcattcttagtaatgatccccctaatggtggtgctaaaagtaagacttacaaaagtatgaaacaatggtggaggctcatgaaataggaatgaccttgactctcgcctaaacgtgataacgttggattctcttttcgatcgaataaaaggtttctagaatgtttgtcattttagatgagttgactaccctattcaattgatgatatctttgatctcacctaaatgggacactgtattagtttgttgaaaaccttagaaaataattaaatatgttttattttgatatttttacaaatatatttgctttacttgttattttctgaactnntgtatgaatttatagaaccaaatgatttatttctgtttattgatatttttaatgtcaaaatggcaaacacacaccccgaccctctcctagaacatgcctttgcaaataaaatctataatgtaaaaatgcttcttggtaagaatattaattcacatttattgatgatgaatctgaagttccagaaagcaaattttctgggaattgatttatctagacagcaatgggtttagttcattcttaatagtcttcctcctgagtataatggatttgttgtatcttatatgatcaaaaattttaactcgtccgacatggataagctagaagcagaattgcgtgcttacgaggagcttacctgcaaggaggccaccgtccagtagggttgtatatcagtcggtttgggcggtttctcctatatattttctaacccaatctaaagttcgggttgctaaaat

SEQ ID NO: 148431 - DNA, 856 bp, Cannabis sativa
aagtaacaaaagtagagaaggcccattagtttgtatgttgataacaggtttcctgccaagacctgaatcgttggtcgagttttttgctatggcaaaactgcataagaggattcagaattctctagccgaactagagaaaggaaaggataaacgcgagtcgccggtaccacgatcacaatcccgcagtcctagaggaaaaagttccagggggaggagccctagaagacgcaatccataaagataacaaagtttgaagttggccaaatcgcatccgaagaaggagtcatctcccaagaggaaaggaggtccacgttttgtgaactacatagaattggcggttcctcaagaccatatctatgcaattgaagaaaagaacagagtcttcaaaaagcctcccccaatcaggggaaaccgcgacaagagagacccgaaaaaattctgtaagtatcacaaggatattggtcatactactctggaatgtttgtttttgcaagataagatataagaattaatcagacaagggaaattcaacaaatataagaagaatgaggagagtcatccccaagcagatgacaaagaaaaaaataacaatgcgagtggttcaagaaatcctcgcaatatattgaccatcatcggcagacctcacatcgtaggagattccaggaaatcgcatgagcgatacgccaaggaggccagagagaggccactcaccaatgtgaacaatttgagtgagcgtccagaaaaactgttcaagaaggaatgtgatgatatcacatttatggaaagcgatgttagatgggttcaccacccacattccgatgcactggtcattgtcgctaacattggatgagataat

SEQ ID NO: 148432 - DNA, 798 bp, Cannabis sativa
aaaacatcatggcacgagctacttctaacaagtgtttattctttctttctgctattccattttgtttaggagtatcaggacatgtagattgatgcaaaatacctctttcttttaaaaagtttcccaagatgtgattaaagaattctgtttcgttatcagttcttaaaatattgattttcaatcattttgtaaaaatcggtaaaaatttgttcaacgtcagactttttcctcattaaataaacccaaaaaaaaacgagtgtggtcgtctataaaaataacaaaccatttttttccagaattagtagttagaaggtccccaaacatcactctgaaacagataaaacggttttgaaggatgataaaaagatttaatataagatttacgttggcttttggccattaaacaactttcacattgaaaaaataaaggatttaaccgtttaaatagtgctggaaacaaatgttttaaataagaaaaactaggatggcctaatctataatgccaaactattatttgatcatatacataaagagaactaatgctactaaatccttgagcaattttattttcagaagccttatcttcaaaataatagagtccattaataaacatagccctgccaatcgtcttccttgaactctggttttgaaaaacacaatgagattcacagaaaaccacacaacaattagaatctctaagataatttgctgacagataagagattgcaagtaagtttaggaacatggaggacagatttaagatctatccccttagaaatcttaattaaaccttttcct

SEQ ID NO: 148433 - DNA, 530 bp, Cannabis sativa
ttagtaatcaattataactagttattacttacacaatgtaactaactaggtttctcacaattaatttatattaatttatatattactaaaattcttcttttagttcggttcatgatattaagttatataagttgtaataaactaattactagggtagtgtttagttgattggaatggatctggtaatggaatgatttttcctaaagtaaatccattcatttatttggtttgtcatttataattgataagtttatatcaatgtgtatataattatttatgttatgtcacctaatttattataactaggttgtaattaactagttatttgtactagttatttgtgttatgtcaatgtttatgttttttttttatgtttttttagtaaaatttatcctaattctatcaaaatttcagcagcataacggatctaattggacgtcgccaaaaattttaaaaatacctaaagtaacaaacaaaacaaattaaacaatacagaacaaacaaaataacattaacaatacaaaatttat

SEQ ID NO: 148434 - DNA, 945 bp, Cannabis sativa
gtatgccaaatttaaactataaatatatatatatttaatttagacttgaattttttttatcatgaaccccatacatatacacatataatattatatctttctaatgcaactcatatataataataatagcacatatttaattatatatatcaaaactgtataatatatatgtgcctataaactaaaattttaaaattattaataaatacctcatatacataactatgaatatttaaccaaaatatgaattaaaaagttttaataaaaagatcacacccatagctatggtacacttaatccaaaagcccaaaagacccaatatatgagtgaaaatttagaatcacatcacatatgaatacatatgtcaaatataaaatatatatgcatattctatgatatattagtagtcgatcccaagaaaacatcatgtcaccaaaaaaaaaaaattgcgactgaaaccttattagacataatgaatcaataagattcaaacacagactatctcatcacttcataaaattaatttcagaaagaaaaaaacaaataacagatctcatcgcatgcatatagatataactagttctctttcccaagaaattgaatgattaatagattcatatcaattaactataacaattttggaagataaataccaaataaataatcacaaaattataaccctagatcataaatggaagaacaaaacctaattttttagatttttagaaatccccaaatttttaaaacacaaaccttaaatcatcaaagaatcaattaaaggtggctctgataccacttgttagtttctttatcactcataaaatatgtaataacaatattcaattttatagataaaaatattacatataattataagtgtattaccatagatctaaagaacacatttattgattcaaaaagaagaagttgttggaaatattttac

SEQ ID NO: 148435 - DNA, 566 bp, Cannabis sativa
  modified_base (294)..(294): a, c, t, g, unknown or other
ttgctcgttcacatactgtcttgtacgataaagctgtgcaaagcatcaaaaaattgaaatcgaccttgttacacaagcaagtgatattttttttggtgtacggtactccaagttgacgagcagtgccctcaaatttttcatgtctttttgttgtgcccgaccaataaacaacaccgtcttgaattttgtcaacattatcaccaatgacagataagccattcttgagagttaaatttaaattatgtgcacaacaacggacatgtagtaactttcccttcaaaataaaactgtcangctcaaattgtcctttcaaaagctcaattatggcatcatttgcagtatagttatctagagtcactgtaatgatcttgtcttctattttccattcatgaagacaagatcttaggtctcaagtagtgctggagcatcatgacgacacgaaacatacttaaaactcaagatctaactttgcaatttccgagaatcatgaataaaatgagttgttacaaccatatatcccctcttctgataatttgcagtccacatgtcactggttatggctattc

SEQ ID NO: 148436 - DNA, 843 bp, Cannabis sativa
gaggatccaatccaattgcggataaacgagctggaagacaagttcaggagatatcaagtgggggaatcagggaaatcatttggatacgactctgatgaggagcttgagccgtatcacccagatattatgaataccctttttacttcgggattcaaaaacccgcatgtctcgtcctatgattgaacaacagatctagtctcgcatttgaatagctttaatacgataatgcgagtgagtaacgtgacgaacaatttatgctatattttgttgcccacctcgcttgttggagtagcgagtagctggtttaacaagttcactcgtcattcaataatttcctgggagaaactgtccagggatttcaagatgtaattttaagccgctagggataggcgacccgaagtagcctcgctaacaaatataaagcagagcctgatgaaacacttaaggcatacttaagtcgttttagcacggttgccactagggttagaaacttggatgacagcacgcaacttacttccctttaggtggggatctccactgatccattaactgcagggggcgagttgtgggatgatttgcaaggacgttcggtaagaaacatcactgagttcaacgagagggctcaggtgtttatccgaaaggaagaggcccgaaaggaaatgaacttattgaaaaaaagctcgggaggtaaacccagcaatgtttcaacaaggactacttccacaagaattgataactcgagggcgtctggtctgaaaagaaaggatggaattagggaaccatcaaaggatagaaagaaacaaaagaagcatgaaaaatatgtgccagtgtatactatttata

SEQ ID NO: 148437 - DNA, 530 bp, Cannabis sativa
aaaaaaaaaaaaagtaatattttatgtaattatctctaataattaatatatatatatatgtacaaacaactccattgatgttaaattaaaaaatttcttagtaagatatatgaaataagtatggaaagtgattgcttgactcttgacttgacgcaagtctttgcaaaattttgatcttatagacagagacaaatttagtaaatactaactatcttgatgaagaatttcataatataatttctatctagattgaattagacggtatctttatggaaaatttgcgacataaatactatatgtttttaattttatatactggtacgtttggaaagccacaatgtaattggatttgtgtataattggagataattacacaatttgacatgtttgtttgaccatgtaattacactgtaactgtgtaactaaaaactttccatatttcttttttgaaggaaaaaaactttccatattaaacattagctattaaaaaaatattacttttccatataattactaactattttgccaaa

SEQ ID NO: 148438 - DNA, 504 bp, Cannabis sativa
gtgaagtgatataggctaaaattggtagaatgaatggaaaattggtaaacataataaattttttaaaaaaatggtaaatattaaaaacatcaaattaaaagaattatagtgtaattttctcattttttatgttgcgtgttaaagaggtatatttcggtttatatacaattagggttaggtttagttaaatggtgggcttggcctataggtgagatagaagatttcttttttttttcttcttttaaatcaacttaatttttaccgtcggttcactcacaactaacgcaataagttagtgtccgtttacaatcgacacaaaaaagttttgctttgcgtcgcactacagaaaataactacttttagtgacaactttttaggtacaatatcaattttttgttaatcacaacaaaaaaatacttgtgactaataaaacatagtatttagacataagttgtcactaatttacttttagttacaacaagtattgtgactaaaaccacattt

SEQ ID NO: 148439 - DNA, 574 bp, Cannabis sativa
taggtttagggttattttaactattatcttagagcatctccaatggtagtattgtgaagaatgtgaggtggaagaataaaagaatactataccattagagataaagaatgttattcttgaaatttgtattgatgtcacaccatgacattgatgctatattttttttttataacaaaaaattaaaagtgcaatatatataatagattaataaagaaaaaaattatatatattataatgtgtgagatcataattatagcattcttaaaatgtgttatattattggagtgtttttaaaaataaaacgtgtcaaaaataatgtggaagaaagataaaataaaatattatatttttagataatgtgaagatataacacctttaaaaaatgctaccattacagatgctgttggaattgttattcacctaatagtctagattctaagtggagtgataatttgtaatggctaattaggatttttgccatctgaactttgacatttaccaaatcatgccccttgagcttttaagatcattaaaaataccccctgaactcttgagattgttagatttaaggact

SEQ ID NO: 148440 - DNA, 511 bp, Cannabis sativa
caacacaatggaacttaaggttccgtgaattcatgctgcaaacagggtagataaggagtgagtatgatctctgtgtatactttaatggcacacctatctggtcactattctatgttgatgacatactaatcattggaaaggatagaatagccatcaacatgctaaaggatcaactcatcagaatttgaaatgaagaatttgggtgaagctagaagaatactgggaattgacatcaaaaggcagagaccaagctcgatttttctatcacaagaagggtacagtcagaagattataaacaaattctgcatgagtgaggccaagacagtttctacaccacttgcctcacatttcaaactaactcaagactaagcaccagacaatgaagaggacagaatctacatggcactactacaaataattcacgtcggtttttaagtgtcacttaaagaatttacgtcggtttataaaaccgacgtatataccgtagacgcaaatagttttttattagcgt

SEQ ID NO: 148441 - DNA, 554 bp, Cannabis sativa
  modified_base (63)..(83): a, c, t, g, unknown or other
atctccataatttataaattacgcgtatttactcacttatagaaaaatttaaattttatgctnnnnnnnnnnnnnnnnnnnnnaatcccacttattacctgattaacccataatatataaaccctaaatatataccattaggcttatcgagatattacagaggccatactcaacttatcattatattacttgttgtcgattgtgtgcacttacgtatatatgtatatatatatgggtatactcttaatgggtattacctatgaatgggtattctataattagtcattggatcaaatctaatggttgatatttataactattaattaaatttttaaatttaatatttcttattttaacctattacctaatgacatggaagtcattttttatacattctttctattttctcctcattccatatatatatatggagagttataattacacaccataaaataataataactacaccccaataaatatttacattttagtaaaataacaaaaataattacttttactccactactaaaaaaattgatttgattgttaca

SEQ ID NO: 148442 - DNA, 703 bp, Cannabis sativa
gaagtgtgtctcctcggcccgttatatggtggttcatgggaaccatgagatgggtcctattctcccttcaagagagattcgacaaggcgatcctttatctccatacctgtttattctttgtgctgagggactttcggccatccttcgtaagtttgagagcagaggtttgctacacggttgtaaagtggctaatggagcaccaagaattactcatatgctcttcgcggacgatagttatctctactgcaaagcaattatgttggaggcaacaagaattcaagaggtgttgagtaagtttgaagcggcctcgggtcagaaagtcaattcatcgaaatcctatatcttcttcagctcaaacacggacatggtcacccaacaaaacattagtaatcagcttgggatgaatattgctattgaaaacagtttgtatctcggtctccccagtacaataagcagaaataagtcggcggttttgggctttctcaaagaaagagtctgtaaacgtattcaaggatgggagtccaagtttctttcccgagcgggtaaagaggtgttaatcaagacagttgctcaatcactaccaagctacgcaatgagcgttttcttacttccattagagatcacaagggacatggaaaaggtaatgaccaaatttcggtggcaatcttcaaacaagagtggaaaaggcatacattggctatca

SEQ ID NO: 148443 - DNA, 527 bp, Cannabis sativa
gcatttaatgatataatcgttattgtatctgttggttcacattctacgagattgacacatgtcactctctgaagtacaaccgaatttcgggtataacaacaacaaaacagaacaattaaaacaatagtggaataactaaaaataaccgtagaacaaccgtgaaaacttaatacagtacacaatataaaacttacacagtatttttgaaaaaaattctaccccacagtaaaaaaataaaaaaataaaaaattacagtatgtggtgtaaaaatctcatagtaaatatgtacaaataaaccattttttaaaaggaaattccaagtaatttttcttgctgtatttacagtgagagaaacaatattgaaaattttcatacatgaaattggagatgcaaatttactgcaaaaaaaaaaatggttatggaagaaatgtgatctttatcctttaatatattatatggagaacatacaatactaaatttgccaaaaaaaaaaaaactattttttaaaatactaaatgtcaaataaa

SEQ ID NO: 148444 - DNA, 555 bp, Cannabis sativa
aaataatttgtgaaattattattttttactaattatgacaattataaattatttaattaatagtatttaactatttagttttattagataaaactacattaattagttaaatataatattattcttatataatattaaagtgagaaatatattattttagagaaaataatatttattttaatctttgtgaaataagagattaatgagaattaattaattattatttattggtagaataaataataaatcttatttgtggcaaaattaagaaatcaattttggtctttaaaatatggcccacacgtgtaggtccattctacacatgtagggtaacatataaagacccatgattgatttgattagttaaaatagtttaaattaaattaagttaattatcttttaattatttgataattgtttaactaaaaggttatttgttaaaacgaaagatctactaatatttgatattcaattattagatatttatatttgaatttaaattttaaatttaaatcaaattagatatttatgttttattttaaataaaggattaaa

SEQ ID NO: 148445 - DNA, 800 bp, Cannabis sativa
  modified_base (767)..(773): a, c, t, g, unknown or other
tcatgatgcttttaaatccaatttgactgcagcgtgcaggtgtgacaagggcgaatcttgcaccggattgttgatctatagccgacccgtccacatgtagtttccaagttggcttgtcttcactgttacttggctgaggtatttgtactggcacggggttgttttatgatacgccttcttccttgcccgtgcattcaaccacaaaattcgctaaggcctgacttttaatcgttgttcgaggttggaagataatctcatattggccgaactccactgcccatttgagcagccgtccaaaggtgtccgttttttacaatatttggcgtaacagttggtcagtgtatacccgaacaggataagcttgaaagtaggtccttagctttcttgttgctaggatcaggcagtaagtgagcttttctattaatggatatcggccttcggcctcaacgagtcttttactgatgtaatagacagggtgttggatgttgttttcctctctggtcagtacggcagttacagcatgctccgtgacagccaattatatctcaagttcttctccttccagaggttttgtgagtttcatttttagctcttgaaaagctttttcacattcctccatccactcaaattgtttatttcctcgcaggatgttgaagaattgaacacacttgtttgttgattttgaaacaaatctgttgagtgcaagaatcagaccagtcaaactttgaacttccttagttcttgttggcgatttcatatccaggagnnnnnnnatcttctctggattggcttcaattcct

SEQ ID NO: 148446 - DNA, 576 bp, Cannabis sativa
ctctgctgagaaggaacttcgagcttctcaaagtcgtgataaggcagtccctccaaccaagaagaaactcaagaccaatccaccctcggcttcttcaagttctaattcagaagaagaagatccaatggaagtcttttcagacaaatcagtgtctcttcattcagagaaagacagtgaggacacagaactcgagccagagcctccttggtcaaaatctgcttctgcagcaaaggcttctgctgctgccaaaggcaagcagcctatggaagagccttctactggtaatgttccttcaactctatctcactgccctcgattttattatcgtgataatgaacgagactggaatttatatgcaacccgtaagtttcaaagtgagaggaactatgatttgcatgctcatcgggtttatgggattgtaaagtttattcaatttcatcaatgggaaaacactcttactggtttcactgggttcattgcaaacattgttaaggatttctatgctaacctcactgatgattttcttgatgagaattctagactttatcgaagagtttatgttaggggtcattggtt

SEQ ID NO: 148447 - DNA, 1014 bp, Cannabis sativa
  modified_base (593)..(593): a, c, t, g, unknown or other
  modified_base (633)..(642): a, c, t, g, unknown or other
  modified_base (700)..(709): a, c, t, g, unknown or other
  modified_base (735)..(737): a, c, t, g, unknown or other
taacaatctcaatagttcggggagaatttttaacggctaaaaaagtccaggacacgatttagtacatgtttcaggggaaaaaattactaattagccaacaataaatagaatagagttatcttcaaaaaatgtcaaactctatgaatccaaaaaaaaatgcttttaaaaatgaaaatgtttcctatgtttagaacttaagctccgaagaaggacaacatcttttgggcagaacaaattgaaaataaagatttaaaacttatttgtttcaccataaaaaaagaacaaactatgtactagtagataaaattacatagaaattatttgtaaataatatataacaacaacctcacaataaagagtgtggaaaaaaaaaactcatctatgtgaaatatattactttcaagcatcgatcagtatctataatccaataacttcaataactataataactctaaaaaaaaaacattagataataataataactaataacttcaataactgtcattatttaactgtcattatttaaaatattacttgtgactaaaacataatatttagttacaagttctcactaatttagttttagtcacaanaaatattgtgactaaaaatacacttagtcacaacaaattnnnnnnnnnntgactaatacttttagccacggacattttagtcataacataggaataataatttatannnnnnnnnnattttttcacttttagtcacaagttnnnttgtgactaaaagtaagatttttcatattttcatctttgtgaggagaaagtttattgtgtgaaaacttaggatgttcagctaggttttagtgtttgttttgttcttctactgttcgtagaatcggatgaagaaattgtttgaacaagcatgggtcttcgagagaagatttttctaagtctcatttctggaggaagtgagtatatatcttcgggagaagatttgtttaagccttacttgagaggagtaagcacacatcaatagctgaagggagttcac

SEQ ID NO: 148448 - DNA, 772 bp, Cannabis sativa
aacaaacacagaaaaatactcgtgggagaagcaaacgaaatgatataacaaaaatggttagcgagggaaaaaagttagaggttgagtacaataactacggacaacactggggaatgggagcgacgacaaaagttaccggaattggagcatgggtgcgaactaatattccacttagagacattacgtggcctagagtgagttaggaccttaaaaaccgattatgggaacacataaatgtaaaattaattctattatttgaggtcttcactattgattataagttgtacttataactatactattgtgaatgtggcaggtcgcgtttgatgtaccggacacagataggaaattaacaattgttaaaggtggagacaggtggaaagattggaaaaataccctaacaaaaggtatttttacattcaaagatgtcgctccccatcttctcgagaagcccccaaacctttatgaaaaaaaataattgatttgcaagaatggagagagtttgtggactcgagattaagtccagagtttgatgtgaagaggaagagggcccaaaagagtaggtcttgtaaggtttatccccatcgcacagggagaggtggtgtaaggatggttcaagaatagatggagaaagaggccaaccaccaaattactgaatttgatagatctgaactctggataagatctcacatgaacgcgaaaggcgaggtggagggcccaacgacagaaatcgctaaatggattgtaagtttaaagtttaattttatttgta

SEQ ID NO: 148449 - DNA, 746 bp, Cannabis sativa
attataacaaataaaagggctcctgccgaatccaacggtcctagatttggaggtagaaataacaggtttgaatcatcaaccatatcaaccaaatcaattaattattagattctttcaaagaaattaattattatatctttttaaaatttatcaagtgttaataaacaaaagtatatgagtaaatatataaggtctactaaggcttttgttcttaaatatatagcacccagaggttgttgttttctccagccctccctacacttaggcgtgacttggtcaggtttttgtttttgcaattagtattgtttctgtgacatagttttgagttcttttaattgagttatactactattgtttaacttcaatttttaagcccatttatcttagttttataaaattcttgctaccgaagaaaattgaagtaaaaacgtaggttttaataatactggaatgtaaggggaacttatgtcttaggttattacaaaataatcaaaaatagaagttgaactaattttcaaatgcgcatggagagcagaccctacgtcttcaattactacatactaaccaagtacatcggttattatataataactaaagacgtaggtcctgccttttttttaaattttgaatttatttatctaattctcaatattatttttaattattatatattaatttttattgaaataattataaattaattatattaatagagacttaatttgaaataaaaatacaatttaatt

SEQ ID NO: 148450 - DNA, 595 bp, Cannabis sativa
caagtatccattatatataacgagtttcagggaccacatgtcaatttttatctattattctacacaaagctcaaagtaaaaacatattgtgtattttagaaagaaaaaaaaaaacaagtgatttattaatctttttttcctttttgttccacatgtttaattttaaaataataaattgaggtttttaccattttctttgtgaaaagtatgtaaatttactaccaaacgaatatattataagcacaaaatataagaaatgaatataattttaattacattatattaaattcaaagttttaatatataatttggataggtttattagctttagatatagaaaagtagagagagattgaaaaaagttgaactttgtagaatatagattgaacttacaaaaaaatcaatagctcaatagagcttctgtacagagtagtaacaagtaagtactgaaaaactaactaacactcttgacaactcatcaaacgtaacttttaactgttatgaatcagattgatctaagagctgaagaacactaatgaataacaacataatcctcaaaccactataaaaaaatttatttttagtcacaataaaa

SEQ ID NO: 148451 - DNA, 722 bp, Cannabis sativa
ttagggtttaattatgaaaattgtttattaactttgaattattaatttatgatttatttgaatgcattttatttgtcatatatgaaatttcatcaattttgaatgttttgtgcccgacaacattggaacacggtgtttggctattagaatcacatcttggtatttttagtatagcgaggcaatatatttagacattaaaaatgtcgggaatagtcgagattttagaattgtcaaaaatatccctaagtgacttttagtgtggaggggcaaaatggtctttttgcccatttgtgttttgtcctttagtgaacttataattgggttttcatttgattttattaattaataggctgagaataatattaataaaacaagtttttattttatttattcaaaaaaataagaaatttgaaaaaaaaaacatttctctctctttcaactctctctctcttttcgaaccccctagaccagctagggtttgctggtttttgctactcaattaggaaatcagcaaggttgtagtgatttccaagccaaggtaaagtctttaagcaactccctcttaagttccttgagttttaagtggtagtttttgcattttttgagagattgagttcagtagctactgttagtgtttgatattgttttttgaagtttatttatgtttagatatgttaaattaagcatgttttgatggttggtttgttgattgagcaagcttt

SEQ ID NO: 148452 - DNA, 520 bp, Cannabis sativa
aattatccattgtttcgatctaaacaatcaacactctattgccgttttacccctcaaagtattttgtctttaaaacacttagctacttataaatgatattttgggaaactaatataattatcaaaataagcactccaccatttaaactcgtttagccaagctctaagaaaactatcattttatttctaagtatttatagaagcaatagatttcatatctataattagcgctcccactcagttgtactacaatgttctcaagatgtaagtatggaataatacttcaggtatgtttgtaacgaacaagtcaaagaacacgtgcaatacagttaagccagaacctaaccatcttaggattgagatcattaatctaagatcaatatagtgatattttgacgtagataaaaatattacggtaagtttacgatttcttttccactataaatattggtccagcccgatgtatagccaatacatctgatacaagcttagtataattatatgcatatgtgattacatgt

SEQ ID NO: 148453 - DNA, 752 bp, Cannabis sativa
accaatagtccaaaaatgtaaacttattctttgttaagagaatttgtaccgtaaagtatatgcaacctctaaattttgaataaagctgagtgccttaaaaacaatgttttcatgccacttaggggggtgctaaggcataccacatggacaaatgtaaaacaggtcaaaagtaaaaacaaaatcaagcagaatatatatcagagttaaaatatatatttaaatatcctgacctaaaagcaggtccaaaaaaaatattaagggcctggggacaggccataataactttctccccttagcagataataatttaaattgtctgaaaggaagaaaaaaagactgtaaatgaaaaaaaaaataatagttgtaatagtgaaattggttggactacttggcctattcaatacgaggaggaagacgagggccccggcgttcctcgagcaaagcatcaagcctcctcttcttctcccagaacttagtgagggcttcctcaggcttaggataaaagtcaaacttgatgctctgaccattcgactgccatgccatatagacgccatcatcaaagtgcttgacgcaatgcttgcagacaattagggtcaggagctcatctcttttggcctttttcaaggcctgatctttaaagtctcttagctccttcacctccacagtcaggttagccgtcaactgcaagtctgcctgatgcaactcctccaaggactttaacttggcaaccatttcgtccatagcctccctgg

SEQ ID NO: 148454 - DNA, 627 bp, Cannabis sativa
gcttagggaatagattgagaggtctgacgttaccttgccctattccaccattaatgacatccacatgcagcgttctaattccagataacggaacgttcatcgttccgaaattgatggattcgttgttaatccctccgtttacttggtttccagccatgatgattttccatcctgaatttagtaagaacgtacttctcgttcccacagacggcgccaaatgttgtcgagcaaaattcgcaacaccaaaagtatgcaataatattaatgacaagaataaattgtttgaagaacaattacgagtattcaacctaaaatggcgagtactcgagctgggaacgtgaatgtttaccagaaaactggaaataacaagaagaaaaaggattatagtggttcagtcagatcactgtctgcttagtccactgtagcaagagttttgtagatctcatttcatggtggatcactcctttatatacaaagcaagtgtccaattagttatacaaagatttcattcattgccaatctgtttgcacattgaattacaataattaaactaaaaatgtaaacatcaataaatgaataaaagtttctattcactaaatacagcaacgtatgcgtcttctaacatgc

SEQ ID NO: 148455 - DNA, 506 bp, Cannabis sativa
caaccctcctcgaacaactcttccatctctctctgttgttcatcgctctaatccagttgacagaccagcatacgaagatgttcaatctccatactacatcagtacagctgatcatcccggtttatcactcgttactctagttctctctgacaagaatttccaaccttggaaaagagacttcaagctctccatcggagcaagaaacaagaccccctttctcgaaggtacacttcctcaacctcctgaaaatgaatctcttcttgattcttggatccgttgtaatcagcttgtgatgtcttggatactacactcggtttctcctaaaatcaagagtagtatcatgtatttcgatactgctcatgaaatgtggatcgtgttaaataatggaaacggtccacggatttttgaattgaatgaaacactaacctatctcaatcaaagagatgattcgtttagtgcatacttcacaaaactcacagccatgtgggatgagatcaatcaactaa

SEQ ID NO: 148456 - DNA, 592 bp, Cannabis sativa
ccaacttaaattaagtaatttttgtaatttttattgagaattattattaagatggaaaataattttattattttcagatctacctaagtatatttttataaatattaaattaaaatttatatttagagttatctaaattagaaattttaattgaataaatatatattaaaataaatattagatgaaaatacactttaaaataatgagttttattataaggattttcgatcttcattgttggttctacgtcgttcttattttagtgagttgcatccctaatggatgaacattcattagtaatttaacaccgtacaatctcgaaagataagtattattgtaagtgttttgttcttagtaacgtccaccccaatagtggctactaagagtaggacttacaaagtatgaaataatgggggaagctcattagatagaatggccttcactctcacctaaatgggacaatgccggattctcatcttaatagaatgaaagtttgctaaaatgatttccattttagatgagctgactgctctattcaatgaatgatatatttgactctcgcctaaacggacaccgtatcagtttgttggaa

SEQ ID NO: 148457 - DNA, 840 bp, Cannabis sativa
  modified_base (778)..(787): a, c, t, g, unknown or other
tatgatttatcaatacacagggtttaactgataggatcatctacaatatagtttacttgcaccttggataagtgctatgtcctttccaaggtattggtcaaagtaagcttgagttagatgcatggagtatgcattagaagggactgacattgaacttgaactagatatgataaacaaactgtaacatctattcaatgcaatatcacctagttgatcctaggtcaaatgatctcaatcctgagatggttaggttgtagttcagttttattatttgtgtttatgaatttattggttaaagtcgaccaaatggttcttcctgtgacatataggttaagaacatggtagtttaattgagtgggagcgctaatcatagatacaaaatctatagcttctatctggatttgaagtcaaatgatgatttccttcgagcttggtttaacaaagataaatgattgagtaatcatttcagtgattatattagttctttgaaatatcatttataggcagctaagtgttttaaggataaaatacattcaagagtgtaacggtaaattaatcaccattcaatgtaaataatctatagcggatcattgattattgggataataacaaatggataatcttatagcgtatctatattgtggaacatatagatcattctataaaattgagagtgcaattctaaattctatagtggtgcaacaaggaattaataagttagagtattcacttgggaagctctaaatctgcttactggaagctcggttatataggcccnnnnnnnnnntactagttaagacaaactgcttgtaagactcagttatttgattttagttaatc

SEQ ID NO: 148458 - DNA, 796 bp, Cannabis sativa
  modified_base (27)..(32): a, c, t, g, unknown or other
  modified_base (60)..(65): a, c, t, g, unknown or other
  modified_base (93)..(98): a, c, t, g, unknown or other
  modified_base (130)..(135): a, c, t, g, unknown or other
acaagtttggctcaagtgtgtgtggtnnnnnngctcaagtgtgtgtggttggtgtgtttnnnnnntgtgtgtggttggtgtgtttatgaaaannnnnngtgtggttggtgtgtttatgaaaatatgatannnnnntagcttagaacacttagaatgatgttaaatgataaatagaagcccaaccaaccttgatttttgagtgaaaacgagtttatacagtgtaggaatgaaaactaatcgtttatagtcgtaatcacaatttccgaggccaattctactgtgatctggaattcctgattagttacaactggaatttcggttggaattccagttgggaactgaaatttcggatgggaacctgaatttcggatggctaacatgggcaaaaggttcatttttttaaactaaaacgtgcataactttttactcgtttatccaattttaaaaattccagttgcgtttcttagttaaatgatatgtgatcttaaaaatcaatttagaaaatttagatatcatttttgtgaaataacttgtcgcacaagttagcgagccaaacttttaaacttataaaccctagtttactatgcaaattactttaacaagactaaagtaaacttatatcacttgattgtgtgtagtcttgatgtagatgagcttcctaactttatttgcatgttttgatttaaagttgactttgacttttgactttgagcttttaaagtcctcttttggataggatcttgaattcttgatctcttaatgaaacttttgccttatgaagtatgaagtagttgat

SEQ ID NO: 148459 - DNA, 1588 bp, Cannabis sativa
tgctcatcccacaaacaagccaccaaaacctgcttaaatcaccttaaataaccataatataacatcagaaaacaaacccaaacacaaccaataactacagtagctaaaacaccattttaccattaaaatccaaagttttgagttcaaagatttacacttagttaaatccaactaactaacaacaaaaccagcttgaattcactcaattaaacatatctaaacttctgaaaataacaacaaacatacacagcagctacaacatcaaaatcatcaagcatgcaaataattacttccttaaacttcaataaactaaaagaagggttgatagaagcttaccaacaactaggaatcactaaacttgctgagaatttacttgaaattcaaagaaaaatacccaacccttactgctcaaagggggccgaaagagagagagagacttgagagtgaaaatggagttattttttttttctaacttttcttggtttcataaaatgaagaaaatgacttaattacttgatatactcagcccaatatttacattaaaaatttgattattaacttaaaataaagtccactaaaggacaaaacacaaatgggtaaaaagaccattttacccctcccatactaaaaggcataaaactaacggtacttttaggaaattctaaattcccgaccactcccgacattcctaatgtctaactaaaccgacccgctatactaaaatattagattgttattctactaagccatacaccgcgttccatgttgtcgggcactgaaaatgcaaaattataaaatttcactatatgacataaaaatacattctgaattcaaataaatcaacataaataatatttaaatatcaataaataatttttcataatataaccctaattatctgctaatttctaaatttaaactaagcggtctttacaaatacaatacaatacaacacaattcaacacaatacaatacaatacaatacaatacattacattacaatacgacataccaaacgagcccatatactcttatttttcctttcattgtctatgcactttattattatattattatattgtattccttttgtaatttaattttgttgtgtagacaaacttttttatttttcaataaactatcacaaaataaaatataataaatatattaatactaaaattacatatatagttatttttgaatttatattaaaaaattatctctataattttttttcttatacaattatatctctaaattattttttacttttttttaatttctatttttgtttgattgttctctattttatcatactttaaatatccataatattatatgtatgtatattttaactaattaagttaacttatttattttaaaatgtgatataattatatttatagataccataagaggtgagaagacattttatctttttcggattgttatttttttttttttgtgacattttaaaattcaattattttacttatgcctttattttaattattaattatcagtattaataattattcacttaaaaatgagtgggcataataagaagatataataatttatataagat

SEQ ID NO: 148460 - DNA, 771 bp, Cannabis sativa
  modified_base (445)..(450): a, c, t, g, unknown or other
cggagaagaaaaccagtcgccgcccttggagaagatgaagttttggactgagagagaagtgaactgaaaagacttggctggtttgtattgtatactacctacgaatatgaacagtataatagtatatggaagtgaaaagtctttcattttaaatctgattaaaaaaataattaaattgacaaacttaattaatgaaatactattaattaagctgaccatgaccaatactcagcattttagtaaaatgtgattattaataataggtaattaagtattaatattaatattatttttttaaaaaaatgaattcgggttccgggttacaacccgaccaaaagaaaattacatatctacacccgaacccgaaacccgttttatgttttttcgggttaaacccgacccgatcatacgggttttcccatggtcggtttttttggcagcgggnnnnnncgggtgttcgggtttttcgggtgttcgggcccaaatgtgcagccctagttttgtggtgtagctgtagaaactagaactgtaagaataagagttatcactttagacaattggaaaaatctctttttaccaaccactgacataaatcagaaatagttgccaaaactgtaaaatcaggaagttatcgtacatgagaaaaatgttcaaattgtgtctttagttgtaccatctcgtattctgtaaaatctcttgggtaaaatttttgtaccaacttgcaaatatcatcaattctgaatgatgtgtgcatctctctcggatctaaag

SEQ ID NO: 148461 - DNA, 575 bp, Cannabis sativa
tggacttgacaacaatatcatcaacatacacctttatgctttcatgtatcatgtcatggaatattgctgtcattgcccttttatatgtggcaccagcttttttcaggccaaacggcatgacagtgtagtagaagtttccgaacggggttcgaaatgccgttttctttgcatcttccttggccatctggatttggttgtacccgctaaacccatccataaaagaaaacatttcacaatttgctgttgcatcgactaaagtatcaagatttggcaaaagaaagtcatcttttggacagactttattaagatctcgataatcaacgcaaattcttatttttccattcttcttcttcactagaacaatgttagctacccatatcggatgcttgcacgtacgaataaatcctgctcttaataatttttcaatttctgccttgatctgaagttgtcttctagcctataattccttgaagtttgctttataggttttgcctcagaaaatacgcttaatttgtgagtaaccaacctaggatctaacccaggcatatcttcatatgtccaagcgaacacatctc

SEQ ID NO: 148462 - DNA, 713 bp, Cannabis sativa
agttttaacaaaaaaaaagtaacagtattacaaaaatacttccagctggccaaataaacaaatatacaacctaaatagaaaaaattacacagataccacttacacacaccttcaacccaggatccatgcttctcggacaaccattgcgcaaccacgcagcaacccaatacaaccaaaacaaaaattcaacttgaaagagaaccaacattgattccggcgacttcacctgagaagacgacaataatcaatcaaaacatgggctgtttcaaattcatgaaaaaaaaagtatagaaaaactactacgaaactaaaattcaaccaaaaatcaagtttaatttgcataaaactaatgtcttgacttcaattttcagatccatgaaatgcatatctgaaaaagttgaactggagttcccaaacaatcaaactcaagtataatctaaaaaaattacatcaatactatagtaaaatatttatcctggtgtattttcgttgttttccaaatttctaatagtaaatttgttcatattaaatcttgaagagacatgtagatagagttacgtacgttgaaacactgttatgatttttaatgtttcataacagctgtattaaagttgcataaacattttgctaatagtaatttcgtctgattgaaactttcgtttgatgcaaccttcggccaaccactcaggaaccaccaagcaaccttcgtctga

SEQ ID NO: 148463 - DNA, 587 bp, Cannabis sativa
tcaaaggaaaaatgatgaaagtattgatagcgaggatgagaagcaaagcaagtcttccaaggcttataaattgaaaaagtagggtcattttaagttttttttatgtttctaggtactctataagttttatattttggaactggttataaacttataggatatttaaaactaacattataatatgttcattttttttatgttttaacaacaacagtgttatgattttacatttaatgttgttggtttattttcaggcgtacaactatagaaaaactattatgcaactgtgtacaaactatttttagtattcaaaatacttgtcatttaatttctgacatcttatctcaatatatttcatattgttatgcaactttttccttctccttattatacaacttataaaaactcatattttacttttaaaaactatttctattgaaattctttatgtaataaattcttaataagtgtcaaaactgtcgagaaattattttgcaactactagcaaactatttaaacttttccaattaatagcaatctatcaaatataacatttcatcctgtcaaaattctcatagagacttaaa

SEQ ID NO: 148464 - DNA, 717 bp, Cannabis sativa
gatgcgagcatcacccggactcggttctagaagattccaacatatcaccatcatcctctcactcttactcttagggatagagcttaaaaacttgctcggttgccgggggaagactggaatattatccagttgacctccaatgataaccttgtgaggtacgggctttatccaaaggactttactcataagtccgtgtcagggaagaagaggaaatctgatgctggctggaccgaacgaactcatccggagtatgagttgattcaactgaagtgtgaagctaagttgaagggaggtgcccaggctaagcaatatgcccaggagcctttgaatcctgaagatgaagctgaggaggagcaaatgactccactgaagaggaagaagaaactcccgtcctcgcccaggcctgttgaacatgcaatttgcataagggagcccatttcacctgctcggccatctcctcccatgtttggaaaagggaaagctgtcatgtctgagataagatcgatgtgaggtgatgatagacttttgagtcttgtgcgggcggcaccttgcattttactttatcttgttcttgagctccttgattttcatgccttgtgtttctgatgactgtcttctaaccatactgtgttttattctgtgtagacatgtctcggtagatgatcgacgctctgaggaagagaatgggcggaagctctagcgcctctcctccggcca

SEQ ID NO: 148465 - DNA, 962 bp, Cannabis sativa
ttcgataccaagtatcttttgaataggtccaagctctttcatctcaaattctctcttgagcttggctttaatacttttgatcactgatttatctttgctcgtgatgcgcatataatccacatagagcaataagaatatagttgtagattcctctagattcttaaaatataagcagtgatcgtatgcggattgtttgaacctgatttgatgcagatttgtataaaaatctcttattctattgccttggcgaccgtttcaaaccatataaaaacttgttaagcttgaacatcaattcaactcctttcctttccacctaaaacccaggtggttgcttcatgtatatctcttcatccaagaatccattcaaaaaagcagtcttaacatcaagctgttcaacctcgaactccatttaagcagctaaagacaacatcaaccttattgtcttgtattttaccacaggtgagaagatttcagtatagtctataccttccacctgagtaaaacctttaaccactaacctggctttaaacctcactagttcgttttcattgattctctctttcaccttcagaatccatttgcactccacaatcttcttgttctctggctttggcacaactacccaagtcttgttcgttcagagtgaatccatctcctcattcatagcctgaagtcatttagacttgtttccacctgaaattgcctcttcatagcttcaaggttcttcaatttcattctgttaaattaccgccagtgcaaatgctattttgctttcgcgaaccttgctggaggttgaatctctcttcgcgttctatcacgagccaactgataaccttctagacctgtctgtcagagctcttttgacacctctgtttggtcttcattatcttgttcttccagctccacaatagcttttgtctatgcattgtcttttggttccacactatcttctgcttgtggac

SEQ ID NO: 148466 - DNA, 882 bp, Cannabis sativa
  modified_base (32)..(50): a, c, t, g, unknown or other
  modified_base (338)..(342): a, c, t, g, unknown or other
  modified_base (566)..(574): a, c, t, g, unknown or other
  modified_base (635)..(651): a, c, t, g, unknown or other
caagttaatcataacaatttagatcaaataannnnnnnnnnnnnnnnnnnaaaattgaataaacaatataaatataacaaacaatgttcaagtaacaatttgtgaaatatgaagtttatatataattaaattattatttaactaacaaactattttgaaaatttagggttgttaaaaataatctaaaatatcttttctaaaattaaaaaaaaaactaattttaaaatatcgagatttatttgaattattttatctaattaaattaaatatttaataagataaatgatttgaaaataaccaaatagatattttcaatatcattttctaattttataatnnnnnaaaattaaaaaaaaataaaataaaccaattttaaaatagatatggttaggaaattattattttaagattaaaataataaacaaataataattatcctaattatatgtcaaaatatctcaaattaaatatttttttaaatttatacaaaaatatataggttatttaaatatttaaagtactatttataaatttatgataggtaaaatgatataaaatatcatttnnnnnnnnnataatttataaacaattaaatattaaaaaaaataaccaatttatgaatttgaaaatattannnnnnnnnnnnnnnnnaaaaatatcttggttaatttcaaatttattaattatttaattcatcttataaggtaattttaatataatatttcaaattaaaagaataatactatcatttaatttaaaatatatccaatattaatatatctaaccttataattatataatatataaatattaaagaaattaataaatttttaaaatctaactataaatgaaaaaaataatcaatttttaaatttaaacctc

SEQ ID NO: 148467 - DNA, 579 bp, Cannabis sativa
gttttatgtaaattaagtcagttgcttgtattttttatctcctaggaacgggtgaatttccggctccgcatgaacatatgggatagttcctgctatttgcaaaatcacctacaaatacaattgtgtaagatattaaaattatgttatcatttttttatatgctcccataaatccattacgttatagcaaaaaattatgataataatttactacttccttgtgggaggacaaataatcgtattaatgtgtatatatatttattggaacactttgtgatgtttcgttattataaagtgaaaaaattccgccactaaacctactaaagtgttggatcaaaatcattaccaaatttctcaccgtatgttgagacaataaagaaagaaaaaaatagcataacaaataatttatctttcaaataggaatacttttttaaaaaaataataggagataatatttatatgcacaaattatgtaaccttattttaagaaaaatcatatttaaaatgattctattagaaatatcattttggcgtaattttaaaagaaatgagtgtcgattttagccaaaaaaaaaaaaaa

SEQ ID NO: 148468 - DNA, 507 bp, Cannabis sativa
aaaagtaaatatattatatatatactagtattttatgagattttgtttgtatttggactttattttgtgatgttgaatgaatgtgtatacatttatacagttgatacattaatttatatgcaataaaataactgaaaatgagaagttttggggtgtacaaaattatactcttttggtaaatagggtggggtggggttataaaaaacaatatttaattgggatcaatttagtgatggggtatgatgataatttttgggtacaaatataatctccctttttatataatatgagcactaattttttttactcttaatgacacaagaaaataaattaatattataaagtgttaactttcttaattattttcaacttaataaataataattttaattaataaatttattatacgattagttttctaaatacacattctgactgaataaattacattggatttaaaagaaaaatctatgtataacaattgaatatatatatatataaaaaaaa

SEQ ID NO: 148469 - DNA, 596 bp, Cannabis sativa
gacagcagcttgctcttctccaagcaggcattcgtacggggactccattctggaacgagttacaataagaaggagcttcaaaccttaaagacttccagaagagggtccagaaatacattaactttgaagaggcccaagtagtcgcctatggaggatactatcccaccgggatagcaagatatgtgcccagagcccagctctcaagcactgtgccaacagcagctccaccgatgagcgtcatacagttttttgctactcccggatatagccaaggccaggccttgggccccgcatcttcccattttggaaatccctcagggataaatggacaagccccctcgcactccgctccgacagccagtttagtcggtccttcccagggctcgaggagtaagaggtcctccaaaggcagcacccggacagaggataagcgacagaaaagggggtatactccccaatatacccaatacacggagctaacagattcacaagaatgagtatattttgctactaggcaaaatacgcactactagagatcgcctcctttgtacaaagacagctcccggagggagcccaataagagatgcgagtaccac

SEQ ID NO: 148470 - DNA, 1337 bp, Cannabis sativa
atatattaaaaatatacatatatatattgattagactttgttgtattcactgaaataatcaattacacatactgcatttttagttaaatgaaaaagaacagttaaaaagttataatttatgtctatatgtgataaaattatgccaaaaatgatagtaaaaactttgcaatacagcaatagaggatacaaatacttttttttttttcaattgattatcaactttttccttatcattagtagaaaaaggaaaacagtactcttttgaatcattttttttttctgtttggtaaaagtgtgaactaatattcatgtggaggattttataaatggcaggatacaaatatttttttttcaattgattctaagttgtacatatataactacatttaaattatctaaataataatttaaaatagtgtttaatttgctgtaacgtgattcaaaaaaaaaaaaacaaaaataaagattttttcactttgaaatttaaaggctaaatttattaaagaattttaagtgtttatctgttatacaaccagataattattccctcaaaataaatatataaattaaataaagaatctgaaaaaataaaaaaaaaaaataaaaacccgaaaaaaaaagggcagatttttcttttattacaccactatatgagaaaacccaaatcaaataaacacaaaataaacccaaatcaaaacctaattcaaaagagaaaaacaacataaaatttaatttatagatgtaaataacatatattcattactcacattctaaaggattgaaacttttattcaaaatcggtggtcttccgccgcctatcgaagaactccatagcaaaccttgcaatccaaacaagtgagagtaattattgtgagagagacaaaaataaaaactaaaaagaaagctcttgcaattggtgggcttaccgacggcttgaaggtgctccgacgacggcttggacggtgccgatggttagatttggccaaaaagaaaactattttggctgagagagaggccaaagacggagggttggaggaaaatgagattttgggctgaaatgaaaattggacatttcagcttcttttttttaaaaatgaaacaacttggcccgacacctgtcgtgccattgatcgtgccaatgtgcaaatggcacgccgaatgggcccgaccctgtcgtgccaatggtcaaatggcacgccaaatggcacgaccatgtcgtgccaactttctttggagggaaatttcccgccttcacccaacggcaggttttcaaattaactttggcacgacattttggtgccaattgcacctattgtcgcgccaacttgcaaaaaaat

SEQ ID NO: 148471 - DNA, 588 bp, Cannabis sativa
  modified_base (533)..(537): a, c, t, g, unknown or other
taaatttattagttatgatttgaaatgaaatagccagaaaagctcatttttccaatgtgtatgtgtgttctctaatctaaactataaaaacagataaaattcactccaaataaattgcatgtgacaccatatctcaagtttcatccaagttaggctatcagcagcccaaaatcattaacttggtgatatatttaaaatcattttcagaattgaaatcttttaaagctaaaacaataattttatagctgttttgttagttatgagcatagaatagcatgtttgaattcctcctttgaactcatgcacttcaatttggattagttcatggtgtagcaaagaatctacaaaacaaaaaaacaaaccatatttaatttaatgttaaccaactttaaaaggcataaaatgattaaacttaatctggaggggtgcgccaagcctatgcaatagtgcaaaacataagcgacacttaagaatcccgttagcaagctaatgtggtggactcttccccttaaaaaattaatttaatatcgtgnnnnncattgactcacatatcagatattaaactgataagaacagatactacacttg

SEQ ID NO: 148472 - DNA, 1112 bp, Cannabis sativa
aatgtctgaatacacaactcgaggtgaaaaaattgtggcctacttgagcaaagtcaaagactttttaagtcagctcaaaggctacacgatcaggcagatccctagagaatagaacaccacagtagatgcacttgctcgtctagcaagtaacaccattgctgacaaagcaaattcggtgtatacaattcctagaggaacccagcattgttatcccagaagaggtcaacatgtttgttgatactccaacatggatgatacctattgtagcttacctccagaccggagccttgccagaagacaaacatgaagcaagcaaactgagaagaaaagtagctaggtacttgatcctagacaggatattgtacattaaaagtttttccatgcctcttttgaggtgtgtcaccaaagacgaagctgaacgactaatgatagaaatgcatgaaggcttttgtggcaaccatgccgggggcaaagcctatccaaaaagatactccgataggggtacttttggccaacaataatcgaagactcgatggactacgttagaaagtgctgacaagtgcaagagattttcgaagataccaagagctccacccaataagctcacaaagatgtagtctgcttggcctttcacagtgtggggaattaacttgattggtcagtcccaaagggaataggaggggtacagtttactgtcattgcagtagactacttcaccaaatggatagaagctaaactcttagcaacaatcacctctaagaaggtccttgactttgtggccaagaacatcatatgtcagtttggcttccctcaaaagattgtgtcagacaatgacaagtagtttgacagtgacatgttcactaatttttgcaacagacatgagataatcaaaagcttctctgtcgtggctcctcctcaagcaaatgggtaggtaaaagctatcaacaaaaccttcaagaacaccctgaagaagcaccttgaggaagctaaaggtaattggcctaaactcctcctaaaggtcatatggttgcatagactactgagaaacgaccactaggaaaactccattcgctctagcttatggctacgaggtgatgttgcctatagagcta

SEQ ID NO: 148473 - DNA, 525 bp, Cannabis sativa
agtcaacatcccaagccaacatatcagtttccataagtgctttaacattttgatcaataagagtaggattattcgaagttactcttggattatcttcattcggcagccacggatccatcactatattcattcgagaaccatcaccaactctgcatctcgccccttttcgaacgatctcttgagttttataaatacttcaccacgcgaaacttggattgctccccaactcaacatttaagaaggtaccattacggtagtacctagctttaaaaatcttgctgacaagtgagttcggacgactaaacaatctccatccttgtttacaaagcaaactcaagttaaagtcagacgagttgcaaaattccataccacctttagacttatgtaccgtcaatctatcccactttatccaatggattcatttgttttcttcgacgattgccaccaaaacttacacatcaattgctccatctcattgcaagtttccacaggtagcaaaaacacattcattgcataactaggaag

SEQ ID NO: 148474 - DNA, 855 bp, Cannabis sativa
aggtattacacctttgtccaaaagcttatttttcctatctcttagcactaagggaactctcatatagaaatagcttttgggaattatcaagcctttttggattttttagaaatatatttttttgataaaaacttaattcatctcaatatgagtaccttagacttctttatataatgtttaagatatcaccatttgaaattcaaactcataatcccatggatgttatggactcaaaagtaaattatgcacacactagaactcctatagcattaagaatttcaaattaagatatgtaataccattttgcacacttaatattggtgataattatgaaagttactcatagtatcaagtaactcccccatatgttatgaaataatgacaactaatatatattgtcatatgttacatattattaatttattacatatatttaatctatatattatatttattataaataatataacaatcctccactagattaaacattatctcattagtaataaacttgtaaattttgtaatatttatttaatcaatcaaaaatattatatgaaaatataacaatcctccacattgattgactaaatacatactattatagaagtcttgcttaggtgcattaggtaaaatatctttcaacttgaattttaccttagtatagtcaccacaaagtttgatgaaataatggttgttgtagcattgaaccattattcctttaatacaaactagtgataacacacacccttgctaatgctcgctgagactgcatgtctcgctcttgcactgttaatgaccatgtgcaaaattccaattcatgaactctctagagaataactcccaattctcataa

SEQ ID NO: 148475 - DNA, 684 bp, Cannabis sativa
ttaataaaaatattaaataaatcaaaaaatagagaaaagaaagaaaattgaagctaactcatataaagtgcaatttaatagtatatatgtcttttgattttttttttataacttattagcataggtacaattaattaaaagttatgataaactaataaaaatattaaataaattagaaaatagggaatagaaaaaagactgaagatagctcatatggcttcttttatttttatatatatattgatattgattgatatttatagtagttaattatattattctcatttaccaaaaataaaaaaaaataaacattattatgtcacaacttctaaatattttaatatatatacccgtggttgtcaccattatgatcactgctttcatcaattttcgagtatccactatttttctattatcatcatattttacatcatttacactattgaattgtatttactatattactaataaatcatttaaaacatttaatgaaaaaaagttatagtaatagcaattttattaagtactaattttacaacgaattatttgacatcatgtacgttttttttttaaaaaaatgtgtgaaaagatattgaataataaaatggtacaaataaactaagagattgcatcacaattttattaatttcgcatagtagcgtactcaataataataactatcaa

SEQ ID NO: 148476 - DNA, 645 bp, Cannabis sativa
cgtccggttaaggctctggatctatgtccaatttcagttatgattccaagtccaagtcctggttccagtctcggtcaacttccggttttggtttgaattttgtgtcacagggtacgggttcggatctacttttgtctttgggattgggttcacgtctgggtgttggttggggtccttgtcagggttcgggttcaggggttggtcccaaatctagacaccgactgcgagttttgtccaaaccctgggtctagatccaaatcccgatctaggttcgggtccaggtcaaagttcggtcccgagtactggtccaagtttgggtctaggtcaagatctcggtcaagatctaggtccagcatttcgatcctagtctgggtcttggtccgagtccaggttcgtatcgggatccctatataggtccaagtctgtgtttggaattgggtcccaaatttttgtctaggtccggttcttggttccgttcagggtacacgaccgtgtcggggcccgagttcgagtctcagtttagatctgagctaggtctgtgttcgaatctaggccttggtccaggacctggtcacggtcctagtcttgttttaggctccttgttcggcgattctcgttcaggctctaattttgggtcccaggtct

SEQ ID NO: 148477 - DNA, 654 bp, Cannabis sativa
  modified_base (259)..(259): a, c, t, g, unknown or other
ctttaagcaaatcagacttagagtagtagtggtagtccaagagagaagaatgctcatgtatatttggtataaatttaagtcttttactttaaattttagattccaaatagaagttttatataattatttccaaaatacaatacagttacagtttcacaaatgtttaatgtcgatttttctattaatggattcaaactgtatgttaaagtatggatatgagttaggggtgttcataaaaactgataaaccgaaaccgacnatcaaaccgaccagaccgtaactgaattttctgttccacgtcatcaccgaatttggtggtcggttttggttttggtttttttgacatgccggtcggtttaggtttttgaaataaaaaaatggttaaaccaaaaaactgccaaaaacgccaaaaaccgcaaaaaactgcccaaaactgcaaaaaaccaccaaaaactgtctaaaaccgccaaaccgaaaaactgccaaaagccgtacggtcggttttaaaattataaaaatcgaccataaccgaccaatttccacccctaatatgagtttagtattttgtgacaaggatccacttatactattctaagaactctttgatgtaactaaacctaagtcatcaagagaccacaaccacatattttataa

SEQ ID NO: 148478 - DNA, 732 bp, Cannabis sativa
  modified_base (547)..(568): a, c, t, g, unknown or other
atcagatttactaattaataataaaatatcagaaatcattttatgttgcatggttcacatgattactttcatgattatatgtttgatgtataaattctatcaaattgaaaacatatagttatttatgattataatattgtctacactgtggaaaataatcatgattatatgttttaaacttctaagtcccatgatttttcagtacactagatttccacatatgggataattagcgataaattttacttacacattgatatatggtatgtccttaccagggcattgaaaaagtatgcttgtatcagatgtatggagtatacatcagaatggaccgatattgtcattagataatataccgtaaacttactgttatatctttctaagtcaatatcacttagctgatcttagatcaatagatcttaatcctgagatagttaggttctgtcttaaatatattattcatgttctttgacttgttcgttaaagctaaccaattggattagcctaaggcttacatcttacaaacatgatagtataattgagtggnnnnnnnnnnnnnnnnnnnnnnatctataacttctataactatttagaattaaaacgatgatttccttcgagctttactcaatgtgataaatgattgagcactcatttcagtaattatattagtttattgaaatattatttacaagtagctaaagtattttaagcataaaatacattaaagggtaa

SEQ ID NO: 148479 - DNA, 526 bp, Cannabis sativa
  modified_base (104)..(108): a, c, t, g, unknown or other
tcttaagaatttattttaggaattagaactaaatattaagagacattattgcttagacgatcaagtcgcctcaatagaaacaatcaagaaggaggagcttcaannnnnacaagaagtttaagaagaagacgaactacaaggctaagctagtcatggtggaggacaaggataacgagtttcattattatggaagtggcacccacgtaagtacatataacgcataggctgagttatgaggacactcatttttgcgagtagttggtgaaagagaacgccagcttagggaacgactccaagctcaagatgaaaagttgtgttgtaataagcagtaaagcacgagaaaattcaactcaacaaccaacacatcgcttcgagccaccatatgaaagaataaaaaaaaatagcaaccactgatatttgaaagaggctctaacccattagaggggaaggaacaaccaaagattatagcatccatattggatatatggaactcaataatagacaactaacaaatgacttgatagag

SEQ ID NO: 148480 - DNA, 702 bp, Cannabis sativa
gaaatatttatttgcacaccctacagctcttacttcactttatgcgagaggaattgaaaccaacctagaaagaatcagggccctaatcgagatgccatcaccaacaaaatcaaaagaagtccaggctttgactggaagaatggcagcactaaacagaatcatctcgaagtcaacagataaatgccttcctttttttaatgttttacaaggcaataagagatttgaatggacaaaagaatgcaaggaagcttttaaaggcataaagaagcatttatcaacacctccaggtttggccaaactaataactgaagaaactttatacctttatctagctgtctcagagcattccattagtgttgccttagtacgagaagagggaaagcaccagcaacatgtttactatgtcaataaaaggttactagggcagaatcaagatatttccctcttgaaaaacttgcattatgcctaatacatgcatctcgcaaattatggccatatttttaggtgcatcctattaaagtcctaacaaattaaccactaagacaagtgttatcaaaacctggtgcttcaggaagattgataaagtggtcagtcgagttgggacaatttgatgtaacctaccacctgagaacatcaattaaaggtcaagcttttgctgactttctaattgaagggataaactcaaaggaagacccagatgtt

SEQ ID NO: 148481 - DNA, 605 bp, Cannabis sativa
  modified_base (186)..(190): a, c, t, g, unknown or other
gaatatggatcttattgatatatgtagtactcatcaatccatttatccttacaaatcacaggactctaattgtcacaatcacctcatatggggaccgacatccttagcaattgtacttttagttgggtcaaggctctgataccatttgtaatgcccatgattcacctgtgtagtcacatacctacnnnnngtacacgagtacactacttgctgcttctgactgactctgtaaaccaacacaaatttttctaatgtgatttgtctttactcgcatactttgagaaaatttctcaagagattgtccattctaagattgctccaagtcaaacacgcttaattttagagttcttaagttatgggctaccgaaaaaaaaatacatcttggtgatatctttcttcatggacaattaaaaactcaatatttctccattttttttaatttggtttgagttatcactactttaattaaaatactagtcattcaactacaaaaaaaaatgttaagagatatcttaataaggtgccaagcatatacttgtaattaatgtacacatatttatgatctaaataacaattcccattccaacatactaacaattattgtg

SEQ ID NO: 148482 - DNA, 667 bp, Cannabis sativa
  modified_base (496)..(500): a, c, t, g, unknown or other
aaattaaattaattataattaaatgaatttttcataatttattattaaataagaattttttagtaattttttttctccttaaattattaaagtttttacagcaaaattcttttaaaattataaacatataatttcataattaaaattttattatacttataactttaattttaaaattattacacttaattatttagtttttttttatttaaatatttaaaaagtaaaaagtgaaataggttgaatgtatttttcactaaaaaaaatggctaaactactcaatctttttttttttacaaggagtcatttactcaaaagagatggtttgtaatttggaaaagtccctatacaaccttaagcaatcaccacgacattggaacaaaagattcgacaataatgttcaggagattggtttcacaaggtccaagtttgatcactctttgtatttcaagcacctagaagagtcaacagttgtgtatcttctactctatgtagnnnnnatgttaataatgggcaaagacaaatcaaaggaactaaaaataaaatcaaggcagaatttaacatgaaacaattaggacaagtaaagaagatacttggtttagaagttcatagatccaagagtgatggagtcatgcatttaaagcaaaagaactacattgagaagatc

SEQ ID NO: 148483 - DNA, 519 bp, Cannabis sativa
  modified_base (408)..(410): a, c, t, g, unknown or other
gccccagagtcaaatagtacagagaaataagagctattgagtgagagctgacctattactaccgaagggctggcttctacatcaaccttagttatggcgaacacccttggtagagtgggtttcgctgcagtctttcgtgcttcggttctgagttggggacaatccctcttgtaatgacctaacatgccacattgaaagcacccctgccctttacactctcctagatggtgccttttataactggggcactccgggtaagtgtatcgggtctcagaattaccctgccgattgcctcgaccctagttccctctgaacctcttgttctgacctgagccactggttgcagtggatgcttttcttttctgatccatggccaaaccactacctcccctgctaaaacctgatgcnnnaggggtaggagccccgccaacagcaagagttccacaagactcaatcatacatcccactgcaccctcagctcgcagcgctttatccaccatttccgcataagtggttttg

SEQ ID NO: 148484 - DNA, 731 bp, Cannabis sativa
ggtcgacacgcttgacacaaaatttaaaagcgggtcacataaaatatgacacgaagacgacacgatgacacgttttgccagtgccacccgtactattcatccacttacacatgcatacgaaaaaagttgtaagagtgaatttcattggttgaagaaaagacgacgcatgaagttgaactttcctagaaaattaatgtagggataagtatttaaagttttagtttgtaagtggtataactttaataaagtttttagcggtataaatacttccatgtgagtaaaattttaattttcgtcaatacactttgttttgaatttattgaaaaaattaaaagtaattcatactatatgttttatttaaaatagtgagcttataagtgccttatttaagacactaaggtcccgtttggtacgcaggattggactgaaaaggatttgactggactggacaagattggattattgtgaaagtaatcctgtgtttggtttaagaatagactggactattttatttattttcttttagaaaatgaaattaaaatataaataaataataataaagtaaaattaaaatatataataataaataaataaaaatgaataaatcacagaaaaaaatataaaaatatacaaataaaaaataattaatttataaaattataaaataaaataatatatcctatatataatcaagtatatatcataaatatataataaaatattttatcata

SEQ ID NO: 148485 - DNA, 561 bp, Cannabis sativa
tttaagaaaaaaccttaaagttttttaacgagtaaaaataatatatatttttaaaatttttattttatattattgatttttgttaaaaatatctttattttttcatttttccacattttgtatgcttttagtcatatgacagtcacttcacaaaagttccacatgatttagagattattgtgggtgatacacttttacattaaatatttcaatattcttcgattttagtttgtgacaaagttagtataatttatttgggtgattgatgaacttcaccttacccaattagttataatttttttataaattgaattcaaatttcttatcatattttattaaaataataaggcttctcttttaaaaaaaaaacaaaataacaataattaagaataataagactccttaactatatatttttcatatatacttttagtgatatgagactattgtgaatgttcaacttatagaatatatattttactattgtttattcaaaattagtattatttattttatatgtgggtgattgataaacacaatcttctctaatcagtgatcaaa

SEQ ID NO: 148486 - DNA, 1066 bp, Cannabis sativa
cttggcctctagaagcactagcaaaggaggagtaggagcctgcatcaccttggatccacctttggattacttaggcctgtccgaacttcctcctcgagaatccttggacttagcagcttttggagtagaggggtttgcaacagttagttcctcggaaaggttgataacctcctcggcaggtgccttttccttggagggagtcccttcaccacccttggacttcttggccggaggagatgcgctcgagcttcctccaactctctttttcaaagcatcaagcatcttttgagacatgtctgcatgaaacaaaaacaacatggttagagaaaacagaccccagaagcataaagcatagtcaagaagctcaaaaacaagatggagtagtctgcaaaacgattgcccgagcaagacccaaaagtccatcatcacctgacaagccttttatctcagacataacgactttccctttcccaagaattggaggaggtggccgagcaggcgaactaggctccctaatgcgaattgcatgttcaataggcctgggcgaggccgaaagtttcttcctcctcttgaacggagttgcccgctcttcctcagcttcatcttcaggattcaagggctcttgagcatattgcttggcccttgcacctcctttcaacttagcctcgcgcttcagttgaatcagctcattcttcgaatgagctcgttcagcgcgtctaacatcagatttcctcttcctccccttcattggcttaggaatgaaatccttcagatagagcccgtacttcataaagttatcctcgaaggtcaattggatgatattctggtcttcccccggcagctgagcaagctcttgagctctatccctaagagtaagagtgaggggagggtggtgatatgttggaatctgctggaaccgagtatgggtgatgcccgcgccatccaccatgaagtactcatcaacaaaacgctcaattttactgatggcctcgtccccggtgcctgtgaactacttaaagtctggctgagagaaatagaagtaccccgacctaccttgcttaggggt

SEQ ID NO: 148487 - DNA, 592 bp, Cannabis sativa
atccacataattattaatatttataacaggaacataaatattagagtttgtagaatatgagaatctcttaatactaagaagaatggagaattgataagtctgatatgatttttattgataagaaggtgattattatttgtattcatatttttcctctatcaattttttttatcaattattaaatacacaacgtgtctaccatttattttataggaaaacctaatgcatgcaacaataggaaaaaatttagtttctaagtaagtttaaaaagctattgagtgaaaaaattttgtactgtctgtaaaatttgaaaattatggcaaccacaggtaagtaaagatcactttcaaatgactataaaattttatttttggttacaacttcagtagagagactaaaggagaaatactagttaacattctcactaatgagtttcaattcataactccaaatttaactcatttacatgttaatgttgacggtgagtgttgacgcggtttttcgtcaacggatctaagaagatcgtaaaacgagcaagatgaacacaagcaatagttaatcaaagtaaaccggtttgcaaaaagaaattcac

SEQ ID NO: 148488 - DNA, 660 bp, Cannabis sativa
aaaaaaaaaaaacttatcatataatttgtggtctaaaacagaaagaaaaagaagagttattgtcaaataatatagggtaataaaagtctaaatcaaaatagagatttacaaaagtaattgatacaattgaataaatatcaccatataattataaacggaaagaactgtgagaatatatttaaaatagtagccaataaatttataaaagactatatatattgatattttcttaattaatttttatttatatattgggtttttttaaaaaaattcttaaattacgctattaataggtctttgattgagatacaattaaatttagtgttttatttaaaaaaaaaatctattgtattttttatttaaaaaatgagaaaaataaaaaaaatattttaagaaaaaatgagaaaatagataaataaaaaaaatttagaaaatagataaataaattttaaataattaaaaaaaataaaaaaaaaaagcataaacagattttaagccattttaaatcactacgtcaccgtgttatacttttctatatatagataatcaaatactatcttataaagtttagactgaaataaagtttaagaggtttattttaaatgctaattcctattagctatattttggtttatgttttttaaggaattttcgtgtttg

SEQ ID NO: 148489 - DNA, 683 bp, Cannabis sativa
gacaaaagcgctgcaaaatggaccatgcgaggtaccaagcgctgaaggaagaagtagaccgccttttggcatgcgacttcataagggagtcgttctacctgaactggttagcaaatctggtactcgtgcccaagcctaacggctcatggcgcacacgcgttgatttcactgatttgaataaagcttctcccaaggacagtttcccacttcctagcattgaccaacctctcgatgccactgcaggtcatgaacttcttagtttcatggatgcttactcgggatataatcagatcctgatgtatgaaccagatcagcaacatattttgttctttacagatcgaggtttgtattgttacaaggtattgccttttggtttgataaacacaggtgcgatgtatcagatgctggtgaatatgatgttcccagatttgattggggacaccatggaagtatatgttgacgatatgctcgtaaaatctcaatgtgcaaaagaccatgtcaaccatttaaaagcgatgttcgaaatactgcgacgataaaaaatgcggctaaaccctcttaagtgtgtctttggggtgggctcaggaaaatttttcgggtttatggtaaattagcgaggaattgaggcaaaccctgcgaagattaaagcattagtagaaatgcgatctccgactaagccaaaa

SEQ ID NO: 148490 - DNA, 627 bp, Cannabis sativa
ttataaattaataatagtttgttactatatagaaaaaaaataattagagtaaaaaataaaattaagtgtattatttttaaattttactacaaatatacaagtatgctattaaaaaaaaaaattagacttcattttaaaagattgtttaagtatatcttttatcttttgacattcagaagaattttttaatttttttttttttataaccatgtatattataattaattaaaataacttgtaaatttttaatagctcacattgccaaaaataaaatttaaatattttgttgcataagtgactattttttctttttcagcgcagaataagtaactgtttaaactttattttttggcaatacaaactattcggaatcttttaaaaatttacaagtgatcctaaataattataatatacacaatcataaaaaaaaaatagattaaaaattctcctaaatatcaaaacaaataggaaggtgtcaaagcacccctttaaagaggtgtacgtattataaatttattctattattttttgagtcaaagtgaaatttttttgtaacaccctaactagcataggcgttgttgaccgagattttcggcaactaataaaatattataaaattattgagct

SEQ ID NO: 148491 - DNA, 535 bp, Cannabis sativa
cgtaaaaatgcaaaaaaaaaaacttttttgaagtataaaaatgaaaaagtcccatatttttattatacattaattatatataattttaattaataaataatctattttataattaaagtactaaatataattttacatgagttatcaaaattagagttcttaatgcatatcatgagaatatgacttataaaattggatataaattgaaggatagtaaattaaaggtaaaaattaaaataaaaaataaaaagtgggtataaaagtatactttcctcggtaataattgggtaacacattttccaaccttactgttatccatcactgtttcggccctcatcccgcctaatccttaatcggtttaagcctcacttaatctccaatggatttgggctacgcttaattcctaatgagtttggattaagggatttattaggtacccattaaaattgaaattataagaagaagaatcaaataatataatgtaatttaaaatgaaaatgaaaatgaaaataaaaaataagatattgactataaa

SEQ ID NO: 148492 - DNA, 658 bp, Cannabis sativa
acagtggttgagggttctgggagagagggcaggttcatttgtgtgacatgagtgggagcatgatcaggtacagaaataggttgagtctcaggtattattagcaagggctgagtagttgggttaagttcaggtgcagcagcagtgtgagatgtgaaatgcaatggctcagcagcagttgtatcagcaacaccagaaacaggtatattagcacaaggattagtgaaaaaggaagcagtaggaacactagagtttgaagttgcagaatgtacctaagttgtgaggctgctgggagaaatgccaggatatagatgttcattaaagatgacattgtgtgcaataaacatcctcccattctgattttcacacaagtaacccttgtgaataggggaataccccaaaaagaggcattgttcagacctgtagtcaagtttgtgagagtgataaggcctcaagtgaggccagcaggcacaaccaaaaggttttaatatggtatagtcaggtttggctgagaacaagcattcatatggactaatgttaccaataactggagttggcaatcggttgattgtaaatgttgcacattgaaatgcatgccaccaatacctaagatccaacttagcttgtgcaagcataatgagccctgtttctgtgatatgtc

SEQ ID NO: 148493 - DNA, 573 bp, Cannabis sativa
cttggaacccaggacctcactaccaggacacaaccccaaactcagacccaaactaaaacttaggactcagccccgggacccgaacttgaacaagactgagatccaagaccgagatctgaatctgaacttgagtcttcaacatgaccataatcagtgtttgaatccaggacccaaacccatacccgaaccgggatccagacccaatcttggacccagaatcggaatcgaaccacgattgggacgagaacccaaacctgggactgtaactggatccaaacctaaacccatactcaacctgaacccataccgacacttggacccaaactaggacctgtgacctaggacctaaaccaagaccgggacccggacctagacctagacccaagagctagggctggacctaggaacaaagaaccaaacttggacccgagattcaggacctgaccccagacccaaaccttgacctaaaccccaccccgagacttaggatccaggactcgatgcttggactcaacccgtaccccatgacttgaaagtagaacaaaaacaagaagcgaatcgggacccaggaac

SEQ ID NO: 148494 - DNA, 876 bp, Cannabis sativa
  modified_base (837)..(841): a, c, t, g, unknown or other
tacttggaaaagtaaagcttgagcggttagatttctgtgagtattgtgtacttggtaaagcttgtagagtcaagtttggaacccggaaaaaaggataccaagggaacactgaattacgttcacagtgacttatggggaccctcaaggacaccatcgcactctgagagcaggtattttctttcaatagttgacgattactcaagaaagttatgggtatttatcttgaagaataagatggaggttcttgaaagatttaagcactggaagataatgattgagaatcaaactggaaggaaagttaaatggctaagaatcgataatgctctggagtactgtttggatgagtttgatgtattttgtaagaaagaaggaatagcaaggcacaagaccgtgaggaagactcctcatcaagatggactcatggaaaggttcaataggactgtcctggaaagggtcaggtgcatgctattgagtgctggattgcccaaagtgttttggcaaatgctgtgtccactgcaacttatttgataaacaaatatccgtcaatagcactagatttcaagatgcctaatgaggtgtggtcaggaaagccaaaaagttatgagcacttgaaggtattcagatgtgtctgttatgcacacattaggcaagacaaacttggggcaagagccttaaagtgtattttcttggggtatctaaaaggagtaagaggttatagactatggtgtctggagcccagaataagaaaatctatacttagtagggaagtgactttaatgaatctgttatgtgattcattgacaaacctgctggaagtcaagccaatactaactgagnnnnnattgaagctctgggaactgagcttgaggtggagcc

SEQ ID NO: 148495 - DNA, 928 bp, Cannabis sativa
  modified_base (27)..(47): a, c, t, g, unknown or other
agaggtatgtttcaaataaatataaannnnnnnnnnnnnnnnnnnnnttgattaataaaagagacatttttcaacttacccccatataaaaagatatggaccgtaccgtaacgtgccaatattctaaaaggtaagtttataagcctataatttcgtaccgtgctcagactcgtaccgtactttactcaagcaggcccttttttttataaatggaaagcatctcattttcttatatatgggtggaatagggcttcactttttcattttttttacaattcattttaatcactaaattatatatgtattttttttttatagttttaattttttttttacaatttttcaataatactttatatataatcatatagaaaattaattagaataattataatttgaatattcattaataaaaacgtatattattattattattattattattatttccgtgcttcaagctttcattaggcccttacactcacaaaatgacgactcttatacatgagtacgtcactatgactactttagtgtgctttgtcttactgtcgtgcttcttaagaaaactttcaaggaggtcacccattttaaaattaccccaggtcaagcacgcttaaccgtagaattctttcgtgatgggctaccgaaaaataagatgtactttgttgatacaagtagtatcaatccatccatttaagatgcactttgttgatacaaggaggtcacctattttaaaattaccccaggtcaagcacgtttaaccgtagagttctttcgtgatgggctaccgaaaaataagatgcactttgttgatacaagtagtataaatcaatccatttaagctctcttcaactgtgtagtcccatacctatacagtgtcagaatcatcacgcttgaccttcccctgggattgcacagcttacccggt

SEQ ID NO: 148496 - DNA, 583 bp, Cannabis sativa
ggttaggttctagcttaactgtattatatgtgctctttgacttgttcgttcgagttgaccaaatagatcgacccaatacttaaatcttggaaatatggtaatacaattgagtgagagcgctaatcatagatattttattttgatattatatttttgattgattaaataaatgttacaaaagttacaagtttattactaatgagataatatttaatctagtggggcattgttatattatttataaataatataatgtatagattaaatatgtgtaacaaactaatatgtaacatatgacattatatattatgtgtcatcattttgtaatattttggggagttacttgttactatgagtaccctccactattatcagtaatattaagagtgtaaaaaggggttacacatcttaatttaaaattcttaatgctataggagttatggtgtgtgtatgaattacatttgaatccataacattcatgtgggttatgagtttgaatttcaaatggtgatatcctaaatactatataaagagatataaggtgcttatattgagatgacaagttttctatcaaaaagcacat

SEQ ID NO: 148497 - DNA, 743 bp, Cannabis sativa
taaaaagtaaacaaagatgaaactaagaatcgagaagaaaatatctttacacatgtaatccacaatgatcatcaatccactatcgtcattatattttcataatttaggcatatgatattttatttacacacattagtaatgtgagactaactttaataaaagcaatattcaaacaatttatttcccacatatgtacactaaaagagttacacgtgcaataaactgtttcaactatgttttcgatgtttttaattttttctaatttctcaaaattttgtaagatgttttatataactacaatgtacacaagcatacaaaaaaattaaactaaaaaactcttttgaatgtcaaaatagatagaagtacactagtgctcctcttatacaattttatataatctaaaatctaaattaaaatgtagtgagtcaaactcacgtactataatgaaaatttttacaatatacctcctataaaggatgtattgatatatccttatctatacaatattcaaaaaaattttgtagtccaaatttttttcatggtcgtgtttcttgtaattatttaaaacatcctgcaaaactttaacactgaaaacatagttcaaacaatctgttgcacgcatattttttattttattttatacgcatgtgaaatatactgtttaaatattgatttctatattataagttatttcaaatttttcaaattttacaagaggttttaaataactataatgtatacga

SEQ ID NO: 148498 - DNA, 550 bp, Cannabis sativa
  modified_base (202)..(207): a, c, t, g, unknown or other
aaaatatattaagtttaagttggaaaattttttaaatttttaattttaatttcaatttcagatcaacttgaattagaataattttccgaatatattgtaatttagttttataatgattttcccacctaattttgaattgcatttatttatttcaaatgcagatatttcgaaatttttcaattttaaaaattagattaaagtnnnnnnttaattttttttattaattttagataaacttaaatcaagtaattttcatcaatgatttaattaaaataaatagattaaaatatattattttaattaggaaataagtaattagtttatgaattatctagatagattatttttctaggtaaattttttggtattttgctagatatatttaattaaataagaaattttttaagttgatttgttctagacatttaaatatctgatatttttcttaaggatttaactaaataggaaaattatatttatgttgaaaattaatttatttaactttagaccaacataaattagaataattttttctagttttattttattt

SEQ ID NO: 148499 - DNA, 657 bp, Cannabis sativa
ccttatttccaagctaatcctgttcgggtatacactaaccaaccattacgccaaatactgcaaaagccagatgcttctggacgactactcaagtgggcgatagagaatcaaaggccaaaccttagcagactttgtgatagaatgcacaggcaagaaagaaatcataccaaaaagcaaccccaagccggtacaaacacctcagccaagtaacaatgaagataagccgacctggaaactacatgtagatgggtcagctacagatcaactatctggtgcaggaatttcccttgtcacgcctggggggcaacacctgcatgctgcagtcaagtttggattcaaagcatctaataatgaggccgagtatgaagccctaattgccggattaaaactagccctagagatgaaagctgaacaaattgaaatctgaaaagatgataccatatctaagcaaactgcatgatctgctcgcacaattcaaaagctatggtctcagacaaattccaagggaagaaaacacaactgcagacgcgttagctcgattggcatgcaacaatgtatgtgacaaggcgaacttggttcctattcagttcctggaagagcctagcatcactggcacggaagagatcgaaataattgatacttccccaaactggatga

SEQ ID NO: 148500 - DNA, 503 bp, Cannabis sativa
tagtaaatttaaatatcaagaactctattttttggtattataaactatttagaatttttaaaactttacaggaatgatactataactataaccaatatcgttatatatatattcgagtatgtgattttagacgtggagattgactaagaagttataataggaagttgtaatttgtacccctctcagaatttttccaaaatttacatggatgatattgtaactataacgaatatcgctatgaaaaaatttgaaaaaaaaaaatattccgtcatgtgatttcgcgcgtcaaggttgattaacagattgtaattagcactcctctttaattattttgtggttatgttcctcaaactccaaccctaagatgtgagttatattttttctcaattttataaattatcccaaaattaaaattttgaaatttacgaatcgagtttcttttagggtgtgtttggaaagccacaatgtaattagatttgtatgtaattggaggtaattacaca

SEQ ID NO: 148501 - DNA, 984 bp, Cannabis sativa
aacttcctcaaattccctaatatgcacatatggattttcattttccattccatgaaaagtcggcaaaagttgaataatgccaggtttgacaccgagatttggcatatgaggtgaaaatataaagcatgatggtatggaagtttgcgtaggatgaaagtaatcgttaagtgttctctattgtgtttcattattattattcatggcgaaaggattatcaattattgtgtgatcgggagaaggagtagtggatggattggaagaattttcaccagaagtgatttcgtcagaagaatagttactcatccactctagtttgaacttttttttaataattttattattattattttttgttatagtgaagagcacaaaaatataatattacaatgactaacacaaaaatattcccatgccagttggaaaggttgctaaggtacctcttcgtcgcaaccttgcttagacagaaccgaggttcccaggtaaggtggagggtacactaacacaaaccttatttaaaaaccgacttttctagacagaacaattttagtttgtgtcatatataatattatactgttgtacaaattactaagcattttatgaaagaaaaaaaattagaactcactcttttttctttttatattatgattttttttaaaggacttaaattctaagaataataataaaaaaaataaataaaaataaaaaaaatgaactaaaacataatataaactatcatactaaacaaaagtcaaaatgagaacgaaataaaaattaaaggaaataatttttttttcatatcaagaaatcatttctgataaggaagatcggataaaatcgcaatcttagagcatactttgagtaattgttttttttttcattttattttatcaaattttggcgccgttgccgaggaggtgattatgaacaaaaacgttagtagaaaaataaaaacaaaaggttaataaagagtgacaatagtaacca

SEQ ID NO: 148502 - DNA, 556 bp, Cannabis sativa
aggagctaagtatgcggttgtagtagtcgacttcttcactaaatggacagaggttgagcccctcgtttcaataacctgcaagaaagtccttgactttgtcgtcaaaaatattatctgtaggtttaaaatacccatgaagatagtattcaataatagaacacagtttgatggcgatttgttcactaaattctgcttgaggaataaaatcatcaaaagcttctcgtcagtatccaggccttaggcaaatggacaagtggaagccgttaaataaaaccctaaaaaatactatcaagaagaagctagacgctgccaaaggcagattggttgacgcgctacctcaggtgctctgggcccacagaactaccgagaagacagctatggggcacactcctttctcaatagcatttggctcggaagcaatgctgcctgttgaagtgaacatatcgactcacaaaagagagttttataatcaacaagaaaaccatgaacttttaaagttgtccttggatctacttgaggaaaaacgaatagagtcgcaaatcaccaacacaacata

SEQ ID NO: 148503 - DNA, 523 bp, Cannabis sativa
  modified_base (470)..(476): a, c, t, g, unknown or other
gcttccatgttgtgttaacgtttgtttatagttactaacaaatattagagtattaaaaacaatggtttctaacaaaaataacctcaaactacaatttgttatttatcagtagtagttgtttaaatattttcttaacaatatctaaatacatggtccatacataatggttctcaatgatattgtaagtataagtacatgcgaccttcgatttatagtgatcggattttcaacatacttgtattcccattccttgaaaaaaaaagccaaaataaaagttgatgattaaacacattgtaacacaactacaatacaactattaaaaatctattaaaaacaactaccataccaaacatacaaaatgctaaataatcataaaaaaaaacgactaacataaaagaacaacctaaatctaacaaaattcaaattcaaaattcaaattcaaaagtttaggatgattctacaatgcaccnnnnnnngatgtattgatacaccctctacttgtttcggcatccagaaaagtttt

SEQ ID NO: 148504 - DNA, 563 bp, Cannabis sativa
  modified_base (404)..(407): a, c, t, g, unknown or other
aggagagcttttcaaaaaaaaaaaaaggggccaaacaattagggaaacaagcccaaaataaaaaaagttaaaaaagaaaccaccacaaaaaaaacggcaactataaatcaggaaaattagctcacgaaaataacgttattttttaaaaaaatttccaaacttaggtggcacatgaaattttcccttaatttaatataaaattctgcatataaactagtcctaattaataaggtgccaccggtcacttgaggtagtactaatagtccactaatatatatcacgtggaagatatatcgaactacaatatattagtgactaatcgatggtaatatttttattataaccattatagttacatttttttgacctgtaatagcatgttactaataggtaaatattctttnnnnagaattaattaattataattaactcttttcttaatataattaattaaatatttaacatgacctcttttagcaattaatatctataaatatttttttttgtttatatttaaattcttactctaattattttagcaattaagtcatttaattataata

SEQ ID NO: 148505 - DNA, 583 bp, Cannabis sativa
ccaaccctaatcctagccttaaccagacccaaacccgatcttagcctcaaatccggacctcacttaaataaaatcaataaagtaaataaacatgaaatttatagaagatacttttattttttatttttaaaagtgaaaaacaaaagtgattatagaacatatttttgtttttcaaaaataaaatttgaaaaataaaaaaatttacttttattttttggagtcccaatatatatttatagttaaatatttttaaaattaatttttatagttaaattgtttagtgttagtaattcttcttgaaaaaagcaaaatttctacaactaaatttttatttgatttgagaggcttgtcattgattgtaataatgtgatacagcacctcgtggggttcaaaacttttggttttttatttttattttttatttatatcttaacattttctcttatcatagattttttttttgtttttttttcctttttaacaactggtttttttattacataaaaaaaaaatattttttctttaataaaaatatttagaaaataaccttcagaaatgccttcaagtgagatcctcatctaca

SEQ ID NO: 148506 - DNA, 595 bp, Cannabis sativa
gatactcccttctacaataacgatattcctattgtagatttgaatatgaacgatgaacatgatttggcagtcgatgaagtcgtaaaagtaccttccttgaggttagagtgtgcaccgagcaaccatggtacacagcgagaatgacaaccccgtaataaaaatcaaaatacacctggaactagctgtagtcgacaaggcagattcaaagaacatgctcctcctcgtcatgcgagcttctcaacgttcttgtcatttgaagtttgtaccaagttcaaagctcctatgtggataaaggaatgggagcttactacttgtttacacagtaaggaatcgggggagatacaacttggaaatttttatgaaaacaaggaagaactgagacaagtagtgggtaggtttgcacttaataacaattttgagtggatggtgaagaagtaagcccctgatgtgttgtacgttacatacaaggatccagattctaaatagagattgaggggcaggaagaagatgcattctgacaactttgaggttattgtatttcacaataaacacacatgtaacctgaatgcgagacattcagatcaccatcaagcag

SEQ ID NO: 148507 - DNA, 504 bp, Cannabis sativa
ggaaaaactagggttcctaaaacttccccaactggtagaccggttccccaactggaattccagttttgtggggtttccttgggaccaactggaattccggttcctgcaggtcccactgaatcgttcgaccagttcagtgcatgaaacttcaaaatttcatatctcactcaaatcaaaccaaagcttccagacctgttctatatattctaaagaacataaacaaggaacaaaacatctcaacatgcacagaataaaaatcaccatgtgagagcaaagtttgagatcaataacaaaggagattagctctaagaactttaccttcgtttggatcactaacacttgaagcttaagaaaacaaaggagatagggctaagaactttaccttggtttagatcactaacacttgatctaacacaatgatttgtagcaagaaaaatgctccaaaggctgctggtccttagggttcgaacaagagaaagagagaagatgactttctctcaaatt

SEQ ID NO: 148508 - DNA, 542 bp, Cannabis sativa
  modified_base (375)..(376): a, c, t, g, unknown or other
tttatgtttcttttgagatttttctaaattaccaaaataattagttttgtacatatttttcatggtgaaacatttaggtctgatatgtcccttcctaccacagaaatgacaaataggcacaaatctctttacctgagatctcactctttttgtaattcctggagactttgcttctgcagatacaacttttgtagcgataggctttgaatttgttgtagcaaacttcaaatttgcagcatcaagaaagttcgttggaacactagaatttaaaattttcgtgattccaaaactttcaataccatctgatccaatgccagcaaagcctctttgacttgtattctgagcttcttcaaaaatagaagatccagggttaannatttgaacatttttcttgaaattttcaagttaattctttaaaagactgatttttcatctttaatgcaagaatcagtctcataatcttttatttttaattcaaaagtctcaatttgatgagacacttttttattcattttagtcaagactctattttcagaagtaac

SEQ ID NO: 148509 - DNA, 859 bp, Cannabis sativa
  modified_base (594)..(601): a, c, t, g, unknown or other
  modified_base (670)..(671): a, c, t, g, unknown or other
  modified_base (737)..(776): a, c, t, g, unknown or other
aatccagatcctggtaaaatatatccaacagttgtaaccatcccaatttcagttggaaggatacaagtcaaaatcaagcatctgggagtcaatggaggcctgatcaataacataatttctcttgagaattccatgaaaattctcgtcgaatttcaactagagtttaggacttatttcacttaggtgataggggaattgaaggacatgaagattcaattaacgatgttaaataattcttcatccattcaagagcgtggtaagcttcccgctcagcctctaatcactcccaaatggcaacatatggcacaaacctccacttcttcaaagtctaatctcaaggggttaaggccattactactcgaagtggtcaaagtacggtttcaccattacctaagaccaatattgtacaaatgcccactctagatgctgccatgccacaaagaattccagtaaaggtgcccttccctcagctttaaaatctactaggaagttactgggaaatcaaggtgaaatcctaaaaaatttaaaacaagtgaatatcaacttgcctctcttgcatgtgatcaaacaagtgttgggttttgtaccctaaannnnnnnnatttcaatataatcagataaactaattaataaagatcaaaaatcacattttatgttgcacggttcacannatttatttcatgtttatatttaatgtataaattcgattaagtccataacatatgtatttgttcatnnnnnnnnnnnnnnnnnnnnnnnnnnnnnnnnnnnnnnnnatatgttcaaaagtttaattccttgaattatctcactggatttagactggcatgataatcagcgataggtatacttacacctt

SEQ ID NO: 148510 - DNA, 745 bp, Cannabis sativa
atatttctaaagaaagagttgatcaattacttctagctaaaattcttcctcctcttaatgttttcggttggatacttgtgttgattgtacttgtgaaaaattgactagaacaagaaagaagactgccaatcgtagtcaatctttattagagattatccacactgacattagtggaccttattccactacggtaaggatacaagtatgtcataactttcataaatgattttctctaaatggcttcacttgattcaagaaaaatctaacgctcttgagaaaggcaaaatctttcgaaatgttcttgagaaacaattagaaagagtcatcaaaattattctttcagatcgtggaggagaatattatggtcgttattcaaaatctggattacacatgaggccttttgctgaatattttctagaaaatggtgtagtttctcaatacactatgtcaggttccaagtaaatctgttcccaaaaccccttttgagttgtggattgggagaaagtctagtttgaattattttcatgtatggagttatcccgctaaagtaaggatttatgatcctaatttgaaaaaattagatccgacaacagtttgttgttatttctttagttatccaatgcactcaaaaggctatcacttttattgtcatactcctggtacgcaaatttttgaatctcggactgctaaatttctagaatttgatgttgctaaaaatattctttcaacatctcttgaaatgggg

SEQ ID NO: 148511 - DNA, 548 bp, Cannabis sativa
  modified_base (112)..(127): a, c, t, g, unknown or other
tcaaagggtaaccatgagatccaaatgggcaatgaggtcaaatcaaaggtactaggcaaaggtaccattgatgtgtttttcacctccggtaagaaagtcacattggtgaatnnnnnnnnnnnnnnnnacatgaatagaaacttgattagtgacgacttacttggaaagcccgtcattaaggccgtttatgaatctggtaagctcatacttaccaagtataatgaatttttgggcaaggggtactcttgtgagggaatggtgaaattatgcacaaatgatgtaacttttaatgtttgaaataataaagcatctagttccacttatatgatttagcatggttctttatttttgtggcatcttagattaggtcatattggtttttctactatgtaaagagttaaaaaatgtggcatgattgattgtgataaaagaaattatggtaagtgtgaaagcaaagatgattaaaaaaccttttccaaatgttgtgagaaattcaaaattgttagatttaattcatagtgatttatgtgaattaaatggtattctaa

SEQ ID NO: 148512 - DNA, 1145 bp, Cannabis sativa
gtaagattagtataatgttatgcgtgtgtatttacatgtttagcatacatgttattcatgcctattagagtacattaatagcaatatcagtatacataaagttatattagatactgataaatgtatatttggctcaaatactgatcgatgctatcacatcagagtatgactagcatattgagtataggctgatattatggtcgatagtattatcatatgaacgttctagactcagcatagtatgggacacgagatgggtttatgattgggtgtatgggcacctaattataatctgggttattattatgttgttatttatgcttttcttactgagtttgttgactcacagttgccatttctgtgtgtaggtacgggcaagggtaaggctgagcagctgtgagagcgatcagatggagattgtacatgtcggggtggtaaagcctgaagcgtgcgatctttgggacatcaagcttacttgtatagtcgctaggcaacaaacttttgtatatgcacaatgtaacttttgtaaaaacttttgtaaacgggatcccgaatttatatatgtatgcttattttatgtttttaattaattaagtaaaattttagttaatcacgatttttgataaaactcgttgattagcaatgagctacacaattaagtttaaaattacgttaacatgcctaaaatagttagggtgttacaatttggtataagagccaccaggttgtcttccattaattgtcacgacatgtacaatcatcattggcgatcaactcgtctcacggttcagtaaacttttattgttttagtagtttatgttaatagtatgatataagaaaagcctgataggaagtatgttagtagcctgatagctgaataggcgcatgttttaaatttccaaaataagcgacaattagtaagtcttacttgatcacggtctgaccagactagctcttagttacgcaggttgttctaatagtatggatgccaagcgaaacactaggaatcagggtaactcagttggatccaatggtggtcaggcagttcagatccccctaaatgtttgtggtcgaggcagaggcagaggtcctggaggcagggcacgcggtcggggtgatgttaacccgccacaggctggccaagc

SEQ ID NO: 148513 - DNA, 915 bp, Cannabis sativa
caacacaaactccagtgacttttccggcatcaatgacaaataaaacttcctaaacaaataaaaacattaaatatgggatttggaaatctaattcatatctatggcatatcaaataccataaaaaaaacctaaaaacaaaaaaaataccatataaatttgtcaaacttaaatatgccatatttatcataagaacttttaaaatcacatactaagtgtaatttcctcaagtgagaatgactttttgggctttcactaattgaattacacaattagccttcactatatattcaattataaaaaaaatttaaactaggcaattgaaacatgtacactactacttacttttttttcttctaaactaagcttcccctctaattaacattttatcttttgtgaatatttgtggaaatgattattttgtatgttttttttattgctatcaataagtatattttcaaataaataatgctttaagctaattttgctaattattattatttatataatcatgcctatatattaataagcatacaatataataaaagagaattatgtgtatatataattaaattgagataatacatatatattttgtgatatatgagtatatttttttttttttaaaaaaaaaaccgtctattcccttttagtgttagaaataatattaaattttaaaaataatactattatatcattaattaaaaagtaagactaaaaataattttttaatatcaataactaattactatatttttaaaaaataatattatttttgaaatcctttaaaaaatacaaaaattattttgtaatctttaacatcacattcaattaataattaataattcttttttgtacaaaataacttaaattgtgtaattttaaataattactttttaaaaataattaaatattttt

SEQ ID NO: 148514 - DNA, 729 bp, Cannabis sativa
attaactcttacgataccttctagaccctatcaacaattagtgaaacccttagaccaccgataactcaatatatttataactcttactatacaacaagtttagcccagaatttgactcataaaacgttcgaattagaaatcctactgttcacaaagtttttagataatcgaaaaacctttctaacagtatagagatcatcaaaatcggagttataacctaggagttatgcatattttattaaaatagtttctttaaaatcctagatcatgccgatttctgaatacagcccaaaaataaaaagttctaaaaatatttaaaccccgatccagacaacacttccttcataaaaaatgtagctattttcttaagctttgaaacgagataaagatcttttaaaatggatcaaaattgagagagatgttgaatttttactaaagatactttttctgaaacaaaacttaaaatgagatatcctaatcgagtgaagataccgacttttgataggtaagaactccgaattagggaaaggtttcttcaaataaaatatgtattattgaattatctttctaacggtacaaaaatcgctggaaagaatagatatcgtacttttactgaggcaatattggaaagaaatttgaaaaactgtaattcaacagccagcatgaaaacataaatttttcgacatctaaataatcagaatcagtaaagagtttcttcataaaaaatat

SEQ ID NO: 148515 - DNA, 1009 bp, Cannabis sativa
ttagtatcaattctagtgtggtcctaccgtagttgttagaattatgttaaacccacaaagtatcttaaaaataaacctttatctctcttttcttcttaaaattgtccaaacttagtgaaaattctcaaataaaacatagtctcattttagaattctaattgatttattaaatcagttaattgagtctacaaggtagtatcattatatgaaatttaccaagtaaatttcctaccttattaattttttctgactccactatatatatatagatttgaaattgcatttttaattacataaaacgctctatataataattatagatacactatgaattatccattgttttaatctaaataatcaatgatcctctatagatggtcttcatcgagtaggaataaatttacctttctaccctttgatgtattttatcttaaaacactttgcttcttataaatgatgtaatttctgctttttcttctagtttcttttctgccaataacttctcgtctccaaggatccccttcagacttatttctctccatagagtgaagtccccagttctattaaacttctccaatttgaatctcgccattgatgacactcaagtcttcaagattgtagcggaaagaatcttgattctgcgttcttgatcaattacgtaccaagctttgatttgtgcgaaaattaagactaatagtgcagaatcaaatcaatgaaactttaaacaatcaaataattagcaatggcaaaactaacaacaagaacaataataaaaaataaacaggggcaaacagagtgttaaaaaaccagaaaatactaaatgtagaaaataaaaaaatcaaaaccaagatatatactagttcaagtccgatagattgatgtgatctatgactctactccagttatgaaataccactgtaatccttctttattgattgagcaagaataggtacgatacattcgagatgagattctctgatgagttcactacaagaaattaatgtcactt

SEQ ID NO: 148516 - DNA, 728 bp, Cannabis sativa
ttttttttctttaaaaaaaaaatctcattcaaattttaagaataaactcaatgaaaagaaactcaaaggaataaaaaagtatatctaaaaatttccatgaactttgacatgtaccaaatgatgctcattgaattttttttatcgttaaaaattcctcctgaactattaagattgttatatttaaggacttttgtctaattttagtaaaaattacgagttttttcatttttagcagctttttatatatatatatatttacgaaaatttatatagcaacctacatagtaactaacagagcaagttaaattataactcaattaatccacatagtaaactataaagaaaccatcaagcaatctaaaccgtaaaaataaaaaataaaaaaatattaaaaaatagtatataattgattctcctaataattttcattgactattctctccatccaattagccacgcatgaaacaaaaattttctttaataaataataaggaatatgctaagatgtactttaaaatgccaaacattacaagacatgatgtatcattattagttcattttagtattgggtcccatataaattaatgggtgattctacaatgcacttccgtaaaaggaatgtaccaatacactctctacttgttttggcattcaaaaaaaaaaattatagtctattttttttttcatattcatatacattataactatttaagatatcctacaaaatt

SEQ ID NO: 148517 - DNA, 653 bp, Cannabis sativa
  modified_base (605)..(606): a, c, t, g, unknown or other
aattacattctttaataggaattaggaatgattactgagggtggcaaataacctttaactagtttctcatatcataatctcaattttaattttttttttttgctattttaatctcaatctctaaacccccttctctaactacgtttgtatatatcttgatttattttctattgtaataaaatatctaatagttactaaaaagtttgataaaatttttgttaccgtagcattgaaccactattcatttagtaaaaatcggtgatagcacacacaccactactacaaaaatggccttttgtttcaatttttaagtgacatataaagaatttgcgtcagtttgtgtaattgacgttataactgtagatacaaatagtcttattttttgcttcacttattaatagacgctaaaatatttttgcttcagttcataaccaaagcaatagtaaaacgctgacgcaaattagttttttgcttcagttatgaatcgaagcaaaagaataaaaaataataataaaaaaaaaacataaaccttcagatcaccacaaccctgtaatacccgataaaaatatacatatattttaaattttatttgttataaaatttgnntaagaataagtattttatttatttctactaatagtgaatagagataa

SEQ ID NO: 148518 - DNA, 700 bp, Cannabis sativa
aaatgacttttctcacttgtcccttgctccttaatgttgagggaacccgtttgaacaaatttcctttcatagtttgtcaggagtgacctgttccattctcttatggcataggtcatctaaggtgactcctaggccgaaaatgatatttatcttttgtcccttgctccttgatgtcgagggaacccgttcgaacaaatctccttccatggtttgtgaggagtaacatgtgccattctactatggtagtggtctccaaaactagagagcaccgccattttcttgtggcactagtcacttattcctctttccttgtggttttagtgctattttaactttatgcataaacccaagtcattttcatgtccaaacaagtcaagtccttattggtttccttggtggattgaggtctctagggtaaaaacgcttgcgcgggtccatgaaccctagtttgggcacatttggtgtgtgagccccggcgccaaatggttggttgacgttttcgagccctctagaagtgccatgggccctcaagaaggatgtcttgccttatttgacatttatgagccttggtcaaagttgcaaggttgactttagagtcttcaaggtactcttaccatgtgggccctggtgcaagagtagctattttgtttttttgcaaaaattaggtataaaactatatttttaaaaaataatgatagtg

SEQ ID NO: 148519 - DNA, 739 bp, Cannabis sativa
  modified_base (138)..(151): a, c, t, g, unknown or other
  modified_base (362)..(363): a, c, t, g, unknown or other
  modified_base (391)..(405): a, c, t, g, unknown or other
aatttgtttggtaaccattcatgggtaatacccattaagaagtgttccatatatatatgggtgcactcttaatggctattacccattcattgataatatcatgaaaatttgagtttttatgcttagtttttctatctnnnnnnnnnnnnnnctcatttttatattatatgagttaggattgtttcattgagtgaaaaaaaaaattaagaaaaaaagtttttcggcaaaaaaaggttaaatttgacttaagtattttttatataaatatatttttaataggggaattaccctatttactattttcttttttaactttttattcaaatttacggtttgggcttctaaagtggttgcagcgctanntgcaataggagtttctatacgatttttnnnnnnnnnnnnnnntgcagcgctagttgcaatatgagtttctatgtataatttcgtaaaaacgcaaataaaattgttttgaagtgtaataataaaaaagcccctttttaatatagtgtaaaaagtaaagatttttttttcttttaattaagtagctaaattaagcacaaaaatttaaatttttcttttattattcgtcattagataatctaatagtttaattttgtttaaaattaatatttatagtgaaatgacttagtaatcatcaatggataatacccattaagaagtattccatatatatatgagaaatgtaagtaaatgactctatttctaactctatagatag

SEQ ID NO: 148520 - DNA, 514 bp, Cannabis sativa
gcgttaaacccggtgcctaattattattaagatcacaatacccagaaaacaaacgaaagaataatcagatcgcactaatcaaagggagaaaaatgtaagggattaccggtgggcaccgtcgagtgtggagaaagacaacgagggaagatagggagatagagcagcggaggatttcgaattttgaagtggagaaggagaaatggaagcgagtagacagagaggagaggagagtaaaggaagagaacaaggaaagtcaagcaataagcaatttgtattgactttcttacccaccaagttatccgatgcccaccaataatatttattttttaatcatatgattttattttcattacttgaggaatatttgttttcttatatgtcttatacgaaccctataagttataatttataaataaaatattaaattatgtatttgtcgaaaataacacatacagtagaacctctattcaagaatacacttgggaccaaaaaaataatattctaattgagaggt

SEQ ID NO: 148521 - DNA, 623 bp, Cannabis sativa
tttacaattttttaatattaatttgtataccaaaaatatattaaatcaattttttaattaaaaataatataaaataaaattagctaattaataaacaaaatattgttgcttcacggcctatctctttgtcttcggttagggttcatgaatgtaactttcttcaattatcttcgtatagttcttgctgttaatagtaattttgttcgttatattgagtttggtaatgtaattaatgatatttgcttacaccaccaaatccaagaataaaaaattatttaatttttgtctaaaattaatttattcaataaaaattatttaattctacaatcattatgaattaatctaatataaatcagttaataaatttattcaatacaatcgttttaatttgcttgaactatttagcaatatatacttcaaaatattttatgtaacaactgttaagtctaattttatcttttgaatctatgaatgtttttgtcgttttagaaaaaaaaaatgattttgacctttatatatgttgtattatttatcaataatataatgtgtagattaaatacatgtaacaaactaatatgtaacatatgacattatatattatgtgtcatcattttgtaatattt

SEQ ID NO: 148522 - DNA, 599 bp, Cannabis sativa
tctctctctctctctctccacccaacggaactaccaatctcaattaacctctaccccatctcctccactggtccccaccgatgaaacccaactaccctgacggaaccccgtggtcaaagcccgaatccaaattgctaaaccaaatctcgaattgtgaaaaatgtattttttctaaacttttatttcattttgaatgagttttcaagtttattttgttagttttaaggaaactggtttgattgtaacgaaatttgttttttgtttaattttctttgatgcctgttaaagttctcgcatttcatggtttaccgatttgtagcaacattgtaatatccgaataattctaatggtaaataattaaggtttacatttatattatgagttaatcaagtaataagtgggattatgatcctactaatttattttagtataaaatttaaattttgttataagtgagtaaataatcttaatttgttaattacggagatttatatagcctgtgtgaatgtaatatgagctacatatagaataaaaatattttcaggttcggggaccctgaagactacataagtggatatataagcataatttgttaatta

SEQ ID NO: 148523 - DNA, 614 bp, Cannabis sativa
ttttgttggttgttaataatttttaaggaggagtactaattacaacctcttattataattttttagtcaactttcattgttgaaatcacatgtcgaaatatttttcttcaaaaaattttcacagtgatattcgttatagttacaatatcattcttataatttttttaaaatttcaaatagtttacaaaaccaaaaacaaagttccttatatttcagtctactacgcatgttcaaaaaacttcaaacctattttcgacattgtaaactattcaaaaatttacaataataatattgtaactataacgaacaccaccatgaaaaaaaaattaagaaaatattttgacatgtactttctggtacagaagttgactaagagattaatatgttaacgataacactcctctaattttaaatgatggattatattattaattttataatcactacgcaagaccacgtatcacactacaagaaaagatagtagtacgtaggggctacaaaagttgcccctaaaaacctttataatcaaccttaaaatgttagacttttatttgggcttacattaaattttattggttttattaaaacttgggttgattggatagttctttgct

SEQ ID NO: 148524 - DNA, 507 bp, Cannabis sativa
ttgggttcgggtctgggtcctagttcggagcctaatctgggtctgggttcgggtccaggtccgagttagggtccctattgcgggtccatgtttgggtctgggttaagatgtctatcaagatctaggtctcaggtttcgatcccgttatcggtctgggtctgagtcaaagttcgtatcaacatcccaatctaggaccgagtttgtgtctgggatcgggtcccagaattaggtcctggtcaaggaccaagttcctatctcgttttgggtctggggctaggtccgagttcagttttaagtttgtgtttgggtccttgtcaggttctagtttcgggtcctgggtctaggtcagggttcgggtttgggtcctggtccaggttcggaaccaagtctgagtcccacatacagacacctactacgggtcagttccaagccctgtttcccagatctcgagtccagatctagatccctgtcacgggtcccggtctaattctggtttaggtcctaggt

SEQ ID NO: 148525 - DNA, 856 bp, Cannabis sativa
accaccaacgaaacacaaaaatcaaaagaaagaaagaaggaaggagcaggaggaggagcgactggagccactggagagggaagaaaattataagaaaaaaaagggtttgacctaaattttttaagcaacccccaaactggtatgtttatgatctaatcaaatgtaatgtatttttttctttctttctttttttttctgtaaattttttttcttatttttaaatttaaattagagtatgatatgtattattttctgtattttcttgtatatttttattttttttgaaagatttatttgaaaaagattaattagttcaaaatccaagcttggtatgtgttcatgactttatcctactggtctttgagttgttgaatctgggttaattagttatattttgttaactcactcacactcactcactcactcactctaccactcactcattatcataattgaactctttaattttgagggtttttagttaattagcaaaaattagtggttttggctatacatgataatgatgctaattaattagcttattagaaattaacaatttaaaatatgctatttttatatacttattaaatttgctatacttttctctccataatacatagttttggttctttataattagaaatctcttgctaattttgaagtgcttctagccgagaaaacttgctccaagttaaatgataagtttttcagtgaagaagcttgggacatatttggtgatgaagttgagaggttgatagtgtcattggtcctataagtagtgatttgtctgactctaatgtacaaattagaggactttagtgtatgtttgaattgggatgtagagattatagcatat

SEQ ID NO: 148526 - DNA, 584 bp, Cannabis sativa
acaaatatacccttacatcagatataacaaatatcaagactaaagaacatagagacagttacaaagacagttacaactgaagcagttacaaaatcagttacaaatattactctagggctgtaatattagttacaactctgccctagatcagaatcacagatcagtataaaaggaggtatttttctcagatacaagcaataatatatagagcaaaaatagagagtcacagccagagagaacaacaacagaaaataacaacagagaaaaagagagccttttggctaagagttgtcatctccatgtgagctcctcctagagatgttcatgtaaaagaaaagagagtttttgttagtatcaaaagtcagaaaaacagtgagaaatataaagctgtaaatcaaatattgtaacctatttttgagatgaatggattcaagctttgagggcttgacggagaagtagccggttgttttgggcgaactctgagatcaaagttttggtgtcatctactttaatcactatttacattctctcatctcactcttattatttttggtatttgtatttgtgtatgtgtttatgttctt

SEQ ID NO: 148527 - DNA, 729 bp, Cannabis sativa
aaaatgtaaaaaaaaattctttgaacgtaaaaatgtaaacaatttacaaaaaattgtgccttatgtaattattcccttataaaatacttaatttgatctaattcataccatctaattcctaaagtatagatatttatatgtgtatggattagattgaattaaaaaagaaataattacatggaaaatataaattcaaactttatttacaaaaatacctctataaggtgtggacaacacttatattttttatgtgcttttaattactaaaatacctcttataatatcacttacacaatcagacgatgattgcaaggtagttgttgggtgactcgccgaaggttgaattagacgaaggtttcaatcagacgatggttgcagggtggttgctaggtagttggtcgaaggttgcatcatacaaaagtttcaatcagatgaaggttgttgggttgttgctgggtggttggccgaaggttgcatcagacgaaggtttcaattagacaaaataactgttagcaaaatatttatgcaactgtaatgcaactattatgaaatattaaaaatcataacagtattttcacgtacgtaactctatctacatgtctcttcatgatttaatatgaacaaattcactattaggaatttacgaaacaacgaaaatacaccaagataaaattttactatagtattgatgtaattttttttttggattatacttgagttagattgttt

SEQ ID NO: 148528 - DNA, 782 bp, Cannabis sativa
  modified_base (566)..(572): a, c, t, g, unknown or other
ttttaaatcgaaattatcctttaattattcatcttagcttattcatttcaaattttcttaaatagtatatcattggatgaatggtttatatatcatttacttatgatgtcattctgtattctcttatgaaattgactggcgcatatgataatattcccgacattctatcctgaaatgatataaatccttgatcttagaatctcatacttgtatatgcttactttaggcaaattaaacatagagttagattagtagtggtggtccaaggtagaataaaactcattgtatatttggtataaatttaagtctttgacttgaaattttagattccaaatagaaattgttatttcagtttccagaacagaatacacttcaacttttacaagttttaatatccattttctatcaatgaatccaaactgtatgttaatctatgaaatatgaattagtattctgtggccaggatcaacttggagtattctaagaactctttattgtaactagacttaagtcatcaaaagaccataaacgaattctaatatgtctatggcatttgtatcttgttnnnnnnngttttgacaagatcattctttgtaaagagtaatatccctatatccacttgaaagtaagatcatctttattcgaatatggatgtacattcaggtgtgggtatgagtttttgttatgttcttaagataataactctaaattaaccttatgcaaagaaatttgaaatgtttgagaaattttatgtatttctagcaatggtgaaaaccattaag

SEQ ID NO: 148529 - DNA, 766 bp, Cannabis sativa
ttattttatgaacacccctctaacatattggattgaattggtttgcatccttgatgaactctaattacatatactgtatcttgttcttccactagcttctcataacagtgttatagtagaagaccttttgggcttagagccttatatgcagcttctttgagaggtgttttatatagtttgtgagtttcatatcttcttccacttgtataagggaactcactgttatattatttgtgataatataatatacattgaaatattaaaaatgtgataaataaatgtaaaatattattttggatcatggatgcaaaagttaatgatttgactctttgttttgtaaaatgataaattagaccctgtatttttaaaatagtacaaaataatattgagtttaatttttgatattttattaatataaataacttgaagacaatttttagctttcactacaaaaaatcttatttttagtcacaacaaaacctgtgactgaaagtaaaaaaattgtgaataattataaattgtcacttacgttgtgactaaaaatatgtggctaaaagtatcagtcacaaaaatcacaatttgttgtgactaaaaatagttttagtcacaatacttgttgggactaaaactaaattagtgataacttgtaactaaatactatgtttagtaacaaataatttttttgttgtgactaaaagtcacattattagtcacaaattttttctattgtgattaaaaagttatcactaaagatggtcttttttat

SEQ ID NO: 148530 - DNA, 519 bp, Cannabis sativa
  modified_base (36)..(57): a, c, t, g, unknown or other
attttaaattatatatattacattattattattatnnnnnnnnnnnnnnnnnnnnnnattattattattattatcatgatatttatggggtattcaatgagtctccatacttaatagagattctcctaccccaaacccgtagaaaattaaatggaacgagagttgtgataggggacataaatgcgagtggagacaaggttggggtacatgttgtgttttctgtgataaataaaatttattcaatataatcagattttctaattaataaaatatcaaaaaatcattttaataagtaatactcacaaagagtgaggttgatcccacaagaattgtacttaagtacgttaaaattaaattcttacttctatttggctaattaaaattttaagagaaaatttaaaccagaaaaacaagaaaaaccagtgaaagtaagaagcaggtaaattaataaaggaattaacaataatgaataaaagttagtgctttcgatttcaattgcatctattgattatggtttaa

SEQ ID NO: 148531 - DNA, 1067 bp, Cannabis sativa
acaaaagtggggctatcatcaattttggaagcataacacatccatgggcagttaacacctttacattgtgctctaactctatgagggtcattcttcttaaagaatatatcctttccttcacatagggtgtactccctaatttcttgcttaaacaactttcctgatacaaatgataacaccaaatcgaagatttctttgcccatgtcagttttagctctaaactctaggagctcaagaaatttttcctttttgaaccttttatttcttttgttcaactgtatgccattattctcatcaccttcatcttcctaactagagtcatcacatgcaactttttcacaatcagattctaccatgtcctcatcttctacatctatttctacatgttttcttcctttccttaacaaatggttttctccttgttcatcaattaatatgccattgtcttcttgtgcatactctggatcttctacataatcatcttcactaccctcctcactttcaccttcattttttagcctcattaaccaaatcagccctaacatccttagtttgtaccacattatgctgaaaattcctaaacaacactgtaatatcctaagattaagaaaacggaatagcgaaccctaactagttaaatttttgtttattatggaattatattgttatataatttattatatgtgaattaaattgagatatgacatgataagaccccgttggtgagccaggggcatttttgtaattttgacccgagaaggctaaaattgtaaatttaattgaattgcatgcttatggactatataattatatagtatacttgttgtgtccttttttaggtgttttctaacaagtcggggcggtatagtgacaatcgggtatttcaggccgaaccgagttcggggccaaaatacaattttgggattttatattggcattttattgatacatgagtattctgaaaattatttggataatgtgatatgtgttaatgatatttttgcccttgtaatgcatgtatatgtggaatgtgaccctaggggcatttttgtcattttgcctaattg

SEQ ID NO: 148532 - DNA, 525 bp, Cannabis sativa
ttattttcatttaaaagaatgcaattaactaacaattgaacctctttatgcatgcccattacaaccatcaatccactaacccaaaattctatatgcttgcactacttactattctccactaatataaattaatgcacaaccaagaatcaaaaggtctttctaggcttgtaatgttaggcttagggtgaaggtagttgaaatggtcatttaggcttttctatactataagcttctccaatcatgtcacccacaatatttttttacacaatctcaataccccttttctaattacatgagagatattttttcaataggattgcaacaactattatatttatctttttttttttctatatttgacactggttgttagatttttctaccttttctctttttctttttttcaagttgttgccatataattttcttttatatatatatatatatattctctcaatttttacacttttttctcacacacatacaacaaatttcccatccaaattcccccaaactaaagatcta

SEQ ID NO: 148533 - DNA, 513 bp, Cannabis sativa
taagttatgtcatgattttttatggggaaaatctagaaatagaagtaagttcatttttcttcttggagccaagtttacttagctaagaactgtggtggttttggttttagagaaggtaaaaaataaaatattgctcttatgactaagtacatctcggtcatagctactaaataagattgcctttgggttaagtagattgatagcatctatatgaagaattaggatttatggtctttcatcccaggattagacacaagttggtacttcaaaaaattcattaagttgagaaatattattgataaagctgaattgatggctgttggttgttctaggaagtaggggtgagcataaaatccagaaaatcgaaacgttcaaaccaacataccaaacaccgttagaaccgaaaccgactaaatcgaaaattgaaaaaaccgataacggttaaaaccgacattaaacggtcggtttttttttggtaataaaccgaccggaaaaactgaaaccgaccgttat

SEQ ID NO: 148534 - DNA, 980 bp, Cannabis sativa
  modified_base (55)..(58): a, c, t, g, unknown or other
  modified_base (398)..(413): a, c, t, g, unknown or other
  modified_base (632)..(637): a, c, t, g, unknown or other
agttgacttcgaaatgaatctgttaagtgcagccattcttcctatcagggcttgnnnntccttaggctttgtcggtgatggcatgtctattaatgccttgatttttttcaagattcacctcaatatccctcgcgttaactatgaatcccaaaaattttcctgaggaaactccaaaggaacatttttttaggtttagcttcatattatacttctttaatatcttaaagattctgcgaggtctgaggtatgatccttactttttattgatttcaccaacatatcatcgacgtaaacctctatgttttgcctatctggtttgcgaacatttcgtttaccaatcattgatacgttgccccatcgttctttagtccgaacggcatgactttataacaatagannnnnnnnnnnnnnnngaagcttgtatgttcttgatctggaaagtacatttttatctagttatatccagaatatgcgtccataaatgacataagttcgtgcccagcagttgcattcactaactagtcgatcctgggaagtgggaaacaatcttttggacacgcctttatcagatcagagaagtcgatacaagttctccaagttccgttaggctttgggacgagaacaggattggnnnnnnacgagggataaaacacctcacgtataaagtcgttaactaacaacttgtccacttcttgtttcagtgccccttgcctctcggaatccaagggtctccgtttccatctctttgctgggtaacttggatcaacatttaaatgatggcagataatactagggtcgatccctatcatatctccatgactccaggcaaactgatcctggtttgccttcaaaaagcttattagttgttatttgagctactcgtccaggttcttcccaatgtatacacattttgtgggatttcctgggtcgagaataacctcttccaattcttcgactggttttagcaagtttctttcatc

SEQ ID NO: 148535 - DNA, 521 bp, Cannabis sativa
  modified_base (457)..(459): a, c, t, g, unknown or other
aattttcaagttctttctttaatagaataatttcttcatcttttaaacaaaaatcagtctcatattctttaattttcaattcaagagattcaatttgatgagacagttatttattggttttttacattgatctattttcagaagtaacttctatcatttatacataaccttgtaagacttagccaaggactcctcacggatttcaaattcatcagaattagactctacttttcaatggtaatattaacacataccaatctttctttcacctgtgaaacacaaaacaaaatagaagaaactgaggttactgcaacattgttagaattatcttcatcattatcagttttatcgtcactccatgtgacattaaatcttttattattcttttttagtgtatttttacatccaggttgaatgtgccaaagccttcacattccctgcattgaattctcttttnnntgttagtcattgaaggttttgaaaaagtattacctttagagaattttgaaaaattctttttg

SEQ ID NO: 148536 - DNA, 533 bp, Cannabis sativa
  modified_base (471)..(471): a, c, t, g, unknown or other
tttaccaaatgctttgtacaagtataggtgccccccaagtgaccgagcagacttatgactcttggtcacttataattttttgcaagtatgctctcttgtctgttcagggttttgggctcgaccaaaccttttgtacgcattggatggtaaattaacaacatgctagtaaattcgactcaatttgaattttgaaataaacatctttattcatttgttgatcaaaaatttgtatgttatcgtagtaacttacatcaaagctattaatttgatctaatttgatctttagcttaacctaaaataaaacaaattgcagaaattaaaaattgtactttagatggtggtcatccgacctaagtactttgtaattttatccgaacctttgggcgtggttcgcccagaaggccattctcttaagagtgaatgttcttttgtttagtacttgtatggtcatccgacctggtacttctattngtagtattttcttaaatgtttcccattccaataccttggtaccagaacgagttgcatttttt

SEQ ID NO: 148537 - DNA, 593 bp, Cannabis sativa
ttacacttagtttgtacattatacactaagggctttcgcaattgatatgtgtcgctttcgtcttcctatgtgtattgtatttgatgcctcactatttgcattcggtgacatatggtttctcgctaatatactaagcaccagtttgtatatcgattccttgcctaagaccttacagtcagcaggttacaaatatactctgatacttacgtaattaatgagttattccataaaaagcgattgcatcgatccatattccatttatctttacacgtgtcctccactgagatggtagccgaattttggatataacaattgtcccttaaaaatttattttttcgtaaaaagtgctttttaataattacagagggcatttttgtcaaaatccctttttgaaaaaatgcgtcctttaatcctggcagttgtacgacttcgagggtcattatgaattgtctcttcatattctgccctactcccaacccttaaatttctaattccttagctttcttgtcactagactttgtgtataaaagggcggctcaagcttgtcatttttcacaaacttcttattttttggtgagatccattttgagaat

SEQ ID NO: 148538 - DNA, 519 bp, Cannabis sativa
tgctactaacacaaacatgctttgattcaattgagtcctaatatctccaaatgaaataagactaaaatctcatgccatgaatgaataaagttctactaccataacaatagcaaggtggtgcaacaacaccgttattgaaaataaaaatatataaataaacaaaacatatcaaattaagataacatactaagaagattaacactaacgaagatccaatccttgaccaatggacaactcaaatcttcgagacacacttctaaagaaagaagacggagaagagaagaacactgtaatgactgcataattagattatgaattagtaaagataattagcattaattattgatattttatagttatatatatgattttatatttattgtggaccctatttttagtaatggacattagagttattgtaatatctcgaaaaatataataatatttaattggacatattttattaaatatgtgattatatggatattagaataagattataatcttacttaagttaat

SEQ ID NO: 148539 - DNA, 519 bp, Cannabis sativa
tcaagctaaggtaagccctagaaacacccttctttagtttttaaggttttacttggtttgagtttatggtttagtattataggggcggttaggtttgggaatgcttagggttcgaattttatgtttaatttgagttgattaagggtcctagcagctggtattgttcattggtttaggttttgtgcaagtttaagctttaagctcaaagctttgatcattaatggcaagttgagtttcattggttttttctgtgaaatactggctggaatatattgtctatgcattgtttaggtactctagaaagtttggtggcatttggtggaaaattgagcaagaaatggaaggtttggggtgaattggtgcaaatcggctagccagttttgccagacctctaaaagccggttttggcaggatccccaaaagctttgatttctcaatttttgtccatttcagtgccatggctgggtgtttccctatttccagagtttgggtaacctctagggagtataacagaaccta

SEQ ID NO: 148540 - DNA, 658 bp, Cannabis sativa
ctggataaaagaatcttctggttcctcaatggatgaccatgtgagttctctattattctacgcatcataattgaaccgggatgacctaaccggtcatgccaaagaataaatgattttttttggtttgtgaacttctcgttcacaataatatgaattattattgtacttatacgtgtaacgtacaaacctgaagacaaaccatgtaattttctaatatgcacttttttcttgaaataatagacgtaatgcaaagatactcaaaattattttcatctattgtctcaatatgatatccattatgacgtatatctttgaagctcaacatattcctttttgatttggtggataataaggcatcatctataataatttttgttcctctaggcatgatcaatataatggctcttccggagccgtcaattaaatttgcagtgcctgatattatattaacatttgcctaaatttgaaaataatttagcacttctaagtattgtatgagtggttgcgctatccaccaaacacatatcatcattatttgtagatcatgtatagaatgacaaatgtccattacttcattaaccaaaaaaaatataataagttcaaaatataaatgcttaaataataaaagttcattacataaacatgtcaaataaaataa

SEQ ID NO: 148541 - DNA, 695 bp, Cannabis sativa
  modified_base (462)..(471): a, c, t, g, unknown or other
ttgaaatatctataaccacttttcaaattagatatttacctaattgaattaattagcccaaaaagacaaactccatagggacaggacaatgctataggcgcctagccttgtctgtttaggacaaggacaatgtcttttgtcttgacaacttttgtcctgacaaatcttgtcttgacaaattttgtcttaacaatttttgtcttttccttattcaattaattttaaaaaactatttaattattgtaaaaataaataattactattttgttaattcaaaatagatttttttgaatatctttatacctaccattgacaatgtttaaggatggcgatttggagatcatggacctataattctaagctccaataaactagattatttattgagtcacatcaactaaataatcccttgtttattaattccatgattactccattataaatatagaattgaactcttannnnnnnnnnaattatatttactgagtttaactgcagtgtctattgatataatcaattccagtgattgactctccatgtgttggttagtaattagttttggtcaaattactaccttacccttctaatcaattctttatcttttagttccattaattcactagtggaagtataattgaagatcccatttgaatttgtgcacaactttctagtactagaattaacacataaaggga

SEQ ID NO: 148542 - DNA, 608 bp, Cannabis sativa
gaagctatgctgcctgtcgaactcaagccaccttcccacagaagattgacgtaaggtaccaatcacatactcctagcagaatcaattgatgaaatcgaagagaaacaagccactacaaacttatagcccatcaacagaaagtagctcgctatttcaacaaacaagtgaaggctcagaaattcttcatgggatatatggtcctgagaagggtattcctaaacaccaaagacagtaggcagatgttcttggaccaaactgggaaggaccatatcaagtggtcgaagttctcaactccgaagcataaaaattaggaaagtatgggaaagtatgatgaaaaaatgcaactcgttttagtaccacggtattggaatgggggcacatttacgaaaatactaccaataaagtaccaggtcagatgaccaatttaagtactgaatgaacatttgcttttaagtgaatggccttctgggaagactacgctcaaaggtttcactaaaagaaacaaagtactcaggtcaggtgaccaccatttaaagtacagtttcttatgtctgcaatttgttttatctcatgataagctaaatgatcagattggatcaaatagctct

SEQ ID NO: 148543 - DNA, 600 bp, Cannabis sativa
ggtcaacattttggtgctctcatttagagttgaactcaagaatcgctcttcattcaaaatctatccacaagaacgatggtggtacagactcgtaggggcctggttgatctagtcaatccatagaaggtggatcctgcattgcagaacccaggaagagcaagggttccgccagctgttaatcctgaacagccgccaaacgtgggtcacggtgtaacgactcctatagatgaaatcgcgcctggtgtgcaagagactgagaataacagttcagcacccaaccagggcattcataacacagtcgttctgcctgttaccaacactcaaacgaccattgaagatgatactgagttacaaaacctctgtgctgctcttgggctcgtgcagggtcatgccaataccctacaacatgatcaggaagatctccgcgcaacggtaaaccttgcattcgaggaacagaggcgtatgtttaccgagtggagagacaaagagatgaaaacgttaggggctcatcatacagagattgaaaatcgtagtcggcaagctactgtgctgatacaaaaagcctaccaaactgtaggtcagcaacctccaagtgtcatc

SEQ ID NO: 148544 - DNA, 814 bp, Cannabis sativa
tttagtgtctcactatttagacacttcttaaacttaagttccattaaaaaaactttcggttttaaccttcaatttttactacatttacccatctatagatgagacaatttgagtaccatattcactctattgacttgttattacctattgaacttaagactagatttttactagtgttgagataggttacaaacactaagagagtttataggtcccatctcttgaaaattcatgctttaatcttgtatgaagattaagtgatttgttaacctcacacttttgatactaagcaaatcatgctagctagccaaatatattggctatttttaaggaccacttttctcctttagatcttaagctttgaaaattaaatcacaaaagattaattttcacacaactcaaattttactaattttgatatcaagcatatcaaaacttaacactaatttatacaccaagtatgtctaaactacaatttattttaagacactaagcatgtctcagatatacacattttagttttattcaccaagcatgtctaaactttttttcatattggagtatgcacccccaaattttaacatttcattatcaagataatattttgtatattgatttaaaatatagatgacctccatatctctataatttctcttaaatttaatttccttcttgaaattattttcaccaaaatttgatactaagtatgtcaaacttttcacacatgcacatagccaaaatgtatttagaatttgaattcaaaattaactaaattaatcaacaacatctcaatatatattgattaaacttgtgg

SEQ ID NO: 148545 - DNA, 1163 bp, Cannabis sativa
tataacccgactaaaccgaccgacgtacacccctaatgtttatggacattgatcatatgtgtagttctatatttataaaatattggagagttttgtgatagggtagttacttttttattattattattattaatacagcataatctattactttagttagttgtttttataaatatatgtatatatataacagtgttcctggtagtaatagtagacctctcctataaaattatacttaaaaaaatcggaaaaaaatcttctgtccccaattactaattacattcctgtctcttcaataaatagctgccatgtgtctttctctttttctacttaacccattcaattttcaagattaactctgttagtttccatctcttcttctctttcctcataactaattatttcctaattaattaataagtatattcaaaaaaaaatatatatatattctataacatttaatatatattcatcgaaaaagcatgatatattcatataaaaaaaggtttctatggtatatgcaatgcaattttaataaaatttatttaaaatatttcatagtttaaaaattaaataaatggctactatattaatagaaaactaaatattattatttgagtataaaaactaattgtattattgtgtacaatccatttaatttattttcgaaaaaaatttctctaagacctaataatttttttgcaattaaaaaaattataatttatatatatgcaatatatatatatatatataatcagacctaaatttttattttgtaaagacttaattattgaaaaaaaaattatatttatattaactataaataaatattacaataaagtacaatttcaaaaatatatatataattaaggtaaatttatataatttttcaaaccttaattgttataaacatatatttgtgggaactttttatttattattttgatgatattattatcaaattaaaaatgattttattctttttaaaaaataaatgtacatttttttttcaataagactaacagtgagtatttagagattgcatggattttttttttcttttactggaacgaaaatatttttttatgaatattgtaaggttttgatatcgtactattttattttatttgtacaaaaaaaaaattgaactatgatttataaga

SEQ ID NO: 148546 - DNA, 616 bp, Cannabis sativa
atatattagtgagattaaatatgtagaaataattattttctatgtatttatatgagacatacatatataatatatattatgtgtatataatatatattgtgtgtatataagatatatcatgcatgtatattaaagtatataaatgttatatatgtgtgaggtatgtaacatatataattgtgtatttatatatattatgtgtatatgatatatgatatatataacatatatgtttatataattaatattatgtatgttacatatatattatattagttggcatagaattattatttgagagttataattatgagagttatatattaattttgtacattaatatataaattatataatgtatatgataataatattgatagtaatataatagtgtttattactattgatgtggagattattatcatatacgtatattgtgaataaagagaatttaaaattctttttcaatagtgattttgagaaaataaattgtaacttgtgagaaggtacattctttgagaataaaagcgataattatctcattttatgagataagaaaagtgaaccataagagttacacttatgagaattgtcttgtcatagcaagaacaaattg

SEQ ID NO: 148547 - DNA, 814 bp, Cannabis sativa
  modified_base (26)..(72): a, c, t, g, unknown or other
  modified_base (202)..(202): a, c, t, g, unknown or other
aatagcaaaaattttaattaatcacnnnnnnnnnnnnnnnnnnnnnnnnnnnnnnnnnnnnnnnnnnnnnnntaaaaatcacgtaatacgcctgagatagttagggtgttacatacatggagcggtcaaattcgaattcaaagcctccaacaatgaggccgaatacgaagccctaatcgctggactcaaactagcgaatganatgaaagccgagcacatcgagatctgcagtgactcacagctagtggttaatcatgtatctggtgaatacgaggctcggggagaaaaaatgatagcaaatttgagcaaaatacatgatcttctcgcacaattcaaaagctacagcctgaagcagattccaagagaggaaattacaactgcagatgcgctggcccgtttggcgagcagcaatataagtgacaaggcaaacctcatcccgatcctgtttcttgaagagcctagcatcactggcacagaagaaatcaaaatgatagacacgtctccaaactagatgacgccaatagcagcctatctcaactctggggaactcccaaataaccgaaatgaagctcagaaaatgagaagaaaggcagcgcagtacatcatcgtagacgggatcatgtacagcagaggattctcaatgccattactcaggtgcgtcacaccaaatgaagctgcacgacttctatatgaagttcatgacggattctacgaaaatcatgcaaccggacagagcttatcaaagaaaattctaaggtaaggctacttctggtcgacaatgattgaagattcgaaagcctatgtaaagaagtgc

SEQ ID NO: 148548 - DNA, 626 bp, Cannabis sativa
gatcaagcacttatccttgaagtttcagacaccagtgggtgtgggagtagtgcgaggtgatcagatgctagcttgcgaatgttatcgcatagagctgcagcacagaaaagtcagtcacgagctaatggaaatcttgacagaagaaggcaagaagaaggatgaagattttaatcctcgaattcaagatgaaaaaaacttattgaaaccaatggaagaattggaagaagttgttctagacccaagaaatcccacaaagtgtgtttacattgggaaaaacctggacgaataattgaaatagaagctaataagttttttaagggagaaaggatcagttccgcctgatgaagtgatagggattgaccctaatattatttgccatcagttaaatgtctatccaaactacccagggaagagacagaagaggagaccctttgattccgagagacaaggggcactcaaataggaagtggataagttgttggtcaacaacttcacacgtgaggtgttttatccctcgtggataggcaatcgtgttcttgtcccaaaacccaatggaacttggagaacttgtattgacttctctgatctgaataaggcatgcgcaaaggattattttccactaccca

SEQ ID NO: 148549 - DNA, 683 bp, Cannabis sativa
taataaagtttaaatatttttgggatcccaaattttataaagtttaaattattacaagttttatttccatttcatttattacaaatgttttaattctgcgctattttgattagtaatcccgcttaggggattagggtttcctaaataactcgggtaacatgcctaattttttagtgcgttacataacgcatcaatggtcgtgttttcttcccttagaatttgtctgagaccgtagcttttgaattgtgtgagcaggtcgtgtattttgctcaaatatgctatcatcttttctccccgagccttgtattctctagatacattatttaccactagctgtgaatcactgcagatttcaatatgttcggctttcaactcctgggctagctttagactggcgatcaaagcttcatatttggcctcattattggatgctgtaaatccaaactttgctgcaccgtgcaggtgttgccctctaggtgtgacaagggcgattcctgcaccggataaatgatctgtagccgacccgtccacatgtagtttccaagtcgacttgtcttcactgttacttggctgaggtatttgtactagttcggggttgcctttcgatatggttttttccttgcctgtgcattctaccacaaagtctgctaagacctagtctttgattgctgttcggggttgga

SEQ ID NO: 148550 - DNA, 787 bp, Cannabis sativa
aaaataatctttagttttacattaggggattccccatctcgtccccactctattagaggattcctcaccccgtctcaaatagaaaataaacggaaatgagaattaaaattctttaaaagaattgggacgagagagcactccccgctgtatagacttttacgcttcattatcttattataataaatatttttattcaacacatttttatgagaaaattacataaaatactatttttgttaaattttttatacttttacatttaataacaaaagaactacatgaaagtaacagaaaaataatatataaataacaaaaaatcagcaactaaataataaaagtataacataaaaatacatcaaaagtccgtattttatgtaaataaaatatttaaatagtaaaaatatttaaagttccgtataaccgtattttttgtattttttttttgaattataaaatattttaattaataaatgaataattacataaattagtattttttatattgagtaatttgcggtatgaatacctaaattttatgccaagtagcagataaatacctaagtcctattttttgcggtaaaaataccttccgtcactactctggaacttccgtagatacctctccgttaagtgccaggttagtgttcacgtggcacgttgtgattggtccaggtagatttatttttattttttattttaaataattatttagcattttaaaaattaattttaaattataaaaaataaaaaaatatctttttttccttttactctctctctctctctc

SEQ ID NO: 148551 - DNA, 810 bp, Cannabis sativa
cctaagctagtagggtcttacaagttaccataagaatacataattactcttacttgatttttccaattatttaactatttcttcaattttttcataaaataattttttaaaaaaaaaaaatcaaaaaatatatttttacacgaaaattataaaaattcataaaatttatataagctcacaacaaaagtttgtacatgagaaacattaattgtcaattaagttatcacatgttcttgctcaactattataaatacttatttataaatataagtaatgcagaaatggctatttaagattgagctacatgacattaataaattgtgtggtgctaggaaattgcaatacatatattttctcttaaaaaacattcctattcgctatgataatgcctaataccactatgagagatgacatcgagaaaataattagcagtttttcataataattattaaaataaaatatataagattcaataattatactcataacaatataatactttgtaataaattttaaacattagtatcatttagcaatagcatttctcaaggttttggattctcgtagtaatgatgtctaccatttttttattgaagtatttatatatataaatattacaatacatattttaaactttgattctaagactctcaacacacacacttccgtactctctcttgactacttgagttagcctctagtaattaaaattagtgacagacttagaatttttattatatgggaattaatagttattaaaaaaaaattaagtctactttattttaatttatttatttttgtggagttttt

SEQ ID NO: 148552 - DNA, 1080 bp, Cannabis sativa
caacaaaatttatatactatacatcaaaaaatatataccattgatgcttaagccacaataaatttaataattatttttctttcagatttaccaattactttagtatagcgaaaaatacatgtcaaacccatgagaaatatgattaatttattattcaatatgaaatataaagtaaaagagggattgtgagtttgcaattaaaaagaaaacaaataacgaatgacagttatgatattatcgacacgtttaattcgttttttttaaaacaaataacgaattgtgaggcactctcatatgtgtatttattaaatatacttgtatttttaataattacacttacagacttgttgtaaatatgatgaaaagagaaaaatattacagagcttatagttttctgcaaaggaaaatgagtgatagtgagaagagatttttgttgagagtttgctccttgtaaagcattttggctttgctttgtattgaggtcatgaataataaaatcgttctttctggatcaatattttcttacatatgttactttaaaattaaagataacattacttaaaataaaactaatcatacatagctttggcacgattggaagactgaccatgttgtctcacaggttgggttgagttgaggctaagaagtttttcaagagaattatgtatgtgtcggaatttgctgtgcatcgagattttggaactgttactactctcctttccattgaggttccttttgagtttatccaacaggtttccttcgataaccccttccatgaaaatatgaaacacaaaacacttcaacaacctctcctttatctagaacttcactgaaagtagatttagactaaatagtagtggagccattagataatgtataatggcttaaagaagcaaaaacctgtgattaggtaactcttctttaattttgtggatttctttacatattattatttgtctttttatgtaatagagtgctttctataatctgaaatctctgtcaactggcagtttctccgattcagttagacgtcgctcctctgttttacaatggaatcttgatgttgctactcagcttgtt

SEQ ID NO: 148553 - DNA, 678 bp, Cannabis sativa
ttgaagcacctcataattatctaaagttatcatagactattaaatttggatgagatcgacagtaaatcgagatcgttcagatattattttagtgaacaaactttcatctatttataatgtatttttttatttaaaaaaattattatttaattcttcaaatcttattattgttattgttattattgcatgtgttattttgttgttcattaatatactttatgtaatacaaccattaatatatattaggagcttttttttatttttacactttaaaataatttttttttgtatttttacggaattccacatagaaacccatatatcaattaacggaacaacctaaattgcaaccaaaatccatatagcaacccacatagaaactaccagagaaaccacctaagaaacccaaactgtacattttttaaaaaaaaagttaaaaaaataatatatggggtaatttgcctatatattaacaaataaaaatttaagacttttcactacaataattacaaactatacaatttttatagtataagaattattccatattagtaaatattaaagaaattcaaattattgtttagaaaaaaataaagaaattcaaattattaaatcaaaataaaagcttaataaattaaaaaaaaaaaaaaaaaaaaaaaaacattttttttaaaaaaa

SEQ ID NO: 148554 - DNA, 813 bp, Cannabis sativa
  modified_base (27)..(41): a, c, t, g, unknown or other
aggatgttaatgaaacatacatggtannnnnnnnnnnnnnnggtaaaatatttccaacacgatccatacagtatacactaatcgtgcgatatatgcggaatacattgatcgtgggataaatgcagaatacactgatcctgggatcgtgggtatgccatatctctgtaatctgatcccctagttatagggatttcgttgatgactcacaatgcgaaagctgaattcgctaagtgttggttgccctgcgcagattgctgattgctttgctctgggcatgccagcgaggcatcctgctcggactgtaccttcgcgagcagatactccaagtggattccacttgtcaccattatgcgatgccacgtcagagtgcaaaaattgggataacaataatcttaatttgtagctctgaaattatagttattttcaagcttaagtttatggttatagtgagcatgatcttaaatgaaagttatgttgattttagctcatgttgtgagattgttattgatggatgctaatttgattttagttgtatatattggtgatgaaaagagctcaatttatgtgtttgagctctcttttatggtagttgtaatttgtgaaaaatggttttgaagtataagcatgtttggggtgaattcggtgtgatttgggcatgagtttatgttgctgttcgtcagatttgtaggtttggaaccccgacgcggcggccccactcattgggcgccgcgactcgcccctgtaaaatcttgggttcttcaacccagctgtcacgacccatgtgttgatttggatggtttcatgttgatctat

SEQ ID NO: 148555 - DNA, 612 bp, Cannabis sativa
attgatttctttctctgggcgtggccccgtggagtaggagtgttcgaaagaacactaataccacgtacaaatctcttgtgtcaagtgattcaatttttttgcaattattttaatattctgctagttctggtttgtttctgcaaaactgttttctgcattattctgctgctgacgtttataattttatatttcaataatattaattgatatttgtaaaaactcagtttttcaaatgtaaaccatgaataatgaataatatattttaagaaaactttaaaatgaaatattgtttagagtatctaataatataaaatgtttttggtttggaactacaattatttaaaaaaaattgtggttaacaattagggtcggccctaggcacgggcccactctttctaggggcctatttaaaattttaagacatcattacttaactactatatttattttaaattaacattaaatatagttaaattggacccagcatagtggcagcctaaaaggtggtaggattatgttttcttgggacctgaattcgaaaccaccaaactttagtttttattattaatttttttttttaaaaaaaaattatctaagaaacaactataaatg

SEQ ID NO: 148556 - DNA, 820 bp, Cannabis sativa
ttttctgtgctttactgagatcagtttgcttcttgttcaacagccttaagcctttttctaatttttttttattatttattatttattctattttttatcttaatcgttatcatcctgaagcttgcattatgttgtccattttttttttcttttctctcttcctccactgtaggttagagaagatcctgttttccggagggaaggcgctgacattcatgttgatactgctctgagtattacacaggtgatgtattatgttgtttgtttcttggtagagtttgatatctcttgtaaataaagtgctataggtggttagatgtaatatttgtgtttttccacccttgattgtaagtggagtagataaagggggaaatataataaatagattgatgtaaatggaaatcattgtttatgttatgattacataacaaaatgaatctagatcattgaatttactgaattgcccatttatagatagcttgcatatgttaaaaaattcttcgaggtaaaggtaaaaatatctcacgatttttgtagtagaaaacgtgaaaggaatgattaattgtaacatcatttcctatggttgtggggaattagcattcctgttctgattttatgtgggcccaacatattttcaagatttagttagaatattgctacggcccacccctacacgacaagatgcaccaatcacccatgtgccgcctcatgtggtgttgggtgtcttaaggtgccatatagccattatcatttagcagccccttgaatcatgattgagaatcatcatttagcagccccttgaatcatgattgagaatcat

SEQ ID NO: 148557 - DNA, 544 bp, Cannabis sativa
ttaattttctcggcaaatattcccgaatccctatactaaatagtgaaaattacacaaaatatgagtttttaaaactttattacaaaaatatggtaaatttaggtttgaccactttgtatggcatatttttatttttagacttttttatggtatttactataccatatatatgtaaacttatttttcaaaccccatatttattatttagatttaccatctttttctttctttcccgtaccttacctccctctcgctcttgcttttgtgcggcacccctgtccaggctccgatgagccatttttggtcggcgatggtccaaacggacctcaccaccgtgcttgcagtccctggaaacccctaaacatgaagtgctaatctctcctgctcctccttccttgctctctttggtctcccatttcttggcaaagccacgacggggccccaatcaccatggactaccactgttggcgagaacggataccatggctgaactcaaagaaccccgaaacctaaccccctattttcccaaagtttctttctctct

SEQ ID NO: 148558 - DNA, 593 bp, Cannabis sativa
  modified_base (549)..(554): a, c, t, g, unknown or other
gttagtaaacctagatcctggtaaaatattcccaacatcgccttcttctgttatgaccaccattaattgatggttggctcttctattttgaagctctacacaatagcattcgcgagccaatagctggtcacctcgcactacacctagttctgctggtgttttgaattttaaatataggtgtttgttgattgaactgactgcccctggtccaatcaatgcagggcaacccatcaatatgttataaactgatggtagatcaacaactaagaaatcttgcattaatgttgtagacaatggtggctctcctatagttaatgggagtccaatgatgccttgactggtgacactatctttagtaaatctgcataagctcaccatgcaaggttttaactttgcgttttgtagtcccatttccttcaacgtatctttgtaaaggatatttatcgagcttccattatcccccaacactctctttattctcttgttggcgagttgaactgtaatgacaagaggatcaacatgtgggtactgttggaattattttaccannnnnntagatctactcacaagtatgttcattaacaccctaaata

SEQ ID NO: 148559 - DNA, 643 bp, Cannabis sativa
cacgcatgagcattggaatacggtgacacacccaccatttgaaagacttaaccaatattcccacaacaaaatatacagagaatataaaaccctaagttttaaacagcgggttggaatgaccaaacctccagaattcctaagggagtatgtacgcaagtattcaagatgttcatccgaatactcgcaagtgttcataaaagcaagtaagaaaggtgtgaatattcaaagtgttctttctaaaagttcatagttatacaaactttaggtctattttcttctaggattatccagttgtaacagagaaaatataaccctatgcatattcctacaaacatgcattttcaaacttctcaaaagtgtcaaaaacccagaaatgcagttttttcaaaatcagaaaccaaatacgcaagtagtttcgaaaactaacctttaattttgacgattctccctgtgattggtttcgatcacttctgaaacttaagatattcaagaagaaaaggcagaaatctggatgaagaatgtgagtcttcaaaaattcagagaaaagaggaaaagaggaagttggaaatgagagggaaaatgagaaaatcatttcgtgtcagagggcttaaataccaatacccctcataaattgggattgtga

SEQ ID NO: 148560 - DNA, 564 bp, Cannabis sativa
  modified_base (418)..(418): a, c, t, g, unknown or other
ctagtttaatactaatatattaattaattactaaaaacagtgaggataataaaaacttgactaaaataaaacactaaaaacgaacattataacggcagtaaaaagaagtttcgggaatccctattataaaaaatttatccaaaagatgatatacaatgacaattcaaaatacaacagacaaccagtctaaaacaactcttggcaattcaacacgcaggctggtggggtcaatatgtacattgctagaaaagaccgccatctcatggttgttctaactttgccttgcctttacctgcaccacaaagcacccgtgagccacatagactcagcaagaaaagtaataaaaaaggataaattaaatagcttattatacatttcattatcacaaaatgattaaactataacattcaacagtagntaatataaccagtcatatgcatagaaatatatatgcccatatatttgcattacttaatcaggcaatcccgtgtcataatgcaatatcatatataatattattgcgccacctaatcaggtgagcctgtgccacaacttgacactaat

SEQ ID NO: 148561 - DNA, 701 bp, Cannabis sativa
  modified_base (56)..(56): a, c, t, g, unknown or other
  modified_base (406)..(410): a, c, t, g, unknown or other
  modified_base (579)..(579): a, c, t, g, unknown or other
ttttaatccatatattttaataataaaaatgacttaatttaagttgatccaaaatnaattaaataattaattttcaaatttaatttttcgaaaatcattttataaaaatataaaattttgaaaaataattaaaatacaataaaataaatatttgaaaaatatttaatttaaattgttctaaaataataaaattttcaacttaaattgttttttaaaaatttaattaaataacaaattaagtatcttgaactaattgaccttaatttgaaaaatattccattttaagttgatccaaaattaacaaatctttgacttaaaacaatatttaaagaatatttcactaactaatttcctccaatatctcaacttaattatgaatttaaaaaatattcaaattcaagttgannnnnaattagttataaataattgatttttaacttaaatatattttatgaaatattaaataattaagtatcgagaagaatctaattagttataacttctttatttaattaaatgtagaaaaaaaaaacatctagtttatattgaatttgaaattcattaaactaagtgtgtttntctaaattaatttcaaaataatcaaatgaaaaactaatttcatgttggaaatattttaccaggatctagatatactaacaagtatgtttcattaacatcctaatatgaattctagatcggaa

SEQ ID NO: 148562 - DNA, 946 bp, Cannabis sativa
ttttttaactatggtaaaatgatcccaaatgcctgatgttcttgtcccttgcctcttccttttctgcggtatcttaattgtagccttctttttttcttcactctttacaaccttaatccatttttgcacttcatcatccacattttcctcttcattctccataagtaatgatctaaaacaatacatcatacacattttaatctaaatgtatatgataaaaatagcacaccaaagtgagaccaaattaataataagaataatttatatatatgtatatgccaattcttagaagaaatggttgtgtgttgaccgttcttaagaaatggtttttttttatgttttaatgttttgtatcttgtttgttaggttatagtcgtcctatgagcttatctatttatatatatatgtatgtatagctctttctgttattgtaatatttggtgcagcaaattgatcaacgacaatttattattattattattattattgagacaaaggaaaaattctattataaagaagccaaaaaatctagagatcattacaagtataagaaattagtgtaagtaaggaggaagcttcggccactaaaattaagaatcatctaaagaatgagtaagaatattaataataatatcatactcattataaatttgcattttattagaaatatgaataaataacaaagaaaaagaccttaaaattagaagagttgaagccttatgcatcttataattaattttttttaaaatatatttgatatcaattctcgatcggctattaatttgtttcatcatcatataaaagcttcttattctaaaaaatgtatattcctctagctaacccaatttaaattaacagaacaagatcaaaaatatataattaagtaatttcaaccatgattctctagataattacatccctcagattggctctcagttttaaggat

SEQ ID NO: 148563 - DNA, 541 bp, Cannabis sativa
tttgttaagtccaattaataaataatgtaaatggaaattttattaaatagtttcgatatttataggattgaaattagaaaatacagtattcttgaacgaagaataagttattgaaataaagtggcaacattgtaactagtgaggcccacataatggtcggccactaatttttgcccattattttattcttttttaatccatatattaaatcctaaacattagttgaattactatataagaaacatgatgctctcatctcatccaacctaattcaaccaaactaaacctagttttcattctctgtcaactagtagacgagaggctctttctatagtgattttgaaccttattcattattcttcaccaattcgagccctattgatagagtaccatgcctaggggtgtgcagaaagtcatccgatccaatcccaaccgactgatccaatcccaagcgatccaatagaatcggatatccaatcataattggatcggatcggatgtaaattttaaaaatccaatggatcggatcggatgttggatg

SEQ ID NO: 148564 - DNA, 522 bp, Cannabis sativa
catgacactttgtacaagaaagtggtggagctagccttaattgctgaggaggctgagcaacatgtagtgaaagagcagactacaaaggcttctgtcacggcatcgaaccctcctgctagtggtaatatcagtaaggggaccgacagtggtaacgccgatcacaaacggaagagctgatgcttccagaacatcatggggtaatagaaagtttcggggaaacaaatgtggtcatcaaggccgcggttcttcatttcgatcttatcctgagtgtcctaaatgcaagaaacaccatcagggtgaatgtcaggccaagacttttttctagtgtggcatggtgggccacttcatcagagattgtcctcaggccaagaaagaggagcctaagaagaatactactcagaacccgggatgactttttgccatgactcgggttgactctattactagtccgtcagtggtgacaagtcagttctctataaatggctgttcttatactgtattgtttgactcgggagctactca

SEQ ID NO: 148565 - DNA, 1044 bp, Cannabis sativa
acaaaatttaaaaattaatgcaggaaaaaaattgtagaaaatttatttttttttcttatttttcaaatgtaacgactgaaaaaaccgtcgctaaaaaaaattcaaaaacataaccagattataaggcacaatttaaaactgtcgggaacctcacattagcgacggttttgaaccgtcacctattttgcccaatttacgacggccaaataggcgacgattgtaaaaaccgacgaaaatactttaaacgtctatttaaaaatgtcgggaaaacccatgtttatagtagtgcgtcgaaattgcccaccctatctataatgctagatatgtctatgagacaaaggacacattcctttcttagataaagcatttaattctaaatgtagaaaatgtacaaaattatttcttaattatcatatatgattaatgcatataattattgtactatattgatgttataatttatacattacaaaaaattgtaacttttagtgataagtttttagtcacaacttaaattttttgtgattacatgtgacttttagtcacaacaaaaaattacttgtgactaaaacatagcatttatatacaagttgttactaatttagttttagtcataacaagtattgtgactaaaaatacatttggtcacaacaaattataatttttgtaactaatatcttcagtaatagatttttttagtcataacttaagaataataatttataattagttacaattttttttaagtttaaatttgtgactaaaaataagattttttgtattgatattttgtagattccctattcacatatgccgcaactcctcacaaatcatcgttgaaggtaaacatcaacccctcacagatcattgtcaaaggggaaatagatagtaacccccctcttactatgtcttcagctggagaggaaattgtgtggggtacccacttcaagttaaccattttaatttttatcctctttttaatattttattttttctacccacttttataattaatgttcctataatactctttcttcaacccaa

SEQ ID NO: 148566 - DNA, 540 bp, Cannabis sativa
ttttttttgaaattttttttattagttattgaattaattcaatatttaatgtgattaaaaaatgtgaaaaaaagagaaaattattagagaagaataaagttattatagactgtcacgtcaccacctgataatttttcaagaaccttcattcaatagcttcttaaacttagaaactaatttttttttcttatttttgcatgcataagattttcctgtaggataaatggtagacgtatttaataattggtaattgataaaaaaaaataatagaaagaacatatgaataaaataataatcacattctcattaataaaaatcatatcaagacttatcaattctctattgttcttagtattaagagactctcacattctacaaactctaatttttatgttctacttatctatatcagtgtttaagttggtaagaaaagaatactcatgtcggcaagaaaaaattactccttcatgagagaagaagagaaaaggtaagtagtaaagtgaattatgaatttaagagaaatagtttaggatatatata

SEQ ID NO: 148567 - DNA, 543 bp, Cannabis sativa
acgtaaaatatttggtgttcattactataattattaaagtctgtagtaaatttattacgtaaaagactatatatttggttaacgaaaatctgcgttaacagtttgatgctttcattgagagccttagtgataaaaacacagaaaaatctctcctcataaacacaattacaaatccatataaatggctgataaaattccacacaaaggtaatcatccaaaggaaactacccatcgacctggtaaagaacctatgggatctcagagatccaacacatctaaaataccatgttcagagaggaacgatggtaatctcaatactgctagtgatcaaattccagaatgaatgagtgaaaatgcctatgatcctaccagatatgtcctactggtagaatttgaaaatagttaacttcgacaacgcctggctgaatcaaaatgacaaaatgctgagttaaagcgagaagtcatactaaagactgaaattcgtttaaagcctttatttgtgtacatataattaatataaattaaatattccttatttttaat

SEQ ID NO: 148568 - DNA, 606 bp, Cannabis sativa
taaatacttaagtttaacttttacttgtaaataaatacccaagtttaatttttaacagtaataatacctaagttataattttaaaacttctataggtacatgcaaaagcggagccacaattaaattttaggggggccaaaaatatatttatacatgcaattagatatggtttaatatgagtgcttaataaatatatatgtatttatataataggcctataaatatactactagaccgtttgtttcaatgttctttgaaaactttttacatttattattatagttaattaaggggtgggcacctagtaacatttgatagaaataaaactacatatatagtaaaattaatgagaacaagatacctcagtattttgggtggggagctagggccatcctagactgctacatacctctgtctttgggtatatggctagatgttaagttaattaccacgtaataatttttaattggttcaagttattaactttttatatatttttctagaaaaaatagtttaaacataccaataaaaaaattacacgtgaataagggtcaggtacctacagagtttgagaaatataacttaagtattattaccacaaaaaat

SEQ ID NO: 148569 - DNA, 648 bp, Cannabis sativa
tagagagttatatatattttgtatttgtatttctttctagaatattagtggggtgttataagttaaattttagaggcgctaaaattctcgggatttgttaattgaccaagttacccttaggagtttatagttaaattatttaacttgaagggcaagaaggtcttttggcaaatggttattttgtcttgttgtgggattaaagttagctgaatataacttatcaaataagaaaaataggggttttattctttttcaaacattcaagagaactcaccctcattttcatcaatctctttctttctctcattttcgaaacaacaaggacctagcttaagcttgatttttgtttgctgattttttggagttcctagctgaattggtgaagctttgatctaaggtattgatcccttgttcttctctttgattctagtaagcttaaagttaggttttgaagcttaaattgggaattttggttctgtggttataattgttgtttgaatttaagttctgaagattaattgagtttaattgagttattatatgctgtttttgttatttgttgtaaggttttggcaaggtttgagtttgagaactcaaaccttgacctctaatggtgtttttgaaattgatgtgaattgttgagttctg

SEQ ID NO: 148570 - DNA, 704 bp, Cannabis sativa
tcatcacccacaaatctctcacaaactcaccatcgtgatgatggtatcaaaaccattgcttagatggacagtaatggttcaaaggttgaatctcctattgcactccaagcttttaataatgtcaaattttgttttcttcttttattactatgtatcactgcctcacatgtctgatggcattctggttacaaaatgatactaactagagtacttgcaatgctgttatttgcagaggttggtcgtcgatgactgaaaccaacccagaaccggttaggctctgctcatcgactacaaaaaccaacccagaactagttcattggtcttcaaatctcgacctccggcgaaaagctctggaacgatatcgacgtggtcccgatctcaaatatgagcatggtgtgggtgaggattatttttgttcttgttgtgggaaaactgtaggagaagaaataaaatgggggtgaggcttggcatggggacgatgttgtgatcttggggtagtctagcttgaacagatctaagaaaagtggagcttgaagtgtggtgatgatggctgggttgaagagaaataaagaagatgaacaagaaaagaggatagttgggttcatgaagaagaagacgaaggggagagagaaaagcaagggtcggctatggaggttttagcgaacgacggttggagctttagaccatggtggctatggaggttt

SEQ ID NO: 148571 - DNA, 594 bp, Cannabis sativa
ttagaatagttatgaaggttctgaccttataggattgttctcgggtagtcatgggactagtttcgatgtcttcttgctgaaattgaggcgattttgggttagaaatgagttttgaactttttaaagctttgttcgaatattaatggtatttttcaattaagggctcgattttaatttctattatgtaaggatggtaatatttatggtatatatgttccctgtgaagtttggagtgattaggataagttttggtagtgttttggtgagtgcgaaaatagaaattttcgtgtttcatagttttaaaaaaattcttaggagatcagaaatcatatttttgtcataacttttcactcgagtgtccgttttggatgttctatataccgttttgaagcttgcaacgagctctacaatatggtgtatgttttagagccaaaatataagttttattttagtgtttttatactgcggggtttggtagaaaaccttagattgtcttatgtgaatattaagcagtgttttgggataaatacttattggtttaccattattgttacatagggcctagaccatcggggatagttctccacttgggtt

SEQ ID NO: 148572 - DNA, 973 bp, Cannabis sativa
  modified_base (40)..(47): a, c, t, g, unknown or other
ctctttctctcttcatcttctttcttctcatctactttannnnnnnntatattattttataacaaatataatattaagtaccttaaataccacataataataatattataaaaaattatttattaaaaaaattacaaatatcatttttttttcaaaaagaaaaaaaaagaaaaagacagaaacaagttgtttttgtttgtcttgcagtgaacttaattattcttattgataaaagaaattaaagagttaaagccaaggagagttgtaaagaggagtaacgacagacttaatctgcatatacttgtggagggcatccagaccaaaatctttcccaaatccactcattttgtatccaccgaatgggcaatcattgtcgattccaaagtaacaattcatccatactgaaccagctcggactgatctcgaaacagtgttcgcaacattcagatcttttgtcattattcctgctgctaacccatacttagactcgtttgctctctctatggcctcctctacactcctttatatatacatacaaaaattacaatattaaccatacagaaattacaaaaatatataattaatcaaatcattcatctacttgcttacttgaacttcatgaggcccacaacaggcccaaatatttcgtcctttaccatcatcatgttctcctgatgattaatatatacgtatatagattaattgccatatataatatacagcaatatgaacatatcttagtcacgattataccttaacgttagtgaaaatggtaggctgaatgtaatatcccttgtcccctattggcttaccaccagttaataaagtagctccttctctcttgccatgctcaatatagctcaggattttttcaaactgtactttgtcaacctgaaacattaattaacaattgttgtgttttggagtcgtacccaaaagggttttgtttaattaatgatctacctagctatag

SEQ ID NO: 148573 - DNA, 598 bp, Cannabis sativa
gtaaaaatgaaaaagccccaatatatcacgttttaaaaattatattttatcatacaaatacaaattattttgaattaggttaaaactggacatgagtcaagtggaatctaggtaagtggttggagagttataagattgttgtttattatatgtaaagaaagaatgtagaggcatatatattattatattggtaacgatttttaattaagctatattagagtaataagtgaacaatttaggccaaatctagacaaactaagatatgtgacaatatttcaactttccttaaagagaatatgcttaattatttttaactacttttttaaaacatacctaagtatataaatgtatataataaccataaagtcctctataccttaaacaaacagaaattttttaattagatcatctcttgtcgtgcaatatacaaaatccattacatattcacaaaacaacattactaataaataataataataaaaatcatatcatataactaattatatgagagaaatttcattttttggccttaataatacaagccatatcaaattttataccctccctattaatttgtacaaatttagtccattgatta

SEQ ID NO: 148574 - DNA, 650 bp, Cannabis sativa
tttaaatatttttcaaatatttttaaatagcataaatttaaattcttattaagatatattattaaattctttttaaaatagaaatatattatcctacattcgagatcgagatatctgttacatgtttatttatacaattttttctaaacaaaaatattatttatttggttgaaattgctatgactaacttgttgacagatccaatgatcggattttaatcatagtccaattatcaatagatcttataaataatttgtaacaggtaaattttttaatttttttcatctgtgataaaccaagtaacatgatagagcccatcaaaattatttgacctatgtgagcctatatgtttgcttttgggcttaaatgcatataagaagcccattaaaattttattaattaaatgggataggttgctataataaaatatcaccttgatagttttatttaggcccaattagtatttgacttattgaatgaataacaattatttaattaatggttaaattcatctcttttgggccttgtatgagagttagggggccatagttgtgggtaccatatactgaacccagccctccctctaggggtgttcattggatcacatccaatggatttggacccatcccatccgatccaatccaattatt

SEQ ID NO: 148575 - DNA, 1566 bp, Cannabis sativa
  modified_base (76)..(79): a, c, t, g, unknown or other
  modified_base (173)..(183): a, c, t, g, unknown or other
caaaaaaagttacttgtcactaaagtatatttagataaagttgtcactaatttagttttagtcacaataaattgtnnnntttgtgactaatacatttagccactgacgttttagtcacaatataggaatgatgatttataattagtcacaatttttttacttttagtcataannnnnnnnnnnactaaaagtaagatttttcgtagtatttttttttattgggggaggaggattcaaacagtggcagagggacatagggtaccccactaaatttttaaaatttactttttgtatgtatttttttatatatagatatatatttatagttttgtttccataaatttaatttttattttagttttgccatcccatattataattttgcccatataaatttatattttttatttttatcttcacatatttttggtatttagtctcatatatctactctaatctctataaaatttatatttttctttataataaaaataatattttttacaagtctaattttctccattttttttttgccctcttgtagttggcttcgccactggaattaaacttgggatctcctctttaagaggagtgtgaaaccactaaactatgcatatgaccactttaattaattatgtataaattattacttttattattattctcatcatttttctaattttatactaattttagggagcacgtgcattgcacgtgcccaaaaactagtatatatataaagataggtgatggtttttagttttagttaaattattttgtctttttgtgcttagtattattttgtttttttttttgtgaatttttatttacttaataagttaaatgtatatataataatttataaatttaaatgcactaccatttaaaaaaaaaaaagagcaaatgcattaatatataataacatgtaaatcaaatatctctatttttaacataagttatttttttttctttttacttgttatttattttaaagagcacatatataatttttttttatttaataataaattatacacacaaccacattatatataatatttcaagataattactttttacaactctattaataaaaggtcttgtttgtttttttttttcttttttcttgttatttatttatgaagggtacataaaagctccttttttttttttaataataagttatacacccaaccaccttgtatataataattcaaaataattatttttcacaactctattgatcaatataaattaaaaagtcttatttattttttgtatttaattattttaaaatggacatataaagtttttattcatataataatagattatatgtaataatctatatacacatgacacacatgtcacactcacacaagatatgattttttttataacactaaaattaaaagttcacatttatttttatttaccattttttcttcaaaaaagtatatacttaaaagtttcacattgtattaaatttattaaatacaaaataaatatatatttatatatataaaagtattttgactctaaaatttgaaatgtggttactaaaga

SEQ ID NO: 148576 - DNA, 539 bp, Cannabis sativa
  modified_base (459)..(460): a, c, t, g, unknown or other
tatattggccatgtttgatgtgtgtattctattaaatttttttaagaaaatttataataatctatgtattatacggtagtaattttttaaaactgtaaaagaaaatgtgacatttcaagataaagttatttataaattagtgaagtgatttagttaattgcataagtataataaaatgataatcttatgactaaatattaagtaaaaatagacattgtttagtaattgacacttgaataggacaaaagattttaatcaatcctagtttaaatatgttgcattcaagatcacagtattacaatgcaattgcccaattaaaataaactattaaatgccctacaaatgagatgctttttaaattccccaccttaaaaaaatccaatatatattaataaataatgtactattgcacagaaagatcagtattgttaattctatttttggcatatttaattgacnnaaatattttattatttattgtatatttcggctggtatgtattaatatagtttccttattttgtgtaacgccctaatgct

SEQ ID NO: 148577 - DNA, 659 bp, Cannabis sativa
tcagggccatctcttccaacaaatcataggcctcatttgcacttttcctcataaatgctccaccagctgctgcatctataagggttcttgtgttaccaaccggaccgttgtagaagttgtgaaccagcatccacttctcaataccatgatgagggcactttctgatgagatccttgaacctctcccaagactcatggagagattcattatcctactgacagaagttattgatttctcctcgcaacttggcagactttgctggaggaaagaacttagatagaaattttgttgccaagtcattccatgtggctatggagttcagtggcaaggagttcaaccaactcttggctcgttctctcaacgagaatggaaacaatctcatacggatggcaacatcactaactccattgaatttgaaagtctcacatagttccatgaagtttgacaagtgcagattgggatcttcagaagggagtccaccaaactggactgaagactgcaccatttgaactatggcaggcttgatttcgaagttgttagcatccactgccagtggcctgatgcatgactgaacccccgtaagagttgggaggatataatctctcaagctacagccattagcttgatctctcaagcgtgcaaaagccatgaaaaacaaa

SEQ ID NO: 148578 - DNA, 513 bp, Cannabis sativa
aagccattattttctctaactcttgtttcagaatgccaatctaattacacagttttagacaaattctgaaattactatatagactaggaaagaaagcatcaaagtgaataccaacaaagaaaggaatggaattttaccactttgtcgcgttcttgaatctcagtttttgcagcctcaacttctaattcacaagcttctctccatctagttacctctgcttcagtttcctgaatttccaataggaattcctcaacctttttttccagccagagaaaatgagaaataagttagtatagtataaaaaagaacatggtttatgaatgtagagcaaaataaccataacatattttgatcagtcaaggaactacattttgagtcagcaccctctctctttcctccaacttcttgatgtataacttgttttcttcaatagtttgagcttgtttgtctgtaagactctgcaaccgctcagtgtctgacctggccgtatagctgatgttataaactcaaagg

SEQ ID NO: 148579 - DNA, 553 bp, Cannabis sativa
tagttagggtgttacattacacttaagctcaaaccttgaacaaacctcataaaccaccaccaaaccagctctaatcataaattctaaccataatttaacctagaaacaacatcaaacaacagcaacaactacagagttcaaaaacctaaattcatgcaaaaccacaatactttcctacttaaattccaaaaggaagaagaagaaggaccttaccttagcgaaatactaaagtcaagattgctgaattcctcaacaaatgatctacttagaagagaaaatcttatttttcttcttgggttcttggtggccgactcaaagcaaagagagagagaattgttttcttcaattttctaattttagtaaatgatataaattggttttggtattctaatatcagccataaaagatttaattaaaaatcaattaaagtttcactaaaagacaaaatccctttaggccaaaaagaccataatgcccttgcccacacaaaaccattataaaaactacttaggggtattttggtaacttcaaaaatctcaactattcccgacat

SEQ ID NO: 148580 - DNA, 1131 bp, Cannabis sativa
  modified_base (94)..(98): a, c, t, g, unknown or other
acccctagttttttgggttattgggcagactgggctggttgtatccatggccctgtcttttcacgtattgcttaaaatggcctcgagcgatgannnnntctatctcatctttcaattggcgaaattcaacggtcgtatgcccaatataaatacttgttaggatttctattgctcctcaaattcctcatgggttcaggcttcctgaaggaaaccttttgctcatgtgcgaggtaaatattctcgcgagtttcattaagctcggtataaatagtatacactggcacgtacttatcatgcttcttctgtttctttttatcctttgacggttctttagtttcgtcctttctcttcaaactagaagcccccgagttatcaattcttatggaaatagtaccgcttgaaatattactgggtttccttcctaagcttgttttcaatagattcatttcctttccggcttcttccttctgaatgaacacttcgccctttcgttgaactcagcgatgcttctcactggatgtccttgtaagtcatcccacaactcgccccctgcggttaatggatcggtagagatccccgcctgaagggctataagttacatgctatcatccaaattcttaaccctagccgcagtcgtgctaaaactacttaagtatgccttaagtgtctcgctgggctgcttctttatattggttagcgaggccgcttcgggtcgtctatccatagcagcctggaatggtttcttgaaatccctggacagctgctcccaagaagttattgaatgacgagtaaacttgttaaaccagatactggctactccaacaagtaaggtggggaacaaaatacagcgtaaattgtttgtcacattacttgctcgcattattgtgtgaaagttattcaaatgcgagactggatcagtggttccatcatatgacgagacattcgggtttttgaatctcgaaggaaaaggggtattcattatatctggatgatacggttcaagctcatcatcagagtcgtatctagattgtttccctaattcccccacttcatatctcctgaacttgtcctccagctcatttatccgcaattagattggatcctcttacttaagaacactactgagaaagt

SEQ ID NO: 148581 - DNA, 573 bp, Cannabis sativa
tatatatgaaaagattatgtgttgaattttactaaaattgatatggtaaaatacatcacatagtgttttatatgtaattccaaaaactaaaatacatatatacattttttttttagatgaataactttataaaaaactgctctctattcttttttaccttgatgaagtaaactttttctcgtaatgcattattgatatattctagttattcaaaatcaatgttattaccgtatctcgagaaataattattcgacctttcatccctctatcatattatattgtaatatgtttttttatcgttacttcgctactatgtttatttgcattacttcatattaaacaaaaaaaaagtcattagttgaactatttaaatcaaacaaatttcaatggctaattaatttgtactaataaaaatattttagacaaaaaatagaataaataatttgaaaaaattaaaaaataaaaatatagataatttgtttaaagatattttaggtaaataagcttgaatatgaaaaaaaaaaagtaaaaaatattatggtggtgtttggtaacactttcttaatcaatttt

SEQ ID NO: 148582 - DNA, 739 bp, Cannabis sativa
ggtgccagggcgcactgcccctgggaaagacatggatgttttcatgagaccattgattgatgaattgagggagtggggggattcaggtgtccaagctcgagatgcttacagcgagactattttcacactgagagctgctattttgtggaccattaatgacttcacagcgtatgcaatgatgtctggatggagcaccaaagggtacaaggcgtgccccacctgtaacgaacacactccttccattggattacgcaacaagattggttatgttgggcacagaaggtttcttgaaatggatgatccaaggcgtagaagtaaaaaaatacgatggaaaattgaggaaagaccacctcctccacaattgtcgggggacgatattttagctcagcttgagcagttacaattttttttgcctaaaaaacacaagcaatttggtggagtgaaacgtaaacgttctatagctgagttaaattggtcaaagaagagtatattttttgaactacagtattggaaggacttgtctctccgacataatcttgacgtaatgcatatcgagaaaatgtgtgtgacaatgtacttggaactttgttaagtatcgagggcaagtctaaggacacagacaaggcaagattggatctggagaaccttaaaatacgttgtgagttgtggttatttgaagaccgtaacgggaatttgaggaaactgcatgctagttacacacttactcttcctgaacgac

SEQ ID NO: 148583 - DNA, 862 bp, Cannabis sativa
cttaggctagacttcattgctccttaagggctcatcttctggacttctagctggcatcttctccttcttagccttagataaggccaggttgtaacagtgacaggcagattgttggtctcccctcacacatgccactctgtgccttgttaggaatttgaggcacaagtgataaatagacatcaccgtcttcaagtcgttgagggccggtcagccaatcctggcgttgaaagctgagggaacattgataacgacaaactgcaccatcattctacgagaaattgatcggtgctgcatcttctttgccaaaggagatcgtgtgctctatgggcttctattgcttagagctctagtcttcgacagctaggatcttgtctttaggctcgtgacagagtgttcaagcataacgctccctagctttgctagtttcagtagtaatgtgggggtcccttattatgatccccaaatgtcctgccatgggtggtggtattggatctccagcttggcctccttgtgcctgggtctagtcattttgcacataacgacgcaggtggggattgttatgccttatcatttacttaatctccctcttcatattttaacactcattagtgtcgtggccgaagtcattatggtatctacaaaacttcgccatgtccctcttgcccatctcccttttgattgtaaagggatttcagtatggtaccgtcccctgagtcgccataaagatggtctcaggcttctctatcaagagagtgaagcaagtagacttccctccttatttttctgtggcgtgggcgaagtgttgaacttcccctttttgccattgttcctcccagagctgttggtgttggaaattatttta

SEQ ID NO: 148584 - DNA, 754 bp, Cannabis sativa
actcttgaagccaaagtcaagaagagggtcaagttgttgtgaactttgaaacactacaagaaaacctctttactatctctttttcatgtccagaaagattagtgatggacaagaaatagttttaaggaattttcatgtccaacattattcgatattaaaattatgtttttaaaattaccaagtgaaattataaaataatttaattaatgcggaatagtagtaaatttctgaacaaaatttatctctattttattagacatagaatctaacagaacagaaatatactgccaaaaagtaaaaatgtagaaaataaaatgacacacaacattaattttatacgtggtatcagcaactctttcgaattgctcctagtccatggggccacgcccagagaatgaaatttaatagatgaatctcaagtgattacaaaactaaattgacttatataggtaaagactccatttttgaatttgccgcaactgttgtaatatattattctaaccaaatttctgaagtgttgagaccttgaattcccttcaaatcgtagcacttgcacacttcatcccaaagagtgactcacatgcaatcttcctcctaagagtgtttaacttgcaatcttcctcacgaagagtaactcacttgcaatcttcctccctaagagtgactaacttgcaatcttcctcccgaagagtgactcgcttgcacttttcctcccaaaaagtgactcacaaacaagtcttctcccaaagcttga

SEQ ID NO: 148585 - DNA, 690 bp, Cannabis sativa
cataaaacccaacaaaaagaacttggaatttttttcaataatatacttaaaatataaattatttataaaaatattttaataaatttcaattataataatatattgctgcattattaaaaatattttaatttcaaaattatatgcttgaaacaaaattaatcctaaatttatttattttttattattttcttggatttttaaaagtaacattttgacgttgataagaaactaattaattacttttacgtaaaaaaatttatttttaacttgcattattaaaaatattttaattttaaaattatatgcttgaaacgaaattaatcctaaatttttttatttttttattattttcttggatttttaaaagtaacattttagttacttaggacgttgataagaaactaattaattacttttatgtaaaaaaaattatttttaacttatataatttgagatacaatttagttacatctaaaacttatttgtaaacatcttaataattaattagttctttttgagttatattatgttatcttattatttaaaatatatttgggtaactttaaagtttatttttgaaattaataagttgtcttataatacaataaactactatttttatttaccaattgttttatatagttttttgttactttgaaacttatgtgtttaaatataccaataagaaaa

SEQ ID NO: 148586 - DNA, 672 bp, Cannabis sativa
  modified_base (376)..(382): a, c, t, g, unknown or other
aaggactgtttgaagtctatcctactccttctgatgacttctcccttgatcctttcaagggaggtttaggtttgaatttttaggaaactttaaccttcattcccggaagccaaagttcttaggaatattttaccatgatctagatttattaacaagtatgttgaattaaaatcctaaatatgaatatctctaaaataatgaaattaaacatgtaagagtttaaaaaaccttacattgattgcagcagaatatattgactccttctgctcagatctctaacccttttcctttttttcgcaaagtattatcaagatttaagccatgatctctttctctccttcagatttggttaccactgtcttccacactatgattnnnnnnntgacttgctatgtgtgggtatggcactctatcactaagggtcgactatgaagaaaaatgaaggaggcttgaaatcactatagaaggtgactctcatctactagttgtgtgacagagaaaagtaggtttgatttggttgaaggtaaaatttcagttatgttggatgagatgagagcatcatgtttcttttatagtgtttcagttaaggctaggtttgaattatatagattaaaaaagaataaaatgttgggcaaaaatcactagaatggctggccactaaaggaccacttt

SEQ ID NO: 148587 - DNA, 833 bp, Cannabis sativa
  modified_base (327)..(330): a, c, t, g, unknown or other
atttaatgtaatgttttttttattttatttagttaggaagggaagttttatttgtcattgatgccgaaaaattcgccggagtagcagtcagtgtcggaaaattcgtcggagttgctgcaggcgccagaaaattcgtcgaaattggcattgtcgccgaaaaaatcactgaaaaaatcactaaaaaatcggtttcttgatgaagaaactactttcgtagtgatttttccgttgataatgccaattctgacgacttttctgacgctagcagctactctggtgatttttccggcaccgacagcaaacttcagaaaagtcatcagaattggnnnngtcgccggaaaaattaccaagaaaggaaccaattacttgatgaagaaaccagtttcttagtgattttttgggtgacttttctgacgacaatggcaattctaacaacttttctggcgttggtagcaactctgatgactaatacactggcaaactacttcggccacttttcagtaccgatagtaaactttggaaaattcgtcagaattggcattgttgccggaaaaatcaccaagaaattggtttcttttcttcatcaaggaacaatttcttgatgaaaaaaccagtttcttggtaattttttgtgatttttcaagcgataatgccaattccgatgacttttttagcaccggtagcagcttcggtgactttttcggtgtcggcagcaactctagcgactatgctaattttgataacttgtttcagttaactttattgtttagcatttatatttcgttatgatttttcatagtgtcgaatctgtttcacaaggttcataagttcga

SEQ ID NO: 148588 - DNA, 552 bp, Cannabis sativa
  modified_base (498)..(504): a, c, t, g, unknown or other
tacttgtgagtagatctaacatcctggtaaaataatttccaacacgcacaacctccagatttcgatcccaaattcacaacgaaacccacgaagaaaaatctccaagaacagaggatacccctgctcctgataggcggacccactccgttcttgatcaacatgccaataacgatgcctccagccccttcttcctcagttccggcgatcacccaggccttgttctcgtctcgactgttcttaatggtatcaattaccaatcttggaagcacgggataactatggcgttggctgccaagaacaaactcgccttcattgacgggtctcttccacgacctgaatctggtaaccctcttctcccttcttggctttgttgtaacaatatggtgatgtcctggttggtaaactctgtgtctactgatatatctcaaagtataatgtactgtgatcttggtactgtctctatttttgcttacttcttttcttattttttaaaatttnnnnnnnttatcttatttttaaatctaaggtaagatattaaattccttttataaa

SEQ ID NO: 148589 - DNA, 512 bp, Cannabis sativa
  modified_base (26)..(39): a, c, t, g, unknown or other
taattcctaacctaaacctagtggtnnnnnnnnnnnnnntagtgatggctcacacttaaatagttagtttttatggtattctgttagtagcttctctcaacttgtattgttaggagcttgagctatataaggatcactcctcttgtactcatcattttttataatacaacttctcttatttactctgtttttcttcttcttctcgcatgtgggattctttcaaatatcacgtttcggtcctaaggtctcttaaaggtcgttcattatactcatatttttcaggtccaaacgtaagggaggtgtattggagttagtcccacattgctaatgtatggaaataaattgtcatatataagatgaatgactactcctctcattaccaattaattttaagatgtaaccctatacatcttattctaactactctaaattctaacaagggaaatttgattttttatccttacattaagggaaatttttttccttaaacctaaaatatcttatattggtaa

SEQ ID NO: 148590 - DNA, 680 bp, Cannabis sativa
  modified_base (170)..(177): a, c, t, g, unknown or other
ttatggtcgggtgtatgggtgcctaattataaacccgagatattattatgcattatgttatgcttttcttactgagtctgtcgactcatagtgctatttccatgtgtaggtaagggcaaggctaaagatgaggaaccgtgagggcgagcagatgaagattttacatgtcnnnnnnnntaggcctggagcgtacgatcttcgtgacatcagagctttttgctgtatagtcgctaggcgacaaaaattttgtatacagatagcaaacttttgtaaatgtattttgtaaacgggatctcgggattttataaatgtattactttatatttctaattaaataagcaaattttaattaatcacgtttttcatttcgctgattagcaatgagctgcacagtatgttaaaaatcacgctaacacgcataaattagttagggtgttacacaacaacggcatcaatattcatttttaattgtgtttggggaggagcttgccatggtttatgaggtgcaactagtgagttcaggtgggggccaagatagtagatgtaacctgctggaaattgcaaagataagcaatggattttgcatatattgcagcagctttttgaggcaacttattatgtataatgttgtttctatcaaaccaaatggaccacatagtgcatagaatcttttccatatc

SEQ ID NO: 148591 - DNA, 1721 bp, Cannabis sativa
  modified_base (973)..(976): a, c, t, g, unknown or other
  modified_base (1229)..(1237): a, c, t, g, unknown or other
tttctgatctttattagtaaatctcattatattgaaatgagttttattcagggcacaaaacccaacagtgttgtcatcagtggtaatcataaggtcatatcttatcttttaattcaatccatccaggtatttctctttcttactaaaatcagttggcactattcccaaggctaatcttgccaatcgatcaaattgagttgtgtattcagcaacactcatatttttttctgggtcagctgggtaaattcctttcttttttgcacttctgactgcatcattatagtactttgcgttgaacaactcctgaaacttttcccaggtgatagtggtaacatcacaagtcatggacaccatgtcccaccaaactagagcattttcttgaaactggaagccactctgtcattaccggtgacacccatgaaattcaaaattcttgtaataatagtcagccactgctcgactttcattacatcgggacctcccagaaagactggaggcgcctgcttgcagaaccttttatatagtggttccattcggttcactgcaacaactggtcctgcctgcacaacaggaacatgagctacctgtatttctagagcaaggatcgccgaagcaccctactgtctcaagcgtctgatttcttcatctgctcattaattctggcttgcatttctacaaacctattttcccattcctgggcaacatgcggcgggttaacatcaccccaatcgcgtgccctgcctctagggcctctgccttggccacgaacgtttgggggaatctgaactccctgattgtcactggatccgaccgagttaccatgactcctggtgtttcgcctggcgtccatactactagaacaacctacgtaaccaagagctagtctggtcaaattgcgatcaagaataacttactaattacggtttattttggaaatttaaaacatgggcctattcaattatcaggctactannnngcttcctatcaggcttttcttaaaacatactattaaaataaaatactaaagtaataaaggcttactgaaccgtaagatgagctgaacactgatgatgattgtacatgtcgtgacgatctttggaagacaacctggtggctctgatacaaaagtatttacaaaagttttacagtgcatatacaaaagtttgtcgcctagcgactatacaaaataagccctgatgtttgaaagactgtacgctctaggcctaacnnnnnnnnnatgtacaatcttcatctactcgctttcacggctgctcaatcttagccttgcccttacctacacagtactactaaccatagtatcagcctatactcgatacgctaatcgtactctattcgtactgatgtgatactcttaagtagtatagtgctatcgaccatgatatcagcctatactcggtacgctagtcgtactctagtcgtactgatatgatattgttgaatagtacttaagccaacatacatttattgatatccaatacaatactaaacatattgatatcactattataatggaaatacatatgcatatcattatagtaattttacctcgttaccgaattcaggtgtgccgggcaacttgagtggaacaactggttgacaaattataggcccctaagtcacattattcgtaaaattggtgaatgacatgctaaatcactttctgaggacttaaacttgaaactaaaagattccctatcgat

SEQ ID NO: 148592 - DNA, 519 bp, Cannabis sativa
  modified_base (38)..(43): a, c, t, g, unknown or other
  modified_base (74)..(76): a, c, t, g, unknown or other
ttaaatgataaaatggaccttgtattttctaaaatagnnnnnntaggaccctgaactaattttttttatcaaannnaaacttaataataacctgatctagcgatgttatcgcaaaactagttatattttctatatctgttcgtgttataaattattttaagttggttatattaaaaaaaataaaattatcaaaaattgagttgagggtcttattttttactattttggaaagtatatggtctattttagcatttaacaaaaccgagggtttaatttgtaacttttgtaaatataggatcaaaaatagtatttactatttttttctaaaaaaaaaattcaattgaatgttaaactcactacatatatatctcttatcatttatttatattaaatgttgatacataagataaatatttcttttatgggtaaatactattttggaccctttgttttgtaaaagttaccaattggaccctttgttttgttaaataacaaaatagactctacattttttaaaat

SEQ ID NO: 148593 - DNA, 596 bp, Cannabis sativa
atcacttgctataccatcaacagagtgttcttacgtccaggtattctcaaaactccatatgaaatctggaaaggtaagaaaccaaatgtaagtcattttcatgtgtttgggtgtgtttgttatattttaagagatcgtgattacactagaaaatttgatgcacaaagtgatgaaggtgttttcttaggatattccatcaatagtagggcatatcatgtgtataacatgagaacccaaactgttatggaatctgctaatgttgttgttgatgatctaaaggatttgtttgagttttcagtagaagaacaaattgaagacttgctggaaaagtctgctgctgaggaaaaggaagttgacagagctacagaagcagctgtcgaggctcactgaaagattatgttgctacggaaacttcaacaacaaaagaatctgagcatccttcaaattcaatcactgatccaattcagagggaaccctcctacagggttaaaaagaatcatccttcagatctcatccttggaaacttggataagagcatagttacaagaagaaaatatgctaatataattcaattcttatgttttgtttcttcttta

SEQ ID NO: 148594 - DNA, 506 bp, Cannabis sativa
agacttttatttgggtttatattagcattttaaatgttaatgctgcaatagagtacagtggaatatctttgaatctttggacacagtcaccaaatgagatggtttgtttgtacctaacagaagtagaagaattatgagaacatgacagagtaaattactacacaaatttgagatatgaaaatttagaaaccaactcttacttggccagagacataagctttacagttttgtcatggccacataatgtagccttgagagcatgctgaccgcttttgacaccagcttcaagtgaccaaaggcgaacagtaccatcgtcccctccactagccaaaatgttcccaactccatcacctaacaactcatctgataatgctgaaactgtcccactgtgacctctgaaagttttgtagcatgatccctacaaaacaatcaacacataagattcaaaattaatcaagaagagtacaacattaggcacattaattgttacagttcgaattttccat

SEQ ID NO: 148595 - DNA, 619 bp, Cannabis sativa
gacatttgcaaaaacacggtttttcagaaatataccatattcaaatgtggtaggcaacataatgtatctcatggtttgctccaggccagatctcagtcatgctgtaagtactgtcagtaggttcatgggaaacctaagcactgaacattggagtgctgtgaagtggttactaagatacttaaggggaacaatggatataggcctgatctatggtccaaacatgcaggagatttagactgaagaaagtcacaaaccggttttgtgtttagaatgtataacagtacaatcagttggaaggctaacctacaaactgtagtagctctttcaacaaccgaagcaaaatacattacttgtactgaagctgtcaagatagcactctggctcaagggaatcaccagggaacttggtgttgaacaaagcactgttgtcatccactgtgacagtcagagtgcactccatctaagcaagaatcaggtcttccatgaaaggaccaaacacatagatgtgagatcactactacagaaattacaattctcgtcagtttttaaatgtcatttaaagaatttacgtcggtttataaaaccgacgtgtatgccgtagtcgcaaatagttttttatt

SEQ ID NO: 148596 - DNA, 1917 bp, Cannabis sativa
  modified_base (748)..(750): a, c, t, g, unknown or other
  modified_base (807)..(817): a, c, t, g, unknown or other
tgtgcgaggtaaatattctcccgagtttcattgagctcggtataaatagtatacactagcacgtatttgtcatgcttcttttatttctttctatccttcgacaattccttaattttgtcctttcttctcggaccagaagcccccgagttatcaattctcatggaagcagttcctgttgagacattgctgagtttacctcccgagcttgttttcaacaagttcatttctttttaggctttttccttctggacaaatacctgagccctctcgttgaactcattgatgcttcttaccggacgtccttgtaaatcaccctacaactcgcccctgcggttaatggaacaatggagatccctgcctgaagggttgtaagttacgtgttgtcatcaaaatttctaaccctagtggcagccgtgctaaaacgacttaagtacgccttaagtgtttcaccaggctgctgcttaatattggttagtgaggccgcttcgggtcgcctatccctaacagcctgaaattgcttcttgaaattcctggacagctgctcccaagaagttattgaatgacgagtaaacttgttaaaccagctactcgccgctccaacaagcgaggtgggtaacaaaatacaacgtaaattgttcgtcacattactcgctcgcattattgtgttaaagttattcaaatgcgagaccggatctgtggtttcgttgtaagacgagacatgcaggtttttgaatcccaaaggaaaagnnntattcataatatttgggtgatacaactcaagctccttgtcagagtcgtatccagatnnnnnnnnnnnttcccccacttgatatctcttgaacttgtccttcagcttgtttatccacaattggattagatcctcttgctttggaccacgctattgtcaaaggtcaggtttcttccaattcaagtgctctcgcagatccggctgggagtaattgctggctgatcttgtcttactcatagatcgcgtcttactcattaactttatctttgagtggctcgcggatctactggttcccatactttctcgatcattagctcattgagtactttctcctcttcgagttgatcgactatgggttctggatcgccacaaagtcacacttgcttctttacgctctgttctttcctcccgagagcagtttgtcgtgtttcccccatcaaggtatgtacgagtcctcgctttatgggtttgggaagaatattggtgatttctagcaagtgatctctattctcacggttgagtcccaagatcctcctcattttcatgagggatttctcgttcatcaacttttggttgtctcccctctggctgttcatcctgattctcagggggtgtctcattttccttggcatgttcttcctgggcctattcctgtctcctggtttgtgagccatgaggtatcctcgtggtcttcttactccaggtttaagttgattttgagcgttcgtcccctacgctgccctggctgaggttgcctcacgttctaacttagcgtctcgacattgcgcctcttccagatggcgtctcaggcgacaactttctatttcataagttctttctcccacagattgggcacctccatgattgagctcttcatccttcgccctagggttctaaccattcccacgctaagttctccttgagtgtgttgtcctcgtactaggaccaacgtcaggttgagttcttcgagaacgtgtggtccgagcactggggccaccctcaggttgagccctcctagaacaggtggtccttcttgactgcggattaatagatcttctggagcccatgggatcttttcgagaatgatggttggcttcctcatgtggcgtgttaacattttttggattttcagccatgtaggaggttgtttttcttcgaaagaagggagg

SEQ ID NO: 148597 - DNA, 576 bp, Cannabis sativa
aaaagttcatataaataataaataatatgttaattaagatttttgcttttgaactttgacatgtaataaattatgcttataaattttttaggtcgttaaaaatgtcccttgaacttttgtgattgttagatttaagaatttttatctaatttcaattaattttactattttaaaaaaaatttatgtactaaatcatgttcctcagattttgatatctagcaaatcatgctcctcgaactttgacatgtacgtactaaatcaggcctctgaacttttatccatgttagacttttttattaaaattagaaaaaaaaaatccttaaatctaatcttctcaatagttcagaagcattttaaagaccttaaaattttggaaacataatttagtacatgtcaaagttcaggtgcgaaaatcttaattattatgtgagaaatactaaaaatcaccagtagtgcctaccactctcttatgtgtccgtatcgctattggtccagctaagtatcgggtctcatataatttaatataataacttttaaaaagtattgctagccaatcacaacgcgacatgtcgataa

SEQ ID NO: 148598 - DNA, 909 bp, Cannabis sativa
  modified_base (33)..(34): a, c, t, g, unknown or other
taacagtatcataaattatttaaatagctatanntaatttcataattaatcacaattaactgataatttccaaattaactaagcgggctttacacttctaggcttgcacgagagagagaaagaaagggagtacgttgtttttagtgtggttacttggttcttaagttatgtagtaagaatttttttttaaaatatacaatcaacccacaaagtaaataagacaaaatgtcaaaatataaaatgactaatctaccacttaaagaaacctaagcttaaattataacctaagggcattatggtaattttactaatccatccagccgacattctaaaattctaaactagtccggaataccctcaaaataattcatccattaatatcgtgacatttctgaccacattgccaagtttccacagtcgccgagcccgaaataatatttttattttaaatatggtatcctcgatacccacatatctcaatataatctccgtgatcaataaattatgctttatataatcatataataaaccctccctaattaccttaagtaagatcataatcttactttattaccaaaatcattacatatttaataaaatatgtttaattaaatatcattttattttctgggatattacacgcccgatggagtactgtgttcaactgacccgcccaaacaatttttttttttttaaattttgcgagttggtcgagtcgggtctaggcaggttgatcggggctaggtcaaactcactcaaaatgttcaatcctaatccacatagaaactaatagaacaatctaaatcttaactcaaatttacatagtaactactggagcaaccaccacagtaactaacacagccgaccttaatggtgtgcaggctgttccattgcacagggcccaaagat

SEQ ID NO: 148599 - DNA, 543 bp, Cannabis sativa
ttatcatttcgaataattattagtttagtggtgtatgtgttttttttaatgacaataaaatttattatttttattttattattatttattttaagggtatgtagaatgctagataaatgattaaattattagagataatttaatattttattatttatgaatactattataggtatgttaatgataataatacgggtataaattatttagtttattagtaatattattattattattaatattattaattagtttttattattatttcattatttagttttcttttatttttttttatttgtaacagtttttgtttttacgtatatatatgtatatatatttattttagggttaagattagggtttgtgggatatatataggatatttatgagatacttttagggttgtgaccgcagaaagaaattgaaaaggagaggtggtgtgtagcaagcgataccgagagagagaaaagtgagatttcaagtttttgtattttgagagtttatgggctgctctacatagtttctttgattctaaatcct

SEQ ID NO: 148600 - DNA, 507 bp, Cannabis sativa
attctatccattggtagaggaggatctccccctcctccagtattaaccaatttcttcgaccccgaaccttcaatcttattcctgttctcaatagtggcctccatatcagtctcctctaaaatctgatatgcattacctgttactgttattgcaggttgtttagactcctttggtttccagcctttttgaaccatctgaaagccatccaattcagctgcctgccccttatttgtccctggtacctccttaggctttttcttaacaacccacgcttgcttgcctcctgcttttttcctacattcacttgtttgatgccccattctcttgcagtgctcacaaaggactggcttccactcatatttaactccaaccgaagtgttgaaaccatgtaaatcttcaaactcaatgaggtcaggtaattcatgatgtatcgagacttcaagaagaactcttggatacattacttacctctctctttggtatttgagtctaccataaatggttttc

SEQ ID NO: 148601 - DNA, 1262 bp, Cannabis sativa
ttttgcattgaatctgtcttcatcaaaaacgaggaaatatttacttataaaggaaaaacaacaactccttggcacaaataataaggctcagcacctaggttgacacatggagctggccctgtgcccatgttgatattttgtcaacttgagctatttaaaattgaatttttccagaaattctttcaagcatcttctctgtcttcagaaaatattgagattcaacttttttcggagaccaattgaaatttctgaaggggcaaaactagaccctagcgcccagttgacattttgtcaacctaggctgtttccgatcaagttcagtgaaaagtattttgggcatttttttctgtcatcgaaaataacgaagattcaagtaaactcagggagaaaaccacaaactcgagtccctagaaatagggtccaacacccaggttgacaatcaaactaggatgctaccttcaattgctcaaatgttaaatttgatgcgaccattgaatttggcatggtaaaaaacgagggaagagactccgtcctcaagttcagaagccttggaagtatcaaaaatagaatcccaaaagctcggttgaaagggctcaacgcccacgtcaacatatggcctggttcgctggtatctacttatccaaatgtgatgttgtttcgaccgtccatctagtttttcacaaatacaatgatctatgaagtcagataaattcaattcacaactttgcatttctccttttcatcactcctggcaatgaagagtttcgagtcccttttctgcaaaatagcaacatctacgagaactggtgaccagcttcgctagaacatgtaaatggactacgtggtgttaaaatatcacttaggcatcttaaaggactttcattgggcgtttctacacttacccaacgtccaggttgaagttagatgtcaacattggcgctgggatgtcaacttggcactggatgtcaacctaggcgctaggacttgaactgccttcagtaaaacggtcataactcgctcaatttttatccaattgatgcgattcaacttgcgttttaaagatatttaaatactataccgtcacgtctcacaccccagacgtaattcagaagctatcatcgtcaaaatttacccccaagggagctacaaaaataagctctgagttacccgtagcaggacctgttaggcactagaaattgaccatcaccgccagaagctaattttcattgttggatcatcatcaacagtggaaaacaacttat

SEQ ID NO: 148602 - DNA, 1469 bp, Cannabis sativa
  modified_base (1351)..(1355): a, c, t, g, unknown or other
aaaatatgattcttttactttcatcattttctcatatttttttaatactctttctctctctcttacaaaaaaattaagagcactgctcttatatttttctatatttttatatgagtaataaaaagtagtatatctttttggatattttctaatttatttagagttaatttatgaatgatttgcatattttaacatgattgatgtcttgttatttttctattgatttagagttgtctttttgttattttataattatttttacgttgttatttaggtgttctatagttgatttatagttatttttctattttttttatgtattttcttttgaatagttgttgtttagtttatgtgcattttttattgtgtatatttttagtttattctagacaacgtttatgtgcattttgtttttctattcttatgttatttttaagtggtttttataatttgtttttttgttgaacggttatttttttattcatatatattttttatggtatatataattaatttattcctaatatttttttaagccactgctccaagtgggagctcgtatacaaatttggatgatttgattaatgaagtgctcttccatcaaactgattaaagattttatatttataatattatatatttaattaggtgaccacattttgtggtgttggtaataaaatgtccctttttttcttttttaattgtttttttagataaaatctttagttgtttttaatttatgtaatctctgtatgtttatttgttcgtgttattttatttaaatggacttattaattgcaacacgtgaaaatttcattataatattatgtatataaatatatatatatatatttatatatactttgaatgagtattacgtctgaatggagaaaattagaataattcatatttttatgttaaattttttttatttaattacaaaaatttctcatttttaaattatatggaccgcggttgttccatcagttgaacaaagaataaaaagaattagcaaaacaaaataagaaaaagttaagtttgacttaaatatttttatatgaacatatttttgactgtataaataaaaaaaataaatcacatttcattatcaccaataaattttcaatttattttgtatgactttattttaatatattcaatgtaatattaacacatagtggattattttagattgttattccacattcataattttttgcaaggtttacaaataaacgtaagaaagtcagtaactgttagtaaatcttatcaacagacaagatgagttctcacatttagaaacttcaagaacaagcaatatagtaatgactttgttttaaaattatcaaannnnnttatgatccaagtttctttagaaacttaatttagacacatatttaaaagattttactacattaatttacaaaacgatatcactcataaaaatatgcatgttcaatctgacaata

SEQ ID NO: 148603 - DNA, 608 bp, Cannabis sativa
ggattggattggatcgtgggaatttaattggatcggctattttatgaacactcctattctcaactggtgataactagatcgaagatcaatcttagagaagatggtcttttcctgcagctgatcaaacagatcatctatccttggcaaaggatatttattttttattgtcaacttgtttagctcttgataatctgtattatatacaacacattcacttagatgacatgctacatcagtaatctgaatcaagattacttgcatcgaatgatgggcataagtgaactgcacttgcaaccattgattaatgattcttaaactttgatatgttgctgactattttattcatggctaagtgatcttaatcctccataaaattacaagtcacataaggaattttttaatatttttatataaattattcaatattaaatattaataaattaacattcattcatatatcaaaatattcaactcttattaataattatagggcaattttcattgatatacaagtaaatgtacaatattacaaaaatgtgcaaaaaaaaacataattacataattctgtacaattttatgaatatttacaaataaacatatatgtttac

SEQ ID NO: 148604 - DNA, 811 bp, Cannabis sativa
aactacttaaacaatacaaaaggaaaacaagatcagtggaaatgcttaaagtattttaaatttgatcaaagtataattgtttaaattatgagtaaaaatgcatgtaagaaaatataataagttcaaatgtgaaaatacgaggtaataaataaaagataaaataaaaagcaaagttaaatatccaacaataaaaatttgtctttacaaaagtgccacaaggggaaacccattgtctcggccatatggccattttcctaaatatgaaaaaaaataaaacttaaaaaccaagcctacaatgtaagagacttagatgaatcttcttgttccacttaaacctcttcttcctcaaccagttcttctctcctagtcttcttgcaaaaggcaagcatggcatcagcattatcacccaaaaagctgaagtccaaattagggttggccgaccagatttgacagattgtctttctaccgatgctgttgaccctgtctttagtttcagcctccatttccttgagctttttgtcatgatcagcctggagggacttgagagaatcctgaagttccttgatcttcttttggtcggccagacactgctttttcgcttcttccctctgtgcgagaaacctcggccttagagtcattccactttttggctaaagtttccctatgatccctggtttggtgacgtttagtttctagcagtttagcttgctgagacgaccggtgatgagtaacataggagaagagaaaggcctacaaggagaaggaaaatcaaagttagtactaaaactgataaaatgaggaaaagtgagaa

SEQ ID NO: 148605 - DNA, 656 bp, Cannabis sativa
ccaatctctattcaaatctaagaacgaaaactgctcaaaacttttagttttataaacccaaacagctgtccaaaatctgactttttcccataaactcccatttgtgttcattgagttttttaattcactggttaaagtttctcagagaagatgattcatacaacttctgttttggaagcttaataacataagtggctggagacatattatacaataatagaattcaaactttccgaaaagatcgaatattaattcctttatagtgttaattatgggaatgctaacaattagatctaaatctacaataaattatagattaacggttaatattgaattaatagtacataaagaatcaagagataattagaagggtaaaacggtaattttgaccaactcttattacaatttctcttcttgaaataaactatcatcttgtgttcactaactggttcttcctccaccaagactttttcagattctttcatcactgaatttgaatacactcatcttcttgaatcgaaatcttcccacaatttaataattgcacttctaaattcttgttgcaatgtgatttacaagattgcaactaaattattgagttctagaatcaataatatcctcccttcaataatatcacagtctcaaggtggttttat

SEQ ID NO: 148606 - DNA, 752 bp, Cannabis sativa
gagacatcagatttagagtttagcatgtaaacccaagtataacgagaaaaatcatcaacaatagttaagaaatatcgataaccttcaatgctaataatatgaaaagttcctcatatattaagatgtattaaatcgaaagcagcattggcaaaattattgttagaaataaaaggaggccgtttttgtttagcaaaataacatttagagcacatataatccaaaggtttttcacagatttgcaaacttttatttagtatactagtaatgttcatagaagggtgaccaaggcgaagatgccaggggtccttcaaagtacaagaagtgtttgcaaagatagaaatattggaagtgagaaaatgtcgttcttgttcaaagaaaaatagtcggccaactttcttagctgtcccaatcgtagaagtcagggagggatcctgaatcaaacattgagtaaaattaaatgtgagtttgttacgacaatgttcaagatatgcttaacagaaaataaattgaacttaaattctggaatatataatacatcagccagtattagtttatcagatatttttacggtgccgattttgttgatgtgcatctgatggccattaggtaaagtaacaatatgagcaacaggattagtgtttagagatgtaaaataatgaagagaatgacaaatatgatgagtagctccactatctacaatccataaaaaaagaggaaaaagtttatctttaccaaagacgtttgagaccaca

SEQ ID NO: 148607 - DNA, 506 bp, Cannabis sativa
  modified_base (26)..(31): a, c, t, g, unknown or other
  modified_base (59)..(64): a, c, t, g, unknown or other
  modified_base (92)..(97): a, c, t, g, unknown or other
  modified_base (126)..(131): a, c, t, g, unknown or other
ttataattgattaatcataatcaatnnnnnntaattgattaatcataatcaattatctnnnnnnttgattaatcataatcaattatctgagnnnnnnattaatcataatcaattatctgagtcttnnnnnnagtatggtctcaactagaatgaggaccatggacctatatattactgagcttccacaggggcggagccacatacacccgtataggggctgtggccccccctgaattttaaaaaaaattgctttactaaacatatatatataatcatatataaaaagatattaatacataatttttcatgtataaaagaactaaaaaaattaatatttacttatttaaatataattttattattaagaaaatatatatagttttattttatatattaatggtggtcttacaattgtatatatttaataaatagtaaattattatattactattttattagacttaattaatttattttgatttaaaaatatatttaataaattattt

SEQ ID NO: 148608 - DNA, 744 bp, Cannabis sativa
tatcatattattgtactcatatcattaattttgtttgcaatttttatagggtcctattagaaattacaaatacaaatcaggagctcaaaaaagaaaggagaaattaagaaaagaagtcttggaaaaaagtcaggttggttctcttaataagtattttaatacaaataatgtagataattttgtagtgaatggcattgagaatcaatttgatattgaaagtattgagaataagaaaacttcaagtaatgtgattgaaaatgaagaactgaatcaaactgttaatgaggatgagaaaagttcaagcgatgtgaatgaaaatgaagaactgaatcaaacagtgaatgagaatgagaatgagaaaacttcaagtggtgtattcaactttccttttgatactgatgatctaggaaattgggataggattggtcatattaatatgacaaattttatagttgaaagaggtctaaaaagagtcaggacaaatttactagggatgctttcagtaggaatttttcttcgtggcattatattagagaattaccaaatggagagaaataagatatgaaatggttgatttattcagtttctttagataaagtattttgtttttgttgtgaattgtttgcaacaaagaagtatcttgtgggttttttagctaagggaggttttaatgactggcataatatttctgatcgattaaaaagtcatgaacgaagtacacaacatattgagtcaattgctagt

SEQ ID NO: 148609 - DNA, 710 bp, Cannabis sativa
  modified_base (139)..(141): a, c, t, g, unknown or other
tttttattttatttaagtcggctctaggtctgggatcaaatttgggttcaggtcagaggtcgggttcagcaccagggtcgtggagggatttggatccaggtctggtcggaatccaaaaatattgattaagaaaaaaaannngtttaaaaaaatattgaaagtgatgatttttttttattttatttttctcataaaaatgaaaaataaaaacaattttatagaatatgtttttgaaaaatatttttacttttctaatattttaaaaaaagtattaccaaacgctaccttagtaactcgtttccaataaaaacaaagaaaacccttataatacttttaactaaaagaataataagttgttagttgtgaagtatcaaattaaagagtgggaaaaatgttagattatgatcccaaatgacaattgtgaaattaaatctattaattataattattaaccaaaaatcttttaataaaaatcaaataatgacaatgctagattaaaaaaaattgcaaaataattaaccacatttagaacagtccacaaagtatggagtaaattataattcgggaatctcctatatgtgacactataaaaaattttgattttagtcccaacaaaacttgtgactaaaagtaaaaaaattatgattaattataaatcacaatactatgtgtttttaaaaatcacaaaaattacaatttattgtgactaa

SEQ ID NO: 148610 - DNA, 535 bp, Cannabis sativa
  modified_base (277)..(288): a, c, t, g, unknown or other
tacctaagaaaccacattaaaaactcaaatggtaaatttgaaaaaaaaaaaaaaagaaattaaaaaaacagtatatggaattatttcccttaaatagaactccatcttatacaaatattcacacataaattttccatttaaaaaaaaaaattaaagcactgagatttaatttcaaaataatatattatatgtgtatatatagagaataattttttaataactttttttttaaaaaaaagaaaaaaataataatttatagagtaatttgcggtataannnnnnnnnnnnaactctcagttgcaaataaatacctacgtttaatttttggctgtaataatacctaaattatatttttggaacttctttaggtacctcgctattaattattaagtaaattgccacgtggcaatctctgaatagtccacgtcattaaatttttttccttgaaattaaatatagcaataagaaaatgacacgtagataattatttgacatttaacgattaggtacttatgaagttccaaaaatataactt

SEQ ID NO: 148611 - DNA, 714 bp, Cannabis sativa
cttgatgagttccatacgagttccatactactcgtattccctacacgcggggacaacaaagatgtatcatgacaccaagccaatatattggtggccgagaatgaagagtgatattgttgaatatttttcaaagtgtttaacctgtcagcaggttaaggctaaacatcaaaggccggcaggttttctttagcccttgagaatacctgaatggaaatggaaagacataactatagacttcgcagtggggttgcctaggactactgggttatatgattccatatgggtgatagcgaatagattcaccaagtcagcgcactttttacctgtctgagtgacttatactgtggagcagtatgccaaattgtacattaaggaaatagtgagactccatggtgctccaaagttaattgttttagaccgtgatcccaaatttacttccatgttctaggagagtttacagaaagctatgggaaccaagttgagattcagtacaacttttcaccctcagacagatggtcagtttgagagaaccattcaaatatttgaagacatgttgcgagcatgtgtaatagattttgaaggatctaggagcaggttcctacccttgattgagttttcatataatgacacttatcagagtaccattaatatggcaccttacgagatgatgtatggtaggaaatgtcgaacgccggagagagagagagagagaga

SEQ ID NO: 148612 - DNA, 846 bp, Cannabis sativa
atgttcccaagatgtaagtatagggaagattcatttggtcaactttaacgaataagtcaaagaacataaataatatagttaagctagaacctaaccatctcaggattaagatctattgatctattatcctaaattttgtctgcctgacgtggcatgtccacgtaggttaaagatagagtacatgtaaagtatagccctgtcaatagcagaattgagcctccatgcaagatatagcaaaaccttcaagcagcaactgaaaggagtgaagagagccctcaaggagctataccaacatccttagccagccaagaggagcctataggccgaccaggatctgtgcacaagctcgctggccaagaagtgacttccagacccaaggagactctgtttggccaagaaaacctgacatattcatggaaacgatgtacaaagctctcctcaccttgcaaaaggttggcctcctcttggttgagcaatagtggccggccaggattgacatggcaggatcatggcccgccagacttccttgtaggcctatggacggccaagattgacctgacaagactccatgtacaactctacacgtggaccaaggcatgaactgcgaatcgggccccaaaagcccaacagacaggctgagaagtatctagagtctaagggcattttggtcttatgtaaatatttagctaactatcctattttcaagggatttaatttgcaaacctagggtttaggcctcctatatagaggctttaacctctagctgaaaagggaagttatgtaagttgcctctaaatcacttagcctccaaatagctttttgtctctttttctctctctctctctc

SEQ ID NO: 148613 - DNA, 703 bp, Cannabis sativa
ttaggaggagtttagccactgaaagaataccacaactggggaaatttcccactcttaagggttttcttcaaccaattagaatatctcttctggatgcagcgtcctgcttccagagagctttctgtaattgatgatgcttttcttttctttttgatttttgtaattcgaggaggaacacttgcactaacactttagatttataaacttggtcgttatattcttgtgtgacctcaagcatttatatcataacactgcttagctctagcgtacaaatagtctgtatgtgaggttgttcaactcaatgaacttaccaacactcgcactagtatttcaaaattaaaaatctcggttactttggataacgtcaatatttcattaaaccatagaattactaactgatcaggtgtgcgaaattcctgaatgacacttcaacccatggctcccgtataccagggtaacacctagctcccgtataccaaagtgtatgtgacatacatggctctcgtgtatgattttttatgaatgctcatgtaacatgcatacctcttgtatattatgtcttattttccccctaagtgatcaaagaaatgccttcattggtcacttgccatactaaatcccgttatttaggctttcttgatcatgtatctcagggagttattcttgggttttatgccctaaatataactcatttcaatataat

SEQ ID NO: 148614 - DNA, 1018 bp, Cannabis sativa
aggatcacaaatcgctctttattccacatccaaccgccaatacgatggtgcaaactcgtagaggtctgtctgatccagcaaattcacagacggtggatccgacatcacagaacccagggattttaagggttctgcctgctgttaatcccagacagacgggaagcgtggggaatggtgaaacagttgctattgatggaattgcgcctgttgtgcaagagattgggaataacagttccgcactaaaccagggcatccataatacgactgttctgcctggaaccaaaacccaaacaaccatcagagacgccaccaaattacaaaatctccatgacacgctcggactcatggagggtcataacaacactctacatcatgatcaggacgaactgcgtgtaatctcgcgttcgacgaacaaaggaatatgttcgctgaattaagggctcaccatgcagagattgaagatcgtagtcgacaagccatcgtgctgatacgaagagcctaccaaactgtaggtcatcaattgaggaacgtcattcccctgggagaaacagaagaggacccaacgatgaatacttcccaaactactaatggtcagccgccaaatgcccgatcacgagttctgctcatcggcccagcggttggcgagcagaccttgtccgataattcatcaggaggagtcacacctgatggctccaactagagtaatggtgccattccacccgtcaaccaagcgaatcaatcgctaaggcaaccaggctcttctgtgttcgaaaggttgggagcaacacatgacctaaggaacgatctaaacaaaagaaagggaacggatgaacagaatactacaaggatcgtgcagcctagagcctgtactcaaatccccgctcagaaagacactaacgtagtccaaatcggccagaataccgaagaggtcagcccagccctacaggcccagcttgacgaattaaaaaatatgtttcacggcatggctggacaacgtaataatgatcttgagttagac

SEQ ID NO: 148615 - DNA, 845 bp, Cannabis sativa
  modified_base (148)..(149): a, c, t, g, unknown or other
  modified_base (252)..(257): a, c, t, g, unknown or other
ggctgaacctctataaaattcttctatctttatttgctttactatatttcatttgtattaaactacttgtcacatacaaaattagactcgttattgttggctaaaagcgaggtcaacaatcacaaacatcattttaaatccatatttnntgaaagtaaatcattaccacggctctaagaccagtcgttggggattatttaccagaatctggatttactaccatgtatgatatttaacatcctaaatatgaannnnnnaaacaatgtaatttaaacacatataaagtttaagaaagcttacattggctacagcggaattaaattactccttccgctgtgatctctaacccttgtatccttactgtagcagagtatcaccaagatttgagcctgagtctccttcacttgaatgggattcttcacagtcttacacactatgattgaggactcacttgttatgtttgggcatgcactcaatcactaaggcttgaatttggtttgtgaagatggctatatgatttcgaaattagaagaagaaggaagaagctgaagtctcagagattctagtatacaccactatcatctaacatatatgtaacgccctaaaataattaggcacgctacccaaaaatgcttatgaaaccctaatctcctaatcgggattactaaccaaaatagcgcaaaatttaaacttttatattaaacaaaatgaaaataaacttgtaatatatttcaactttcaaaatagttgggatcccaaaaatctttagaaacttaattgcaagtctttctttctagccgacctaagcggcaaaatagaattcaaaagttcaacactgatagacc

SEQ ID NO: 148616 - DNA, 727 bp, Cannabis sativa
cccgaaataaccaggatgtcctctccttccacaggaataggttgtaacccttggttatttgggttattgggcagattgggctaattatatccctggccctgtcttttcacatactgcttaaaatggtctcgagcgatgatactttctatctcgtctttcaattgatgacattcgtcggtcgtatgcccaatatccttgtggaatttacaatatttgttaggatctcttttgctcctcgaattcctcaaaggttcgggtttgttgaaggctaccttctgcttatgtgcgaggtaaatattctctcgaatttcattaagctcgatataaatagtatacactggcacgtatttgtcatgcttcttttatttctttatatccttcgacgattccttaattctctcctttctcttcagaccagaagcccctgagttatcaattctcatggaagcagtacttgttgaaacattgttgggtttacctcccgagcttgttttcaacagttcatttccttttaggcttcttccttctagacaaacacttgagccctttcattgaactcagtgatgattcttactggacgtccttataagtcatcccacaactcgccccatgcggttaatggattagcagagatccccgcttgaagggctgtaagttgcgtgctgtcatccaaatttctaaccctagcggcagccgtgctaaaacgacttaagtacgccttaagtat

SEQ ID NO: 148617 - DNA, 557 bp, Cannabis sativa
ttacatttttaagtaattttttttattgctcaatataatattaaagagaaagattatttatttaatatatattaaaatatctttttttttttaattccagcaaaaaaagagagtttttttattttaatattttaaagtagtttttttttcttttgtatttttacagaaactcacgtatcaacccacatagcaactaacagaataatctaaattacaatccaaattctatagcaacccgcatagaaactacaaaaataacaaaacagtaaaaataaaaaaaatatatattaaaaaataatatataaaataatttttcttaaaaaatcttgtaaataaaaaaatccattaaaaaaaattaatatgtaaatatgtaaatatcacattaaaactattttagttcacatcaatattttaattatctaattttaatctatataaagtaagattttcattaaccaagtgataaattgggcataataattactatattaaatttagaaagctaggctagatattttataataattatttaattttttttattagttgtttatttt

SEQ ID NO: 148618 - DNA, 632 bp, Cannabis sativa
taaattgaagcatctctaacctaatcatgtatataaaaaaattactataattacaatataaaatcaaactgagaaaataaacttagatattagttttacaatctaaaagaaacactaaataactaaacattgcaattagtagaacgtggaacaatataacaataagtatgtatataaaaaaattactacaattacaacataaaatcaaactgataaaataaagctagatatcagttttacaatctaaaagaaacactaaataactaaacattgtaatgagtagaacgtggaacataacaataagtgataacaaggtccaacaagcgcaatagtaatataaataacaagtacattcaaacccgaacccaagcattgtgaattcacgattggtctcattttagaaaaaccaaagacgtatactttcccaggccaatttggaaagtaaattcaatatttttcgtccgggaataccttggtgacaataccttcccaccaaccatcgttgtgaaatgctttaacctcatcctttaccttgtacgaatatacataacttaatacaagtggggacgtccttacaattttgctctccaccatttcacaaagaaaagatccacctgttgggttttgtgccc

SEQ ID NO: 148619 - DNA, 512 bp, Cannabis sativa
ataaattaaaattaaggactagaaatgaaaaaaaaaaagtttaacaccaaattggtgtatacttaaaaactaacatcattaataatgtagaatttggtgtacaccaatttagtgtataatttagtatgttattagagtaaaataatgtgaagattccataccaatttcataaaaaaatgcaccattaaagatgctctaagtacaataatttatataagggttttaaaatttaattccgcttcaacccttatatcttatttttcattttccctcttaaaatcattaatcaagattgttttttcttgtagtaaatgactctagagtctactagtatctttatattaagcattttctccttttcagctgcttattatctattcaattactatttctttaatttcaagaaacgtgaggtttatttgttattcaaatttgtattttttagtactattaattctatttcttttgatacttaccaaaaaaaaaacacaatctatttctttttttttttt

SEQ ID NO: 148620 - DNA, 683 bp, Cannabis sativa
gctcatttggaggatgagctgattcaacttaagcgggaggctaagttgaagggtggtgtttgggcaaagcagtacgctcaggagtctatgaatcttgaagatgaagctgaggttcaggctgaggctgagcaggtggctcctttgaggaggaagaaggaactcccggccacgcccaggcccgtggaacacagcattcgcaaaagggagcccatttcacctgttcagccaccccatccttatgctggaaaagggaaggccgttatggctgagatatcaggtgatgatggacttctgactttctgggcagacagtcactctgcggtttgcttcttttttcaacttcttggcttccatactttgtattttttttgttggtttttgctaaccatgctatttttgctttgtccaaacatgtctcgacagatgatggacgccttaaggaagaggatgagcggaggctctagtccttcccgtccgaccaagaagtccaaggtcggagaggggtcttcagagaagaggccttctgcagaggtcattgacctttctgaggatttggctgctgcaaatccatctactccccaatctaccacgtttaaggagtctaggccaccaacatcagggtctgaactagtcaggaggattcctgaacgggagcaagcaccaactccacccatgcccgtgct

SEQ ID NO: 148621 - DNA, 584 bp, Cannabis sativa
ccaaaacactcggcatacaatgctgtgattggtcgtcctatcctaaaagagatgaagatcgtgacgtccatttattatctcaccatgaagttccgtactcccgctagagtaggatctatgcgaggagtccaatcggatttacgagaatgttacaatgcagcgttaaagctcgtagagaagaagtcagtcaacgttatttacttgctagaagcaccaccccctcgacaggaggtattcagaatagaagaaataccgcataaagacgaaccagatttggatcctaggatcctcgattacactactgccgcccaagccacggaagacactattgaggtacccattgatcccatagataatagcaaagttttgaaaattggctctaaactaactttttcaacaacgagaaaagcttgtcacttttctcaaacaaaacctggatgttttcgcctggaaacattcagacatggttgaaatatttctgcaggtcacgtgtcaccgattgaacatcgaccccgaagtacgaggtgtccgacagaagcgccgcaaaatggaccccgtgtggtaccaagcgctgaaagaagaag

SEQ ID NO: 148622 - DNA, 712 bp, Cannabis sativa
acctagtcaataaaaataattcttccattaacgtcgggacactactaaccacatcgctaaatttcacaattgtcgggccccaaaaatatttatttcaaagatggtatcctcggtactcacatatcccaatataatcttcgtaattaataaattacgctatttatttcattaaataaattctcaataattatccaagtaagatcataatcttacttagttacacaaattattaaatatttaataaaatatgtctatttaaatattatttatttttcgggatattacaaggaagcatctactttctgataacccaccatgagcttactttggagttaagcttacttaacttagggtaatctcaagatgggaaatccttcggggagtcatcctgaaaagcatatgagtgaggacaaagtacgctagaaagattcatattaggatgcagaatcaatagtcgttccagatattatcaagaggaatggatgtgttaataagtagatattgacaaggtattgagaggagtatatagtagtggatggaaataaaaagtactcaaattgaatatctatcagaaatgaatacttaacttattattaagccaagtcggcaggtcaacttaggaggtcccatacaaggaatggaaagacataattatgaattaggtattgtgggatcttatgatttcgactgaatagtaattgttggagatacc

SEQ ID NO: 148623 - DNA, 502 bp, Cannabis sativa
tccattgaatacacgcctagcactagcatgttagcagacccactaacgaaaggcttacccatatgtgtatttttggagcatgttgctcgaatggaattgttagcagcctagctgtcgagctcagtgggagtttttctattatgtattgaacatgctagtatcttatatggaatgcttatgatgttttgaacatgcataatgatattgtagtcacttctagttattgttgacatatgtatgcatgtatgtgttgtttattgaaatgacaggtacaaaaggagatgaatgcgcatagtctcaattttgttgtacctcatgcatgtttagtttgattgttaatggataaatgtcttcaaggtcaattcatacataatatatgtatcctgtcaatatgatatcatatacgtctcaattggttaccttatgtgtgatagataatgttatggtagttgattatattgtccaagtgggagaatgttagaattattattgtggactaata

SEQ ID NO: 148624 - DNA, 810 bp, Cannabis sativa
  modified_base (618)..(622): a, c, t, g, unknown or other
aacattgggtacttatgccactaaaaaaaatcattgggtttatgccgcttacaaactcaaaactttggatacttatgccgctattcacccttataattatagagtattgttaccatgtatttatgctgcgagcaattccaatgtaagtattttaaaaaatagctgataatttatacatcatcttaacgtattatatatatatatttttttcattcacattatttttgaccactttactcttaaaattactctgttgttaagcaattttagaagtcaagagaatggacccacactctatatattatttaatatattattaaattacttttaatattttaaatattatattaatacaactttttgatagaaaaattataaaaaataaaaaaataattcaactaccattgtttgacagtagcaattgcagtagcccacacaattttttgtagtggtcaagcaatcaagattgtttttcttagactgacaagggcttgatgaacaactagcattggagctgctctaagtatcacaatgaagggttatcttggttagtgattctttataatatttaaagtaaattacggcataaatatttaatgttttaaattttatacactnnnnnacctaatgtttatttttggaggtaaaaatacctaatgtaacaattctcttacaatgttactattccattaactcttaaatatggatatatggaaggcccaaaagcattatatttattttattttattttaaaatttaatatttttaatataaaaaactaaatgctaattgtttcaaaaaaaaaataat

SEQ ID NO: 148625 - DNA, 598 bp, Cannabis sativa
  modified_base (552)..(553): a, c, t, g, unknown or other
aaaattcggcgagcacatcaggtgtggggcgtggacgcggggcgccggtgttggcgcaggcactagcgcgggcgtggggcactgacgtggggtcttagcatgggcgcggacgtgggtgcgggagcgggcgtgaggtcctagcgcaagcgtggagtcctgacatgggtgcacgacttccgagggatactttaatttgacaaaaagggatttgaggacaaaagaggcgtggaccgtcctttgtcctctcttgcatgtatggagcatcttgagctattcatcctttcgtttaccattcataagaatacttcacttcttaaatttttgcagttaacagaatgctaacccagcaataaaccaatatgtaatctttgcaaataaggatagttcattgcagccagcaactacaccagttgaagtacattttagaaacttgtaacttgtgaaatttatttatatatgtatcattgaaataaagcattgtatactatattagaatattttatatatggaaattattttctaattaagaaaataattttctatttaaggaannaaataaataattgattttctgaaaaatgaatattttatattcatt

SEQ ID NO: 148626 - DNA, 639 bp, Cannabis sativa
ataatcttttattttatctctctttttctcattatttttggcactcttacttctaaaatcactccaatggtatagcactcttcaaaaataatataattatgatctcacacattattatttaattttttagcaacaataattttttattaaaaaaataatgatagcatcatatattcgtagaatagcattctttttcctctaatggtatagcatctcaatattttgtcactttatctatccatctcagcaagcatcccataattttttaccattagagatgcttttattatatttttaaaaattaataaaaaatatgtgtatttttcaaaataacgttttcttcatttgtgcccctagactagatgggctctagccgcaaccttgctcgccttagcctaaaactaactagggtgctattatgtgccttaaatggtagcacaatatatttaatatcgtaacacaaaacaattaatacactgtagtaataaatttatatactataacttttttaacaaaaataaaaaaagttacatgaaaaatacaaattaacattttatttaaaaaaatactttcataagacctggacaacaattttgtctttaatgagattttatttaccaaaatacaacttacacatat

SEQ ID NO: 148627 - DNA, 664 bp, Cannabis sativa
gtcagttgattatggaatttggtatcatagatgtgtctttcaaatcacgttctttgaatgaagtggggaattttatagctaaggatgttttatgttgtaaaacttttgatttttgggatggagatgttcctctaatggctatctctgctgtgttagaagatttgcctctccttatgtaatgatttgtggtgatttactgttttagttcaagaaaaaaaaatctccgtactttaaaatgacattttttattactatgcttaacactattttgatatatatttttattatttaatatattatttatatactaataatttttttttcacaattttaaaatctaattgtttgggaacccaaaatacacgcttagctcacctcatcttaggccatctccaatggcattttaaaaatttatataatataatttttcccataaaatgcttcaaccgagcagtgaaatccaatttagtttgaaggagtctacaatatcctactaataataataataaatactataaacaactatattttttttggggaaattttatttatattccaaaaatttctaaacacatctcattttaataatttttattttatataaaatttatatctttaattatactaagtttttttttaattttttttcttccaatttatattc

SEQ ID NO: 148628 - DNA, 726 bp, Cannabis sativa
gaaacaattaacgtgacacctcagtgtaaataactaaaacaataaattaaagatgcctcatgtctaaaccatttttatcaactaaataaaaaaagaaattaaacttgacaaattagctcacgttctcccatatcaatctttatttcttttggtgaaagtgaggtgcaaagcaccatttcattgaaaaaaaaaaacaacaggagcaacaaagccagagtcaacggcataatacaacatctgaaataagaaactaacgagacatctctaacagaaaaaacacaaatagtttaggaaactacaaagtaaataagcaaagcaaaaacataaagtagcagtcgccatagaacacttcagggcccgaaagtgaaaggagtattagcttggatccgggaacaattcattctgatccacgaacacttcaggagctaggcattaaagaaatggcaatttctcccaccacatcatttatcctcacccattttgcagcattatgagccataaagttctgctctctgccgatctttgacagctaaaaactttgcagatggagcgtagaagatctgaacttggaagcagttcccgccaggttgagatgcaaattttgagggtaagtttccaagaaattggacaccaccactgcattatcacagagaaaaccaaccctcataaactggttttgcacagcatagtggcctgccattgccagggtatgagcctcagccagag

SEQ ID NO: 148629 - DNA, 644 bp, Cannabis sativa
actgtagcgtgccttagcattagggcgttacaactaagtattaagattgttaaatgtaagaacttttatctaattttactaacgaaagtctaacgtgaataaaattttaagaaacacaatttagtacatgtcaaaattcagcagtacgatttggtagatttcaaagttcgtggggcacaatttgatacatggacaatcatcgtattaataaaactaaaggttagacaaatgcccttaaattaaatcaaataatttcaataatttttttttgaaaaaaattaacgacttaaaaagattcaaagtataatttagtatatgttaaaatttagatagtaactaattagcctaataataataataatacatgttttgttgcgattggcaagcgatattctgtaaaaattattacattaaatgatatgcgacccgatattaaactaatagtaatattaatatataagaaaatgctaagcactactaatattttttaacatttctctaataataataagaataataaataatctgatctttcatgtcgctccatggctaagtataagaaatagggaaatttacatgatatactaatttttgccattttttacaaaaatactgtcatacggtatttttttataagtttcata

SEQ ID NO: 148630 - DNA, 714 bp, Cannabis sativa
tttgatttaagtgtcttaaagcacattttaaaaaatcaggccaaataaagtaagaggataaggagtggggatacctaaggggattctgagttcacggggccacgcggaggattcgattaaggcttcacgggatagaaggaacttgattgatcgaagcttggggtctaaggctgtgaccttccgaaccttctcagtaaaaatgtcaccgatgacagtctccttgttatcagcaacagctgcacaaaaatacccccattggaatcaacatcaatacgcccttagtgggaaaacatgaaaaatacacacaatatatatacgacaatagaaagtagtacacccgaatacccaaagataaaagaaaaaggggagggaaagaggttgaataataaaaagccccagtaatagaggtaaggaaattaccgggagccccccagcttcggttaataaacggggccgtagggtcgtcagaaacaaactcaatagggcctcgggcaaaaaagaacttttccttccaccctttatgggaagtctctaagtcagtaagcaaggaaggactcttcttaggacgaagatggtaacgccccggctctttttccatcaataataaaagtggatgacgccggatacttcccactgaacgcccgccttatcccttaatacaatcacacccaaaagaatagcccacacattagggagtaactgggcaggagcaag

SEQ ID NO: 148631 - DNA, 515 bp, Cannabis sativa
gaaagatacatctttgtgggtgatggacaatcggtcgaagtggaagcaattgggcatttcagattgttattgggaattggtttttatttggatttgaaagacagttttgttgttccgtcttttagacggaatgtagttcttatttctttgttggaaaaatttggatattgttgttcatttggaaacaatcagtttactttgtctttaaattcaaatattattggaactggttattgaaattcttatgataatctttatttgctagaaccaattgtatcctacaatgaaaccttgcctgtggaatcacgaggtactaaacgcaaactacataaagaaaattcagtgtcattattgttgggattttacgccctaaataaaacccattacaatctaatctaatttgttatcattaagagattataagtcatttatgtttacatgttgttttcatgattatggtttaatatatgtacaaaatctgttaagtcaataacatgtagtcattcacaattata

SEQ ID NO: 148632 - DNA, 767 bp, Cannabis sativa
tgaaatgttaggacttgtattagagggaaagaagagtccttgactaggggtacgtttgaggtattgaagcacacgatgtgtggcttttgaagatggggtacccgaggagatgttaggaattgactgagatgattgacggcataagaaatgtcaggccgtgtgatggttaagtaaatgagtttgccaatgagactcctataggtggtaggatcgggtaagagatttcccttgtccttactaagcttgagattaggttccatgggatttgaagcgggtattgctcctaagtaacccgtgtcatttaacagttgcaaggtgaagggtctttgagatattgaaataccttcgtttgatctagctatttctaaaccgaggaaaaaccgaagtggtccaatgtctttgagagagaacttcttatccaagaaggatttgaattgagtgatggcaaccttattattgctagcaattattatgtcatccacatatatgaggatggaaatttggaaggttggagtttttttgatgaataaggaattgtcagaaagagattgttgaaaaccttcagactttaaggtggtactcaatttttcgtaccattgtctagaggcttgttttaggccatagatactcttgttgagtttacaaacgctgtttggaggagcgttatagcagggtgggattttcatgtagacttcttcatgaagatcaccatgaagaaatgcattgttgatgtcaacttgatggatatcccaattgtacatggcagc

SEQ ID NO: 148633 - DNA, 717 bp, Cannabis sativa
atttttattttttgcaatttgttttgtcattaagctaaagattggactagatcaatataatagcttctatgtaagttactacggtaacaagggtgttccgaccaataaatgaattaagatgtttatttaaattcaaattgagtcaagttcattagaaagttataaatttaccataaaatgcgtacaaaaggtgtactcgtacctatagacccgaacagacaaaagaatacttgtgaaaaataagtgaccaagagtcaaaagtctgctcgatcacttgggaggcacctatacctgtacaaagcatttggtaaaaacaaataacaagcacaaaaaaagcaaaacgaacacagttacacaatgatcataacaaggaacgaaagtcattaaggataacaaagcatgcaaactcgggattaaaagctgcccggtcagcagttgtccaaaaaatgaaaaatatattccaagtttaaagaccgcttggccggtcactttgtctcaaaagaaggcctactggccaaacagacatacacagaaagaaaaataaagagaaggcaatcaaacagcatgagtcccaagctcttggtaaggatcgactggatccaaaggagttggaggatcatcgatctggatggaaggaacatcaatgttctggtcggtaggagcagtggaagtggttgccttaggattctcattggtcgcctgagacatgcagtaatt

SEQ ID NO: 148634 - DNA, 620 bp, Cannabis sativa
  modified_base (592)..(594): a, c, t, g, unknown or other
cctctagtaatgacaaatttttaacaatctaaaagtcatttcaatggcgttagccttcttccaaacagacaattttccatgaagggtcatataatcaaaagaagctatccatgaagggagagcatcaatcaagatcataagaagaagaacatgtggtaaaagattcaagccatccatgggtaagttgttagtttttatggtccatatcagagttataaaagtagaagtagaatttcataaaaaatagtttttacctaatatgaaccataagctcaaagatctcaacataatatatataaatgaaatctaaactactaaaaaaagattatacctcttgaagtctattaggatatccttgtttatttttctatatttatcgaacatccaatccaaaaactttgttgaagaatccacaccttgatcttctaagccagcctcaactttcaggaacaaagtgggtcattagatcttatttggatgaaaagatttaggtattacagtgtctattcaactcatgagaaaatgtaatagagttagggtttttgatctcacacacatatgaataggtgtgtaatgttgggttttatgcccnnnataaaactctttacaatctgattagt

SEQ ID NO: 148635 - DNA, 687 bp, Cannabis sativa
aattatatttttgaatatattaagtgaagtttattttactattaagtatattacatgacgcatgttatactgaattaaaactcaagcatggtagaaactggagttggagtcagattgcttagtagcagtacaagctattcgaaattcattacctatattttcttcttttgaggttatgatagaagattatcgtaaacttcttccatctttgaacaatgttttcttgttttttattaacgatagttgctcatagttttgctggagcatcttgttcttttctaattcgagtgttcaacaagagcgatgtttctattgaggaaaaattttatcttttaactgagcaaattaataaaaattttatatttacttccaaaaaattaattacacaactagtatatatatatatgctcacgattcaatcatgcattgagtaataatatatatactattaattgattaaaagataagactgtattcacacactataataataatatatatactattaagattaaaagacaagactattttcacacattataataataatatactattaatttattaaaagaaaagactattttcacacatattatcattttatagaccaaaaacatagcatgtacctgatataatatatatatatatatactagcaaaaattatgtgcgaggcacgtatactaaat

SEQ ID NO: 148636 - DNA, 509 bp, Cannabis sativa
aatactcctcaaatacagtcgaatcgtcttactccattccaaataattcgaaccaatcaacttatggtccgtgattttagacatcacgtgaaccacatcagaaacaatgacttattttgaatctgattttatctccgccataatctcaaaagcaaacacaattgacaaagaaaaggaataaaaagaacaccaaagaatgaacacccaaatatgaagaaggcataaaaaataccgaattacaaccttaaatagatgcgagtgggcttagaagaacagagtaaagaaccgacaaaagaacaccgtcgaagatgccatcacacgtgcctccacgcaccggtgcgtgggaaaacgcgtagatgcttcaggcagtgcgtgagccccacgcgcgaggaatctggcgaccagacttcggggttttgtagatcgacggctgggaaacatgttggaaatattttatcaggatctagatttactaccatgtatgttttattaacaacctaatatgaatt

SEQ ID NO: 148637 - DNA, 758 bp, Cannabis sativa
  modified_base (60)..(60): a, c, t, g, unknown or other
taattttgtggcaaaacttaaagaccattctggtgcgtgggttgactgggatagtggttnggaccaacttatggtttcttatttcaatgaaccttttttatcttctcaaaccgattggagagaagtcacaagcagtgtgcaaactcgtgtatcatcacagcagaatgccgagttgttgctaccaatttcagatgaggaggttcgcaaagctttgttccaaatgcatccggataaatcccaagggctcgacggtatgacccctggtttttttagaagtcttggccgattgttaaagatgatagtatcaatatggtcaagcaatttttttcataatgggtttcttcctataaatcttaacaaaactattttggtcttaattcctaagaagaaggagcctatggatatgggggatttaagaccaatttctttatgcaatgtgttgtacaagattgtgtccaaagtggttgctaatagacttaagagtgttataccatccatcatatctgatactcaaagtgcatttttacaaggtcgcttaatctcagataacatcatgattgcctatgagattatgcatcatttaaagagaaaacgaagagggagggatggttatatggcacttaaacttgatgttagcaaagcgtataataagcttgagtggtgttacctccgtgctatgatggtaaggatggattttgatggtcgttggattaacttagttatgcaatgtgtaacttctgtttcctataccatttcac

SEQ ID NO: 148638 - DNA, 1036 bp, Cannabis sativa
ctttcttttgaagaaaagaccctcccattcatggctgaaaatccagaaaatgttaatacaccacatgaggaaactcatcatcgttctgggaaagagcccatgggctctaaagggtcaaccaacccacagtcccgacgaaccacccgctccacgaggactcaacctgagggtggccccagcgccgaaccacacgttcacggcgaacccaacctgacgttggtcctagtacgcggacaacatgctcgaggagaactcagcgtgggagtggccagaaccctaggatgagggatgaagagcccaatcgtggaggtgcccagcttatgggagaagatacttatgaaacgcaaaactgccgccttagacgccgcctggaggaggcacaacagcgaaacgttgaattagagcattacgcggctgcagctagggcaacacaggggactaatgctcaaaatcaacttgaacttagagtgagaagtccacgaggcaggactcgtggctcacgaaccaggagataggaaaatgcccgggaagaacaacccagggaaaatgagatacccccttaaaattagaatgatcaactagaaactgatgaacgagaaatttctcatgaaaatgaggagaatcttgggactcagcctggagaacgaagatcacttgtaaggaaccaccaacgttcttaccaaacccatagagcgagggctcatacagaccctaatggaggaaatacgataaaccacacttaaagggaaagaactgagcgtgaagaagcaagtgtgacctcgaggcagtcaaggacccatagttggtcaacttgaagaggagaaagtactcaacgagctaatgatcaagaaagcatgagtaccagtaaatccacgagtcactcaaagatgaagtccatgagcgggacgaggtatgtgagtagggcgcaatccgtgagtaagatgaggtttgtcagcaattactcccaaccagatctacgagagcacttgaatcaaaagaaacctgaccttcatcaacaactcagtccaaagcaaga

SEQ ID NO: 148639 - DNA, 542 bp, Cannabis sativa
aataataatgattaagtgcatttagcaccaatttttttatcttttttttttacgaggtctcaatttaattaattatgattaattaaataatttattttgttattttgagtatattattactctatataaattatctcactttacataataataattaccatacatatatattatttttttcatatttttttttaaaaaaaatttcaattttggtaatttttatgtcgattgcaatatagattttaattgtgatgtagatttctccattaatttatctgtgagttgctatatgaattttcgtaaaacataaaaaaaaattactttaatatataaaaataaaataataataataaataataatacacttcaaataaaaatagtgtgctattggactcttcgatcataagataggaattaatgtactttattcatttatttacttttaaaacaagtgattaataaaattattattaataataatactctatataaattatctcactttacataataatagctaccatatatataaatatatatat

SEQ ID NO: 148640 - DNA, 596 bp, Cannabis sativa
atcaatccattgtctttatatccagatcaagtgtagtgattttgactaaacccaaattacaagaattataaggctgtggtaagcaactgctttcatcaccattacttcctttgtgttcataaaatattatgcaacatcatttttttatatgtattactcatctagggatactaaattctttactgctcattaagtgcaactgaatacacagaagacacatatctaattctatccaaaatggaatagaaactaaagacagttaagaactttctttagtttgaataactttctagtgcttttcgaaaacaaataagttactttagcttcactggtggaactaaattattatagatgggtttttacatccctctagaataattcttccacccatagaataaccaccatctccaatagtttctgagttggtgtagataaaaggattttaacatacacccctatcatctaacatatatgtcactttcataattcttccttgattatctctcaatgttccttgtttggttacatcttagatggctcccactcaacagtaggagtctggttaatttcgtacacaagtgtgcatttaacctctt

SEQ ID NO: 148641 - DNA, 508 bp, Cannabis sativa
  modified_base (228)..(261): a, c, t, g, unknown or other
ttgttgctgctgtagttctaggttgttttctgtgtttttatgcttgaattgaatggattaatgtaggtttcatgcatgctagttacccttgttttaatttgatgtttttcaagtgaaaatgtgaaaatggttgttgtgtttgttgtttaagtttgagaatgatttctgtagtttttatatgcttgattataaagttttattcagattttgatgcttgtaggtgagctnnnnnnnnnnnnnnnnnnnnnnnnnnnnnnnnnnagctcacatggcatttttagtatcggtggtttctagttggttttgatgctttagaattgttctttggcgtgttaagaacaagtctggaaggtttggtttggattgggttcgatttgaaagagttatgaatttttgggttctgtctgcgaggaaccgaacttccggttgtgcatccggaattccggatggggttctgaaattcctagaactggaattccggttaggcaaccggtctgccagttgggtg

SEQ ID NO: 148642 - DNA, 968 bp, Cannabis sativa
gtgttaaatttgtctacaattttccaaattttagaagatgtctaaataactataatatacacaattattaaaaaaaatgttagattaataaaatctctcgaatatcaaaacagattaataaaggtgcagtatactctttttacagtttgtattttagaattttctataaatatatatatgaaatattgttattataaaataaaagataaaaaataaaaaacaagagagagagagagagagagagaattttttgctaaggagctcttagggaaatactaaagaggacttcctatttaataaaagtcaacaaaatattaaaaagtacttacttctcataataaattttacttcctctccaagtatagaattaattattgctacgatccttaataatagacttataaaatatatttcaataataaaatataattttaggccaaaaagtatactagatccaaacctatctctttccatcttatatacttccctcaatgaaagaaaaccaaagactttgaagaaaattaatatattaaaaatagtaatggtaataataagttataataagaatatgataaggagaaagatattatattaatattttttttgagagagtgatttgaatcacactatgataattgtcgatggagaggaacttttagtcaacaagctaattgtctagttaaagatatacaaagtcataatatgagtcgctacaagcaaagcaacttatataagaccaaattatctcaaaaatttagacaaaataacttgagactaccttcaaaagacattcgatataaatacttaattgaaccaaaactacctacaaaataatatttggtttatttttgaaatagtaaaaaggatgaatgatgtattgagaaaaatatttattttggatgattagtgcaaaagtatttaaagtttcataaatttaatggtttttttttagtggcataagtatttga

SEQ ID NO: 148643 - DNA, 591 bp, Cannabis sativa
  modified_base (555)..(559): a, c, t, g, unknown or other
aattaattaaaaaaaattaataataattaattttattcgataattagatttttaattaaaaattcagattctacactaaattcttctaaaaattggcttttgtttcaaggaaaaacgatttttgaatcaaaagatatgaagaaaataaaattggtgcacacgggtatgcaatgcatacccctgcgcgcgtggaagcaaggagatggccgagcatcaaggctgcatgcagcctacttgaccgaggaagctcggggtgacacaggttcagatagcccgtgtccgagtttcctcggtcaagctgtctgaaaccgcgtggaaatgctgagaaatcccctcgtccgcgcgcgtgtgtgcaacccaatttcagattttttcattcaaattcaaaaaatcagaactaattcataaaaaatccaaattaggttctgtaaaagccaaaatttattaatttttcatctactttccagtaaaaataattccagatcgaaataaaaaaaaatatttctataacgtacattgcgatttctaaactaccatcaaataagcacataaacnnnnngaagccatccaaatcaacacaaaacatcgttt

SEQ ID NO: 148644 - DNA, 581 bp, Cannabis sativa
aaggatttggatgaatttataaagcaaataaacaaataaatgataacatgaaccaaatgacataataagtaatgaaaatacttctgtttgtttattgacatttaaaacatagagattacattgaaacagagttttatttagggcataaacccaacagactttgctggaggaaagaacttagatacaaacttcgttgccaaatcaatccatgttgctttagaattcggtggcaaggagatcaaccaactcttgagtcactctctcagcgagaatggaaaaagtctcaagcggatggcatcatcactaactccattgactttgaaagtctgacataactccatgaagtttgacaagtgcaaattagggtcttcagagggaagcccaccaaattggactgaagactgaaccatttggagtatggtaggcttaatttcaaagttgttagcatcacggcgggtggtcttatacaagactggacccatgtaagagttggaagaatgtaatctctcagactgcggccatttgcttgatcttcaatggctcctccattattaccattgttacctccattgttaccgcca

SEQ ID NO: 148645 - DNA, 505 bp, Cannabis sativa
cacaagtcattgataaaattataagtgatgttatttaataattgcttacagttgctaaacaacatacattttaaatcattcgctctttaagatagttcatccttaaaatgacttattagaagaatgatattaatattttctagtgattacattatgtacaataagaattcaactatacaatattagttttagacgcaaattaaactgtagaatgcaaagaattaaaattgtggtacaatgtgccatgaatgaagaaataaatattctaaagagtaatgaagtttatatttagtaaagttacctaatgaggtggaaaacattaattaagtatagatttttcaccataaatactcatcacgaaacgtgaagaaacataaagataaaaaagaagatttattgctaagaagttcattttaaattaagaatcaataacaaaagagatttacattctcacttgtctttataaaagattctattatagaccttggcatttgttgctcgtttc

SEQ ID NO: 148646 - DNA, 1784 bp, Cannabis sativa
atggcccagtgaacaggatgctctgtcttgattttattttgggattgcaaaatttatgttgtaaaagcactaataaactagtttgtaatattttaaaaacaagggtaccccgtagttctcattacctaccctttactataaagaagtttttatatgcttgattttaattttcaaaaatttaattacccacacttttggtataattatatagtatttaaatagaaaaaaaattatataaaacacacacacgtggcgtccctgttggagaaggcgttacatttatgtttttcaatgaatatttttcctttgttttgatacttatctgtgcaactgttatgttattttctgagcttgttatttacttttaccaatgctttgtacgggtatagtttctcccaagtgactgagtagacttttgactctttgtcgcttacatttcacaagtatgattttcatctgttcagctctttggattccagcagaccgttgtacacatttaatagtaaatttataacttgctaatagaatcgacacaatcagaatttaaatagacatctttattcattcattggtcggaatatttttgttactgtaggaacttacgttcgtgaaagccattaaatgatctaatccgatctttcgctaaatttaaacaaaacaaatttcacttaaaaagaaattgtactttcaaatgtggtcatccgacctgagtacttaatcatttgatcagaaccgttggcgggatcctcctaaaaggccatttacttaaaagtaaatgttcgtttgttttgtacttaaactggtcatccaacctggtacttttacagataatactttcttaaatgttcatcattccaatacctttgtactagaacgagtttcatatttttgtcatactgcccatttttgtatgctcctaattctagaacttcgactcccgatatggtcctttccagtttggtctgagcacacaagttgtgctatcttttctgtttagaaatactctaccgaggaccatatctcccacaaaacattttcgtaccttcacttgcttgttgaagtaccgagccaccttttggttatgggctactaactttaggtttgctgaggctcatttttcttcaatttcgtcaagtgagtatgctaggagggcatgattagcttcttgatcataggtcaacctcctgtgggatggaggttctagttctacgggcaacatagcttcatagccataggccattgcgaatggagtctgtccagttgctatttttttcagttatgcagtatgcccatagtacttcaggtagttcctccggccagttccgcttagcttcttcaagtaattttttcaaagtgtcttattgagttctttgacttgaacatttcattgagagtgtgccaccgcagagaaactttttataacttcatggtttgtgtagaaatctgtgaacaattggctgtcaaactttttgccattgtctgagactattttgtgtgggagtctgaactgacatattatattttttaccacgaagtccaatactttcttagatgtaattgttgcctatggctcggcttgtgtccactttataaaataatcaactatgaccattgcataactccacctttacctttaggcaattatctgattaggtcaattccttaaatagcaaaagaacaagaactttacatttgagttagctcactaaaacaagaactatgtagaaccaacaatagagatcgaatatccttataataaaactcattatttaaagtgtattttc

SEQ ID NO: 148647 - DNA, 540 bp, Cannabis sativa
agctcgttcaaatatattatatttataggagaaccataatagaaaatcacaaaaatagccaaagagaatgaagaagaaatatatttataacctccatcttatacacccacggacagaatcactacagcaacacgaaaacgctaaaaaaaaataatcattaattctggagagatagagcgaaaacagtaaaatcgacgtcaaataaataaatcatggcaacaaccgtaaaacaacactaaaataaatataaaaacaaaagaaaaaaagtgattaaaaaaactatcttatgtacaacctcaacactagatgcaatagacactatatttgcaagctaaattctagaaaatcggaataaaaaaaccaaactcttatctttcccaaatcttcttcttcttcctcttacttcacatgctcttttttttttttttttggttacctactacaaaaagagagagagttagcttttatttagctaatgttgtagacttaggaaaaataaggaaaaaaacgaagaagaagatgatgaacagggaaagataa

SEQ ID NO: 148648 - DNA, 663 bp, Cannabis sativa
  modified_base (594)..(609): a, c, t, g, unknown or other
tcttcctctctctcacacgcctctaaggccatatctctctctcattagatatctgcctacttgatccatactttgtaaccttaaacaaagctatatccgatcccacctatagttatttgaatactattatctcaaggtatcaatacaagaaaaacgggagtaggtcattacaggctaactaaaggggctaaacctctattcaaatctttattttctttacttttcagttctaattgtgtaacacgtgacaaacatcagattcatatgactccgctgtccattggccgcgcaaggcggaatgaatgagttagagaatttacttggtgaattgtagatctacttattgaaagctcggttatatgggcccatggtcccctcactagttgagataatactacttgcaaactcagttaattgattttaattaataaattatagttctaaaattagactgtcttatttatgaattttcactaagtaagggcttaattgtgaggaaaagaggttttggggtcaatttattaattaagagactttgtatagtctaattaataaattatatatatgataagtttatttgataattaattatannnnnnnnnnnnnnnnttttggcatttataggattgaagtggaaaatatggtattattgaaagaagaata

SEQ ID NO: 148649 - DNA, 1418 bp, Cannabis sativa
tagatattagtagattttgaacatgaaaatggataaaatctattttttttttttgcttaattggttatcttatttttaaaatttgattatttgatcttatttttaaatataaagtcatatattttatattttatactatttaattaattttataaaaagaccttatttgaaatttaaaataagatatattttaataaaataatttagaaaattttgaaaatctaaccagatattttatcaactttcaatttttattttattttatttaaattgaattataagattagataaatgatattaatttatcattttattttattagacatttaattttattatctgttaaaaataacaaaaattttgtaaagttagtggatatttttgaatagatgtttatgtttgttaaaacctgatttttcaaatttattggtttaattttaaaattaataatttaatttaatttaatttaattacttctgttatacacaaaattcagctaccatttcaatagaggacacgtgtcaagataaggagactatggatcgacgaaatcactttcaatcagataactcattaattacgtaagtaacagagtatacttgcaactcgctgactataaggtcttatgcgaggtaaagatatacgaactgttgcctcgtgtattaacaagaacatacgtcattggatgcataaagcgagacatcaacttcgttacccttggggagacgagagcgatgcatattaattgtgaatacacttagcacataatatacaaactaagtatatcagttgggtaaactcaaggcctaataagcgaggcgcctatctcgctataggaaggagcactcctattactttcaccaatcaactttagacatctttcagtgagacttatagtcttgacgagtcagaagctgacagtagaatgatggctgctgaagtactctttttgtcataaagaactgtgactgtaaaaaatgaagtgttatgccttcaagcaaagaaacaacaaggcgtacatcgtcaatctcggaaggataggggaaacattccagcttgctatcaagctaaataatgttgagttcctgtttagacatcccaaaatgatgtgatttaaaacgtgtttaaatacacgatcgttttaacccagtaaaagcggataagtcacagctgtgtgatattcaaataataaccgcatttatgctacgtgatatgtaatcaaaccccatgatttcaggagataaacgctgtaaagattacaatcaactctgtaatcaattgcctactatttgattataaatagtggcaggttagatcacaaaaggcacgaaaaaaatcttaagagaaaaaggccctaaaaaactatcagaaatctaataagattgactcgtggattatgcagaattttaactgcaaaa

SEQ ID NO: 148650 - DNA, 520 bp, Cannabis sativa
tagttgtcaattagctattggtaatgaggctaatattgttgcatctggtatagtcattgacaaagggataccagactcaaactacatgacagtcatggttattaaagttttgaagagaatgattcttgctcttattccatgtcctagtttggacatcctttatgttgatcaaagtattgggacaccgatcccttggcctcgtcatttagtaattataactaatgatgtacatcaacaagtaatttttcatatcacatacttatataattatgttatatattagtgtttattttttatatactaagtgttaatttaattagttgtatacacaggcttatcatgaaacaacaagtggaggtcgattacaaaggccaccaactcctttaacacaaccaccaccactagagaaacgagctctaatagatcgtttaacacaacagacatggactccattagaacagatacataatatcgtttctcggtgggctgataaggatgagtgtttcaaatatatcataga

SEQ ID NO: 148651 - DNA, 639 bp, Cannabis sativa
tagtgggctttttgtaaaaaccctaggtgggtcatgggtatgtccatacctatccttagcctataaatacccttctatttctatacgaatggaggatcacaacaaaaataaccaaacctctgctaagattattctaagcttttctcttcttcaagagaaacaaaggatacatgattagggtttcttgctgaaaacattgtaaaaacatcaaaaacaccctttgaggctaatagactgactcgtggactaaggctaattaacacctgaaccacgtaaaaatctccatctcatttaaatctgtattttattatttcttaagttcttaaatatttagtttccaaaattatcgataaacaagttacatttcaatttccactaagtagtttgtttattttcttaagatgtctaaattttatcgagacagaaattttataaatagagagtttgaaatagttttgtgaaatttaaatagattaattttaaataatttaaaagtgaatctttatttgggtagactttaaaaaaaattaaaataattttgtgatatattcaaaatagatttatgattggttttagcttggtgtgttgttaattttagactattttattccattaaaatattatcaataataggttata

SEQ ID NO: 148652 - DNA, 742 bp, Cannabis sativa
gttcctttccctagggattctttctactttatagtcagtgaactcgtggagcagttcccggactattcccacatatgcaaccatcttttctctgtgcgtttgatattctcccaacacctggtttactacaagttgcgaatcattgtagacttctacccttttggcccccacagttttttgccaatcttagtcctgctatcagggcttcgtatttagccacattgttagaagttgagaattcaaaccgtagggctgccttgagtcgaagtccgttcgaggatatcatcgcaacccctgctccagacccattctcgttggaggcgccatccacaaataccttccatgttgggactggcagtgtgggtatgttagcgttagcttcttcttcctggaactccgtgatgaattctgctagcacctgcccttttatggaagggcgaggaatgtagtgtagatcaaattggcttagctctatggcccatttcagaagtcttccaaaggcctcaagtttttgtaggacttgctggagcgggtagttggttaacactttgattgggtgagcttggaagtaaggtctcagctttcacgaggccattaggaggtaaaaaactagtttttccatcacttggtatcgcgtctccgtccctatcatgcgcttgctgacatagtacacgggatgctgagttttttcctcttcccgtactaaggccgcactaatcgcattctcagagacaaccaagta

SEQ ID NO: 148653 - DNA, 518 bp, Cannabis sativa
  modified_base (26)..(36): a, c, t, g, unknown or other
  modified_base (472)..(481): a, c, t, g, unknown or other
tccacgtacgtaactctatctacatnnnnnnnnnnnatctaatatgaacaaattcaccattagaaatttttagaaaacaacaaaaatacaccaggatttcttcattctgattgagatgattttcacctaataatactagctaatataccatataggtcttttctaagtattaatatatatatatatatctatatattttttttaggctaattaagatttttgctttcgaactttgacacgtatcaaattatgttctttgaatttttaaagtcgttaaaaatattctctgaattattgagattgttggatataaggacttttgtttaattttaataaaaaaggtctatctaacatggatgaaagtttagacagcataatttagtacatgttaaagttttaggggcatgatttgatagatattaaagtttagggagtagtacataaataatcactgaaatagtaaaattgaatnnnnnnnnnnaaaaatctttaaatctaataatctgaatagttcaggg

SEQ ID NO: 148654 - DNA, 869 bp, Cannabis sativa
gaaagttgtggcaaaagttgtttcgagcaaaaaaagaaaagatgttagtgatgacgctagtgcgtcaaagaaaagtaaatcgaaggatgtggtggacgattctaatttggtatgtcttctttttttcttatatttttttggttgttttgtttattttaatagttttatttttttttcattttcatttaactgtattgtgttttatgtttttttaggataaaatttgtgaacctaatgttgctgatgatcagaagcttgttaatgttgctaagaaagtcaagaagaaaccggtttccaaatcgcatggcaagaagcagagcgaggctccttctgttgacgctccattggtaatttttattttttttttaagaaactggttttttaatttattattttgcatgtttcaggttttctatttacagttttatttgaatctgttttttacaatatatatgtttttattttcagtttttagtttttctctttgtggtgggtaaccagtttttgtttttttcttttttttttttctttacgtaattttaatttcgattgtttatattgttttttctctcacaggaatattattttaaaattaatgttaaaaagaggtttgctgggaaacctcaactttacaatccttataatgtcattgatgatatcaatgagaacctttctgatgatcagaagaagttgtttcgcatgtctccatttggccattttcttgatgtgagcaactttaactatcagatacagctgattcatgtcgttcttttgcggcagcttcacaccgaaagggatgatgttgagctttggttcaaattgggagacaaggctgttcgttttggaattgaagagttttccctaataac

SEQ ID NO: 148655 - DNA, 531 bp, Cannabis sativa
  modified_base (35)..(48): a, c, t, g, unknown or other
  modified_base (482)..(503): a, c, t, g, unknown or other
ttttagtcagaagtaacattttgttgtgactaaannnnnnnnnnnnnnacaaaaaaattatattgtgactaacaagttgtcactaaaagtagcagttttttgtagtactcgtcagggtaatacttataatggttgggatgcgtcctgatattcggagtactacttttgaggggtggacctcgggcaagcatgccggcttggcacactactgcgggtctttcttccttttggcgaataatctcaaaaattaaagatatcaattttggggattaacaaatgtaaaaagtgatattttttgaaatatatattttttttaatttagtagctaaattaagtataaaaatttaaaatttttttttattaatatccgttgaatcaaaatttaatgttataatattttttaaattaatatttataattaatttattttaataaccatcaatgataataccccatgattccttacatatatatatatatannnnnnnnnnnnnnnnnnnnnngggtaatacccattgatgggaactaaaa

SEQ ID NO: 148656 - DNA, 821 bp, Cannabis sativa
  modified_base (67)..(76): a, c, t, g, unknown or other
atttattttattttaaccaaaaattagaaaaaaaataataaattcaacttctctctctctctctctnnnnnnnnnncacacacacacacacacacacccttggaggatcagcaatatttggagatttttcagccgcttttcagtagagtatagcaagctttttatgattcaactctaagtaagatactctagcctttttcttttactaatttcttaagctttaagtttaagttttgcataattttgtatggtagggttctgtagcttttagggctgtatgattttgtgttctaaagttaatttgaggttaattatgttaaattgaagatgatttaagggttgtagtgttgtttgagcaagctttgagttttagaactcaagcttggctcttaaatggtgatttttgattctgagcttgtatagttgctttattgcttggaatatgtctattggggtataatatgcaggtctgaaaggtttggtaaggattcgaatcaatttggttaggttttggaattttggggattttctggtgtaaattggttaaccggattttgctccgggttcttcaaaaatttcatgtttttgattcgtgttagtttcagagccttggctggttaactccctattagtttaaggtactgccacgttaacttatagtaggtaggtttttggtttaaaacctaaaagtccccgattgtaatttagcgtgtgacttatccatgttatgatcagtgtgatttaggggcctgtaatttgccgagcagttgttccactcaggttggccggcacacctaaattcaaaaacaaggtaagattag

SEQ ID NO: 148657 - DNA, 616 bp, Cannabis sativa
  modified_base (39)..(40): a, c, t, g, unknown or other
  modified_base (145)..(147): a, c, t, g, unknown or other
actgaaaaatcatgggacttaaacttttgaacatataannatgattatattctattgtgctgaaaacactataatcaagaacaaatatatatatgttcttaacttgatagaatttatacattaaacatataatcatgaaataaannntgtgaaccatgcaacatgaaatgacttctgatcttttattaattagtaaatttgactatattaaaatgagttttattgaggacaaaaaatccaacacggccacccttagctggccctatggccggccggcctctggacaacacatggcaagctagcctgcttcctgcaggtgtctggctggccaggaaagggcctagcaggattttgtgtacaatttcatacgtggattgcgagttgggccctaatagcctaataaaacaactggaaaatatctatgtttaatttaatttacaaatatcctagggttttagttgtaaattaggatttaggttttcctatataaaggccttaactctaacctagaaaactaagtctcattcactactacaatttagccttttagtgacagtatttagtgacacgcacaaaagtgcaggtcactaaatagttaggagtgatttttagtgac

SEQ ID NO: 148658 - DNA, 565 bp, Cannabis sativa
tccaccttcagttttggatagacagactttatcccaagctacggctccagctcctaacatattgttagagcctttccatagaaaactcctgcaaattctttcaatctcagcaaccactctctttggtaaaaccagaatctgactccaatatgtgtgaatggttagcaacactgagttgatgagaacagccctacctgcaaatgaaatatgtctagtactccatattttgatgcgagccgtcattttgtctaccagagtattacactccttctgagagattctctttgagcaaattgggatcccaaggtacttaaaaggaactgagcttctagtaaatccagaaatctgaaccaccctttgaatatctgtttcagacatccctgcataatagatagcagacttgctattattaggccagagtcctgaagatcttgaaaagagcatcaagccttgaagcatcagtctaatgctttgcaaatctcctttacaaaaaagaaggacatcatccgcaaaacatagatgattgagctttaattctttgcatctttcatggaatccaaactct

SEQ ID NO: 148659 - DNA, 573 bp, Cannabis sativa
gcccagcaagacgtggtggttcaacgtcttcatgctccttttgttctcttgcaggaggatctctctgagctggttgttgaccataagggtgaggtggtttgaagtgaagcacagtggacaaagtaatacagcgttgtggcattgcttttgtatcataagagtactgtggtactccatgtgcctcacacaaatcggttataatgccagcaagcccaagtccacctccacaagagccctcaaccatcatatcaaatgtcactctaactatgtcccccacattcaatttgtaacctttcataattccataaacaaacttaatcctgtcaatctaagcatcagaataatgtttgttcgggaccaaccttgcactaacgaagtatagccatgccttggcttctgggttgagttcacatcgatacaattgatacggttctctatcaaattcatgaaacctaaggcctggatagccaagggtttcggctatgtcctcataattcaagctccttgctcgaagttgtgcttcaatggttgctcttctaaagtgaaggttggtagatcataaatagcatgaat

SEQ ID NO: 148660 - DNA, 526 bp, Cannabis sativa
ccaaaatcaaaaccaacttactcacaacaaaataatattattaattattttttgggaaatttgaggtgaagatataaaagtttaattatcggttacactttcacaattaattaaattttaaaaaattctacaaccataaaataaattcatccaagaatttctatttatttcgatatttacaaaaaaaattattttaattttttgattgtatttatttaggacatctttaagaaattcaaaaaaataaaagagtctcgcgtgcaacaaagtgtttgaattatgttttcggttaaatattttttactcaaaatttaaaaaaatgtcttaaataactataaagtagaaaaccataaaattagcgtgaaaaattctctcaaatgttgaaacagattcgaagtacattggcatatcttttaaggggtgcattgtaaaaacatccttaaattttgaggagttctatttacaccccacaaaatgataaatacacctattattaaaaaaaaatatataaacttaaataattttt

SEQ ID NO: 148661 - DNA, 966 bp, Cannabis sativa
aaaaaaaaaaaaaatcatttttatccaaacactcctagaagattttttttaattttaaaaactaaaaaaaagtttataaaaactaaatcgaacagaactgaaactaaaatttgagaaaggaaaaagatgcacatatcttttattagagataaataagaatattgaaaatgtgtactaaattttttgtatagtgttgaacatttttaagatttctaatataggattgacaaaacatgtcattgtatagtgtttatgtcatattttgtttgacttacttttatattttgtattaggcatgttgattcacttttaatttacgtttaattttcttaaccttaacccgatctgtaaaaaattgtacaatatccgtgttcacctactttaacttattttgccactatagtaaagaaagagatagactcatgtgaaatagagttcttaaatctaaagcaaaatttattcatatgaaagtttaagaaataaacaacccaacatctcatatttcaaaacttaggattgtttggcatatattaaaattcttcatcctaagagaattaaattagctagtagagcatatgaatgtgtgtttattggatggatgataatagtaaagcatatagattttataatttaaatgcacatgttattttagaatctaatgatgctgaaacataaatatccatttaaattgagaaataatgggggtgcatcatctaataacatacctgtaattaggaataatgagcataaagagagtatggaaactgaacctaaaagaagtaaaagagctagagtatctaaatattttaaatctaatttttgtgaatatagtctagaagagaatccttccaacttccaagaagctttgacttcattagttgctggtttgtagaatgaagctattaaggatgaaatgaactctcttgagtcaaacagaacttgacatttaattgttttaccaccagg

SEQ ID NO: 148662 - DNA, 609 bp, Cannabis sativa
tctctctctctctctctccctagagcaactagggtttggagtgttcttcattaattcaagtataatttagcaggatcttagtgttttcaagctctaggtaagttctgaatgcctttctctttaatttcttgggttttaagttaagggattctgcatgttttgtgagttttgctactgtagttgctgttggtgtttgaattgaatttatgcacttaaattaaggttagatatgttgatttatgctagttttgttggttgttattaggtttgagcaagctttgagttttagaactcaggcttggctctttaatggtgattttttatattgagcatgctatgttgttctgttgcttgataaatgtctattgggggtataatatgcaggtctggaaggtttggtaagctttggagctgatttggttagggtttcaaattttttaggttttcggtgtattttggttaaccagttttacaagccttgtaaaaccggttaaccggatcagtgcagggttccctagattttttcgtgttgtcaattcgtgttagtttcaaagctttggttggttaattccctattagtttagggtattgccatgttaactttcagta

SEQ ID NO: 148663 - DNA, 562 bp, Cannabis sativa
aatttctaattttcaatccatgtggagatgatactcgatttatcactttattacttgttaacgattacgtgcacttgcgtatattaattttcacagcaaatatgaataagaacagaacaaaaatccttgcaacggtggactaagcagactgtgatctgactggaccactatgcctcttctttgttcattgtgttttctagattttccggtttgtttgtgtagcctcatttgaatactcgccattctaggttgagtactcgcactttttattaaataattatattttttatttttatttggtgttgtcaaaattcctccaacatcataaagtaaataatacacaattttatagaggttcgacccccttagttacgggtaatgacctacttcccttttagttgtattgataccgagagataataatactcatatcactatagtgatgggatctgaaatagctcccgtaatattacaatgtatgaattagtaggcaaatctcaaatgagagagagagcctttgaagcgtgagagagagagggagagagccctttgggcatgtagc

SEQ ID NO: 148664 - DNA, 890 bp, Cannabis sativa
  modified_base (497)..(499): a, c, t, g, unknown or other
tccgaggtaggcgtgtgtctcatcaattttaatttttaatagttttttatccttatctcgtttaagactacatagtcaacgagttgtgaatatttcctattaaacctttataacaagttattttattcttatctcgtttaagagtacacagtcaatgagttgtgaatattttctattaaacttttataacaagttattttatcttgtatttaaagatataactttattatatcaggtggtttatattccactgtaggacaagtgtcaacttctgaagtgcagccgaatttcgggtataacaattttttaaaataatatttaagttttattttttattatatttttgttgatatgatatataattttatgagcattttatatatatttttttttatttgttgttattatatatatttgtattgtaagatatatattttttgttatatggtatatatatataagtttcattgtacatagtatatcattttattttagannntgcatgtttagtttttattttactatatataaaattgatatataatttattaatatggtatatacaatttgttttaataatattatattattatgttttattttttattgtaggtatatatgttttgttgtatggtatataatttttgtaatctatagtatattatctatttaagattacgtttagtttctattttattatatataaattttttggtatgtatacatattttaataatggtatatataattttgttagtatgctatatattttttgagtattaatttagcattttataatttctttgaggaatataattttattactacggtatattaatttttagtgatacgatatatcaaatactattgtatatatttaatgatctaat

SEQ ID NO: 148665 - DNA, 578 bp, Cannabis sativa
ttaatacactaagtgccagttcgtacattgattcctcgccaaagaccttacagccagcgggttacaaatatactctgatacttacgcaattaattagttgtaccataaaaagatattgcaccgattcacattccctttaccttgacatgtgtcctctagccgaatttcgagtataacaattgccccttagaaatttaacttttagtaaaagagctttttaataattacggagggcatttttgccaaaatcctttcttggaaaggacgcctcctttgattctggcggttgtacagtttcaaagatcattatgaatcgcctattcatattctacacgattcctagccgttagatttctcaatctttggctttcttgtcactgaactttgtgtataaaaggggggctcaagcctgtcacttttcataaacctctagcttctttagtgaaatccattttcagatggattacttccttcctgttgtgaaaattgtgtacgcaagtatacgcagtcacacaagtaataaagtgataagtaagatcgtctccacagggattgcaaacaaaaatatcttgtaaaac

SEQ ID NO: 148666 - DNA, 870 bp, Cannabis sativa
tggcatcggatcaaatggtatggagagttctggaatcacaaaatttgtaaaatctagtgttccaacgaatcttcatgatgttgcaaatttgaagtctgtggcaagagcttcaaaacctgccgtggcaaaagatgtttctgctgacgcaaaatccccaggatttacaaaaagagtaagatctgaggtataaagatttgttcctacttgttatttttggggtagaaaatgacatatcagacctaaatatttcacgttgcaaaatatgtttaaaacaaattattttggtaatttggaaaaatctcaaaagaaacataaaggtttgaaactaaaatggattaagaaaaagtgtctaactggtttttctgataaaagtgctgcatctcaaatgtggtattttgataggggttgctctagacatatgataggtgacaaggactttttgattaacattcggcctatgcagtgtggggaagtcacttttggcaatggcttagctagaaaagtcgttggtatgggaactctcaattttgaagggttacccagagtgaaaaatgtgatgttagttgatggactaagggctaacttactcagtattagtcaaatttgtgaccaagggtattctgtctcatttgacagtgatcattgctatgtacttaatgatgaaatcaatgtattttgcaaggattttgctccaatgataattgttataccctaactcctgtgtttacttgttattcagccatcaacaacaccatagatttgtggcatgccaaacttggacatattaattataaaaattcgaaaaaaaattgtcaaatgcaggtattgttcgaggtctacacaagcttggtaaagaaagtgttggtaagt

SEQ ID NO: 148667 - DNA, 501 bp, Cannabis sativa
attatcgatagtttatcgatgattatgtttatgcatcacagttttgtcaatttggcatttatcaatatgttatcgatagtttatcgatgatttttatttgtgataaacaatttgacatttatcgatagtttatcgcgatgatttctgtttgtacacaaaataatggtgtacagataaaaaactatcgatgactcatcgataattacgttttggctagaaaagcatacccaccatcatctaatatcaaacaaacacaaattcaaaaaaaactcacgaaaatttaaaaaacagatatcacaatacatacaatgatcaatttaaactaaatcgattaaacaaattcttaactcacactttttgaaaaaaaaaataacaaaaacttaacctttcgctgagggagtgggtcgacggtggggaatggcagtggttgggagctctgggtcgttgaatggtcgaatgatggagtgggtcgtcggtgggttggagagagagagagagaga

SEQ ID NO: 148668 - DNA, 659 bp, Cannabis sativa
ggcgatattccttaatattcttctaaaaatcgatggccatccttgagtttgtctccttttttggggacggataagagttcgtaaaagtaaataatttcagccagattgggcgaagcccagctcttggcaacataaaaaatgtacaagcctgaaagcaggcggtaagcttgaggaataagttggtaaggcgcaaggccaacaaaaactaaaaaatttatgaaatagtgttcaagtggtagcatggccccggacatgaggtgtgtttgactccaggccctaaagccgccgtagttacagttgggcatttcttcatctctaggaagacggtgaaagactccagatgcagaaggcttgatcccacaaactgtaacaatcttctccagttggtggacacaagtcagagttgagcgcaatacatccgcctcccagccggtggatcggcaagtgtatttctcctagataacgagtcctttcatcacctcctctagggtggctaaggtcttggactctttgcctgaggatttcgttccgattgcaggggcagacatgccttaggattgataaaactcttaaatttcttgatcaaagctaaagaagccatgttcgtggaggtcgcggagaacctcactcatctgaaagagaaatccagcagttagccc

SEQ ID NO: 148669 - DNA, 563 bp, Cannabis sativa
  modified_base (155)..(155): a, c, t, g, unknown or other
aacaacaataaaaaataacatacagataataaaaaatcaacaataaattaacaaaaatacaacatatataaaaataccgtatttttctgtaaataaaatcgtaaaaattataaaaatatatttaaaattttatacaaccgtatttttataatttnttttttttgttatttttgtgaatttgtgaaataatcccttaaatatagttattaaataattttttaaggtggtatacatgtatattgccttaattattcaacactttgcctcaaagattcaaagttcttatatgtatgcatactattatgatagtattttagtactaaaaagaaaaataagttgataaatttgattggatggttgccaataattatttatctctttgtctttccaattagccaacgcatttggtgccctaaatggtctatgatcgatctacatatataatgactataataagtggatactgatatggtgtatatatatttatatattactaggtgattgttacgtgtcaagtcacgtagagttagtttttatttaatattttagttttttattttaat

SEQ ID NO: 148670 - DNA, 799 bp, Cannabis sativa
tctttgatagagggtatggataagataatagattgttggaattgtttattgaagttgtgagtctattacttgttaacgatacgtatacttgcgtgttaaaattaccacaataagtttttggtgtcgttgccggggattgttagttaatattaataaaaattatattttggtctaatttggttttttttttcttttcaatttagttataattctgtttgtttcaaatttttctcttttctcgggaacaattagtttatgcgatgtcaaggaacaactttcagattgcctattaaccctaaaattgagaagacttccagacagaacagaaggaggaaaagattggaaagagctgtaacaggggttgaacaagaagtaattatggttgacaacatcaatgccagtaacaatggtaataatggaggttttgtagaagaccaagctaatgctcgcaatcaaaatgatcgtagcgtaagggactctttgctccctaacttaacaggggctagatcctgtataaggctacctgccattgatgccaacaattttgagatcaagtcggccatactatagatggtccaatccacagtccagtttggggggctgccaacagaagacccaacatgcatctcactaactttgaagatctttgtcagacatttaaggtgaatggagttagtgatgacgccatcagattgaggttgttcccatcactggtataatgctttagtttttaagtgacatataaagaattttcttcggttggtgtacccgacactatagtcgtagatgcaaatagtga

SEQ ID NO: 148671 - DNA, 678 bp, Cannabis sativa
gacccgatatttagttggactaatagcgatactaacacataggaggatgctaagcaccattggtgccttttagcatttctcatatataaagtacatatgatttccttaaaaaaaagtcttttagcatttctcatgcaatatatattttgtttcgatgtatatcgcgtgcaaaaaaccttataataaatttgccgccatattctagttaggtaaagagggttaggcagcttatccaaacatctactttattcaatcttatccatatataataggtacttcttctcaacctacccaaacttttgattaaaaattaaaatgaaaaaagtatgtctatttttttgaaaaaaaaaaaaataatatttaaacacatctaatatatttgttgagataataataatatataatatatatatatatagaaacatagatgtagtgtttggttcattggaagtaaacccttttgtaaaagataaatgttaacgaagtagtgtaggtgttcataaaataaaatagtaaatttaatttaatccacacgatttaattcaattcgtaaagtataaatactcgtacttatgcaaattagattagattgaaaattttaaaattcgtacttatacaaattaaatattaattgacatataaaagtaactgatacaattcaatccacatatatttata

SEQ ID NO: 148672 - DNA, 844 bp, Cannabis sativa
gaaaaaaccgtgatgaataatgggtggttaagcttatcaatggaggttattgatcttccaaacaacaaaaaaactgaaggaaaatcgaaaaccaattaaaagaaaaggaaaaaagagagggaagagagtgggatttgattgatgtgtgatggggatagcacacgtgtctgtgcatgggaatgatgagtaagtggtatttttgtaataaaacaaagatggtaagtaaaaaagttgatgtaggcgtgtaggggtaaaaatgtgcaaaatagatttttggtgtaaaaatttcttaaatttttttatttacaaaaattattcttttagcaaaaactataaccgtttttcgttgttgttttattgtttatagttgttatgaaattgatttttttattatttttatttttatttatagttgatttataattgtcatcatattgatttctttttgctttcttattatttattgagcaaaatatatttttgtaattttaaaatttacaagcctatttttataaataataattttagactgtaaaattataaataaaagataaaaaaatatttttgaaaatcttcttaaattatttgtcttatatataatatatatatataataatttatttttagcaatgtgagactaaccaatatattgtatattctaccaaccatgtcatcttcagtcacatttttaggagaatgtagtaatattttttcacttcccatttctagttgcatttggctttttctttcgggaaattatagtaaatgaccccaaatcataggagtatgttagtttatgtcctcatttcaaaaaaatatagcaaatggccctaaatcataagac

SEQ ID NO: 148673 - DNA, 698 bp, Cannabis sativa
agtaccaagctcatcggtatttaatgatcgatggtattctctatcgaagggggctcagcatgccatatttgaggtgtatgtcagatctagaagctaaacagatcatgcaaaaagtccatgagggattctgtggagatcacactggaggcccaagcctctcaaagaaaatattgagataatggtatttttggcccacaatgaagaaagattgtatagactacgtccttatgtgtgatccatcctaagggtttgcaaatatcccaagagccccacccaataaaattactttgatgactagtccccggccctttgcggtatggggaatagatctcattggctccctacccacaggaaagggtggggtaaaatatgccatagtggaggtagattattacacaaagtggacaaaggtcgtacccatggagaccataactgtcaataaagccttggactttgtcataaaaaatattgtatgtcgatacgggctgcctcacaaaataatctcagacaatggaaagcaattcgactgtgacgaattcacagatttttacgatcaacacggagtcatcaaaagtttctatgcggccacacacaaatggacaggaaaaagctgtcaataaattactcaaggtcaccctaaagaaaaagcttttggcctacaaaaataattggcctgaggaacttccacgcgtgttaag

SEQ ID NO: 148674 - DNA, 828 bp, Cannabis sativa
aattcaaataaatcatcataatttaataattaaacataaataaataattctcataattaaatcttaattatctgctaatttctaaattaaagctaagcggccttcacaagctaatacttttttaaatatgcatcattatatactttttttcttagcaaacatccgtagcttttttttaatgatttttttatgttttattttttaaaaaataaaactaaaaaaccatcactagcattttccatcttcttaacaataaatcaattttttcatcttcttacagtcatattatcttcttacagccatattatctttacagattaacaataattttttttttgtaaggagattaacaataaactttgattctcgattcaaatgttatttttcaattctattttcatatattcaaaattctcaatctattaattttccactaacatttttcaatcaatgaaacaaaaaatgcaaactttaattcccgtatgaaaaatcaaactctcaatcccaataattaatagaaacaacatcaagtttcaagttctcaaaatttataaaaataaatacataaataaataaaaacatatctcataaacacaaactcaaatattagaaccccagtaaaacactaaaacattaaaaacacacacaataaaatttgaaccctgaacttaacacacatatcagaataaaaattaaaccataaataaggatgtatgttactatttttctaattttgatatttattagcaacaaatttaatattttaaggtcacaaattttttaatagtaaattcaaaattttaataagtaattatttttaattaaaat

SEQ ID NO: 148675 - DNA, 535 bp, Cannabis sativa
aaaatagcaaactcatcctctagcagagctgtcaatccatataaatcgttaatctcatcaggagaaaagggaacactctgacccctcactagaacgacatcaggatactttggatcaagtgcagcataaaatgaaggggcaacagaggccacattaggcttgggaattgcacaaaatttctcccacttgtgctccgcaatcaaatttgtaatataggcaggtaaagcctccggggcagggagaaagccacgctcggccaactggttgcgggtttgcaatatctcaaaccgctcttgatggcggacggggtcggctttggctttgggacgagtaatggggttatgtgtaggtggtgggactgtggaagtggtgcgcttaggctttggttgggccttggaggtagagggagctgtcttggcggttggagctttgggtttaggtgatgagactttacaggtcaaatgcggggtggtgagtgtgtaggttcgggaatggttggtattggagtgggggaaggcaaggcaagggttggtgg

SEQ ID NO: 148676 - DNA, 951 bp, Cannabis sativa
aaatagaggttctactgtattaatgacgaacatgtcgtcaggaattaattttttttttcgaaaaaaatacgttggaacagacgtgaattttccctctaaaaaaatactggcgacaaattcgtcagtgatggattgccacgtcgttgtcgttagtgttaagttgccattaaaaatattaaaaaaaaggattaaatgctcaaacctatttgacttcccattttcattttaacattcattttcttttttcagcagaaaaaaacccctcaaacccctctaaatctcttcccagatctctcttccaaatattccaccgcctgaaatctcttcccctcaaaccactccgatgattggttccgtccaccactgccctcgtcgaatgacggtggttgtgatgtccatttttaaggtatgaatgaattcattttttgatgctttttgatcttctgtattttttgggtaataaggagttgtatatagttgggttttcgattgcatgcctgatttatgattattttgaaatttttataattattagaacacctattatatatacatagttatatgtatataatcattaataatgatcgagtcttgatcacattagaaaccaaacaacactcacattcttttctgcccgtatgaattttatattgatgtaatatatactcaaaatatttatatatatcacgatttttttttttgaaaaaaaaatggtatttaaatttttgagggaaataatttttgggatgtatattagggtaaacttatttaagtttttaaatatatactatatttttgtttatacagaaaaaatatttatagaaaaaatatttatattatgtgtatgtatttatctaatataatgaaatatatttatttttgaggaactttggaagaagcattattgggggaaatttgctagagtttttgattaaagccaccacaaacagt

SEQ ID NO: 148677 - DNA, 724 bp, Cannabis sativa
tggttaaattcatacataaaagtacatttaaccacttactattgttttgagggatatcttgttgtgacatattatcttagtcagaaacagtaagttccttctagattaagtcatcaacatagcaatctagtattttaaattgagtgtgaaatacttgcaggaggttaagtaatcaaatagagatacaataaaattttatcaggattaaggattaggattaggaatttatttttgcccaagtcattcgaatagactatgcacgaattctactatcttattctcataatttttatcagttatttctatccatatgaatggttagatttactttctcagttgtgttctaaagttcctatcacaagtgtcaaccaaatgaagatgggttaaagaattttaaaattctcccactcaaataaggtagtgtgatacaatgtcaaagaactttgttagtatcaatttctattacaacagtaatatattaaatagaacataaatcaagatcaagaatttattctgataattttactaattcattatattacatccatgtttaaaatatgtgtgacaaagagtactatggtgtattgagtatagtccagagttcaaaatgaactacatatttcaatattatagtccagccctaagtatatagagactatgatccacccctaagggatatagagatcatggtccatctcttagtgttatagagatcatgtggagt

SEQ ID NO: 148678 - DNA, 701 bp, Cannabis sativa
ccaccaccacgacggaaatctccaccgaacccaccatctgagcaccactcaacccaccatctgaggacgaagacccactcctccgaccatccagttgacccaccacgaagacgaacaacgaccaagataagatttccccttatggtatttttgaatatttttcttattgatttagggtcaaaatatagtctattgatagggtctgatatgtgcattttggattagatttagggttagatttgaatctgtgatttctgggttagaaaatgtattttctaggcaggctcgatgcaagtccgatgcatccccgatgcaagcccgatgcatcatgatgaaaaaaattggatctaggttgaagacaaaggcccaatatagggcccgatggccagccaatttttccaaaaaattgactgaccatcggactggccatcgggccccattatatcaggcctttgtcttcaatccagatccaatttttttcatcatgatgcatcgggcctgcatcggacttgtatcgggcctgcctagaaaatgcattttctaacctagaaatcacagatcaaaaaacactaacctttgatataggatccgtgggtcgcggtggtcgtggagaaatgggtcttcagtctgtcagacatggtggtcgtcagtcacagtcgttgtgggtggtggagaagggtgttgttgttggaaattatttt

SEQ ID NO: 148679 - DNA, 703 bp, Cannabis sativa
gttgtatcaagccaagaatcaggtgactcatggattcttgactcagggtgctcatttcacatgacaccaagaagagatttgtttgatagtttcaagaaattggatggtggatcagttgtattgggtgacaacaaggcctgcaaagttgctggaataggaacagtgaagctaaagctacatgatgatcagatcagaagcatcaggaagtcaggtgtgttccagatttaaaaagaaatttactttccattggtgaattgattaagaagggtcataccatagagattgatagtactttcaaagtcatgaaaggggaacttaagaatgggatttattatcttaaaggaaatactatcactggtgaaaatgatatggtagtcaaaggacctgatatggaaggacctgatatggagagtactaggctatggcatcttagacttggacatgtaagtgaaagaggaatgagtgaactcgaaaagcagggcattcgaaagggtaaattgcgagagaaataagaattttgtgatgattgtgtatatggtaaatgttgtaaggtaaaattctcaccatggaaacatacaacacagggaaaattagactatattcattctgatctttggggggcttcaagaactcaaacactaggaggtgcaagttacttcatgagtatagttgatgactacactaggaaggtctgggttttctt

SEQ ID NO: 148680 - DNA, 742 bp, Cannabis sativa
ggcacacgaccgaagaatgccgccagttaaaagatgagatagaaagtcgcatcgctcgaggccattttaaagagtacgtgaaaagacagggtcatggatacaaccagcccagtctgcccaatagcccaaacaaccagggcttacatccatttcctgttgaaggagaggacatccttgttattttgggagggctacatatcgcaggggaaagcaataatgccctaaaaagatatgtgaaatatataaagaacgagcagtcgacatttgccttagaatcttccaaaaaaggtgaaaactgaggaacctcccattatattcacggaggaagacgagaaaaatgtgtggtatcctcacgtcgatccattggtgattaccattcaactttccaataaaaggatcaagagagtgataatagacaatgggagtttgataaatatcctttataaggagactctacgaaagatacggctaaaaaaaaatccaaattaaggccttgtatggcgaatcattgcggattcactagagacagaactgccagtcttggcataatcgagctcccattaaccttaggcgaggcacctctatctaccactgttacgcaagacttcttagttgtcgacctgccaccaacttataaaatattgttgggtcgaccagcactgatcagactaggggcagtcagtttgatcaagcacctatccttaaaattccaaacactagaaggcgtgggagtggtgcgtgg

SEQ ID NO: 148681 - DNA, 592 bp, Cannabis sativa
  modified_base (47)..(63): a, c, t, g, unknown or other
ttttatttaatcacttattttagtctatatattttaataatgaaaannnnnnnnnnnnnnnnnatccaaaattaattaaaaaatttaatttaattttccaattaatttttgaaaatccattatataaaatatatataaaattttgaaaatgattaaaatataataaaataaataattgaaaagtatcttatttaagttgttctaaaataacaaaattttcaacttatattatttttcaaaatttaattaaataacaaattaagtatcttgaactaatcaccttaatttgaaaaatatttcatttaagttgatccaaaattaacaaatttttaacttaaaaaaatatttaaggaatatctgaataactaattttctagaaaaatctacttaactattgatttaaaaaatattctaatttaagttgatccaaaactagttataataactgattttcaactgtaatatattcttatgaaaaagtaaataattaagtatctcaaaaaatttaattagttataacttcttaatttaattaaatacagaaaaatacatatagtttatcttgaaaaaattcattaaactaagtgtgttt

SEQ ID NO: 148682 - DNA, 1059 bp, Cannabis sativa
  modified_base (30)..(32): a, c, t, g, unknown or other
tatttcctttccattccattccatttcatnnnctccaaccaaacgctacctaaatatctgctatttctaaatttaaactaagcggtctttacatatactttgagattgatcaccgtcagattaaaagaacagagatccaacagatagaaacaaaagagaattagaaaagatgggtcatcaaatgctaataatgtgccttgaaaccatgaaccaccaaattcaaaagcatgtaatttttcaaattgggttaagaccaaaataccctttgtaatcatttaaaaagtactttttattaaaaaataactttttaaggggtaattgttatacccgaaattcggctatacttcagaaagtgacacgtgtcaatcttgtggagtatgaaccaacagatataatgatgattatatcattaaaggcaaaatagaataactcattaactataaaattaatagagaacccgctgaatgtatagtcttaggtgagataaggatacacaaactatcaatttatgtattgacgagaaactatcttgcctcggaaggcataatcccgagggaactatggacaatgcatatacatctacctcgctacatgtaaggaagtattgacgaggcgagccgactgttgaaacatttagcgtataatccacattataataactaagtgtaacaacttgggagcatgtaggacatgattgtctagtctgcgaggccttatggtcaaagagcagttcctaattttgctcagtacactggtgctcatgccattgctggaaggcatatgaataaaccaagtcattattggttatctatgtacaaagcgagatgcctctagcgagatgctcctattccacgccaccatccactaacttgaagataagaatgataaaaggttacacagatttctagttctacacgtgttaaaatagaacgtggtcaaagcccacgttttgtgaaacaattatgtaattcaaattcaaatgtaaataactgtcaacctatattcctataaatagggaaagattatacagaaaaggggacggaaaatctttgagagaaa

SEQ ID NO: 148683 - DNA, 899 bp, Cannabis sativa
aataaaaaatgagacatgaataataacttgacacttaaatatttacaagttaatttattttaaaaataaaaaagtaaaacaaaatatagaaagttaatttatcttttttaaaaaaagagagaatatgaaaagtcttagtttcattctttcataatagaaagaaaagtgggccctaaattaatgtgtatatttgatactcagcatttattattaaatatgtaatatatattagcaaagaagttaacagaatgaatatctagaaattaagttagagttttgctgttaattcattaatgacatggagtattttaattgggtggacagcaaaatggacaggaatcctagacagaggatccgcttccattttttttttttttttttttgtaatttttattctaaaaaagttatgagcttctaaatgtcttgaggttgttaagatggaagatgaagcaatatgtaactaaataatacttatggtgtgttgattttccattttatgctttaaagctaatgaaatttttatcttcaaatatgtctttcatctttaatatcatgtattttagattgttagcacatattttctttattgtgtaaaaattataatttactttgattaagtgtaacgccctaatgctaaggcacgctatagtgctttttcaattatagtgcaatctttcttaccaaagaattttctcgaaaaacgtgtcaaatttaaacttttataataataattaaactttataatatattaaaatagttacaaatgtcgggatcccgttttcaaaatttttaaaagttaatactccaaaatacatttattacaggtcgcacaacgactaccaaaatacaatccccagatgtcccgagaccgaacgctccaggtcgcgctgcttgacatg

SEQ ID NO: 148684 - DNA, 950 bp, Cannabis sativa
  modified_base (66)..(73): a, c, t, g, unknown or other
aattttgattaaaataagagtccaacgatgtcccggcaggcaagagtcaaagtcattcttattttnnnnnnnncttcattgtttcatattgtaaataatagtctaaattgttatttacaaatacttattgttatacccgaaattcggctaccatttcaatggaggatacgtgtcaagttaaggggaatatggattgatgcgtgtaacggtaatcacatttaatggaataactcattaaatgcagaagtaacagagtatacttgcaactcgctgacaaggtcttatgcgagataaagatatacaaactgttgcctcatgtattaacaagaaaccatacgacattggatgcctaaggcgagacatcaactttgtcacaactgggatgatgaaagtggtgcatattgattgtgaaaacacttatcgtataatatacaaactaatataatagttgggtggactcaagacctgataagcgagccgcctatctcgctataggaaggtgtgctcctattactttcaccaatcaacttcagacgtcttttagtgaaattatagtcttgacgagttagaagctgacattccaatgatgactgctgaagtactctttttatcattaagagttgtgattgtcaaaatgaagtgttacaccttcaagcaaagaaacaatgaggtgtatatcatcaacctcaaaaagataggggaaaagctccagcttgctgtcaaggtcattggtactgagttcctatcgagatatcccagaatgccatgatttaaaatgtgtttaaatacacgatcgacctagtaaaagcggataaatcacagctgtgtgatattcaaacaataacctcatttatactacgtgctacgtaataaaaccccacgatttcaggggataaacgttgtaaagattacagtcaactctataattaactgcctactatgtgattata

SEQ ID NO: 148685 - DNA, 1338 bp, Cannabis sativa
  modified_base (655)..(663): a, c, t, g, unknown or other
gtcttcattggctcagcctccgtccattttgtgaagtaatctactgctactatggcatactttacctctccccttcttgttggcagggacctaataagatctattccccagaccgcaaagggccagggactagtcatcagggtaatctcgttggagggggctcttggtatgttcgcaaacctttggcacgaatcacatttttggacgtagtctatgcaatcttttttcatggttggccagaaatacccttgtctcagtattttctttgagagactcgggcctcctgtatgatctcgcagaacccctcatggacttctagcatatttttcttagcttcagggtctgatacacaccttaggtacgacatgctgagtcctcttcgatagagaatgttatccatcatcacataacggtgcgcttggtactgtatccttctagatagtgccttttcttggggcaactcgcctttggttatgtatccgatgatggggatcatccagttgagctcttgttcaactgccgccacaatgcttttggctttaatgcttggttccgagaggcgttcaacgggcaccaccccagtttctcaatttcgctgtctgatgctaacttagccaaacagtctgcatgagcattcttttctctggggattctnnnnnnnnngtagtccgtgaactcatggagcaactcccggacgattgctacatacgcggccattttttctccacgcgtttgatattctcccgatacttggtttactaccagttgcgaatcactgaagacttctactcttctggcccccacaacttttgttaatctcagccccgcaatcagggcttcgtattcggcctcattgttagaggttgtgaattcgaacgtagggctgcctggagtcgaagtccgtttggggatatcattgctacccccgctccggatccattttcgttagaggcaccgtccacaaatactttccattatgggatttgaggtgtggtcacacttgcgttagcctctacctcatggcactccgttatgaagtctgctagcgcttgtccttttatggaggtgcgcagtatgtaatgtagatcaaactggcttaattccttatcccatttgagaagtctcccggacacctctggcttttgtaggacttgtcggagcggatggttggttaaaccttgattcggtgtgcttgaaagtagggtcttaactttcttgaggccattaggaggcaaaaaactagtttttcgatcaccgggtatcatgtcttcgcccctatcatgcgtttgctaacatagtacacgggatgctgagttttttcctcttcccgtactaagg

SEQ ID NO: 148686 - DNA, 669 bp, Cannabis sativa
  modified_base (223)..(227): a, c, t, g, unknown or other
  modified_base (276)..(285): a, c, t, g, unknown or other
  modified_base (642)..(644): a, c, t, g, unknown or other
tagtggagggtctaaattttgataggggagttctatttgcaccccataaacttataaatacaccccattattgaaaaaaaaaatataaacttaaataattttttaaaagtattcttaatattttttttttcacattattttatgttaatttcaatacttattttgatttcattttcataattttttctaacttatgtatattttttttttctaagaaaatttnnnnnaattttttattttaattttttttgccataatatttaaaatataatttannnnnnnnnnataggtatattttttaaaaatatgaattggaagaaaaaaagctaaaaaaatttagtataattaaagatattaattttaaataaaataaaaattattaaaatagagtgtctttagaaatttttggagtgtaaataaaatttcttattttaatattgggggtttcattagggaaaaaaaaatgaaatttcccctttattatgagccacttataatgtgctttgtactacgatgaaatatctcaagcttagccatattctataatatttattaaaaaatgacatttctcttttaaaaatgtttaggaacgggaatcttgttataaaataatataatataatataaagtagatgagaagannnaagaagaagatgaagagagaaagag

SEQ ID NO: 148687 - DNA, 673 bp, Cannabis sativa
ttcatttttgtttattttttttttgtaagtttagtttaaattatttaaaataattacattggagattaaaataggtgtttttttttttttaacctcaataaaagaaaatagaaaagtatttttatatttttttctttctattttttaaaattttgcgaaagtttcatatcaatatattaatatcaataaatagaaaaaaattatttacttttaattttttatttgtactattcaatattcttatattattatttgttcaagttaaaaataattttttacaactaaaatattttttctcaatttttatttattcaaaagttaaaaatttactttttaatttatttgtaaaaagcgattgtcaatgtcatatatgattatttgaacactcttgactatatatatatatatattttttatttgttgttatattttttattgttttaattttaaaatattagaacataactatttatactaattgattttttttattttagcatttttgttattattttttttttgtaaatttagtttaaattatttaaatggtcaaattagagataaaaatcagtatttttcattttttaccttaataaaggaaaataaaaaaatgtttctatatttttttctttctattttttttaatttcatatcaatgtatcaatatcaatat

SEQ ID NO: 148688 - DNA, 519 bp, Cannabis sativa
  modified_base (198)..(200): a, c, t, g, unknown or other
tgagcattttaaaatgtggaattttcattcatcagtcaacttatactgaaaagattttgagacagttttatatggataaatcacacacattgaatagcctaatggtagttataacacttgatgtgggaaaagataatttttcgatctagagaagaacatgaagaactccttggtccaaaagtaccatatcttagtgcnnnagaagcattgatgtatcttgctaactatacaagacatggtatagctttctctgtcaatttgttagcaagatttagttctgctccaacatatagacattggaaagggattaagaacatattttgctatctccaaggtactattgataaaggatttttctattctaataattgtgggtcacaacttatcggctacacagatgcaggatatttatctgatccacataaagccagatctcaaactagttatttgtttacttgcggtgacactgctatatcctggcggtcaacaaagcaaactctggtggctacttcctcaaat

SEQ ID NO: 148689 - DNA, 635 bp, Cannabis sativa
gtccacacatactctagaagagttatagtaaatatatggtcatagataatatacaatgatattttaaaagtaataacaataatcttatgaggcatattatcaccaaaaaaaattatggataatatgtgcatgagggcagaggcggagccactcattaggttggagtggccatggcccccctcaatttctcaagaaatagatgtacatttaagtgtatataaaataaatgtaaataattaatatatatataagatatgatatattgttattgtgaactttttatagatattcaaattatatgtatttatatatttaattgtaatttattaattaaaatataagttatttaaattacatatattttgttttttttatagaaattatagttttgtaatttcactaaataaggctatataaaatgatatttttaaattagaaataaaaatataaaatataatgactctaagaggaaaagagttttgactaattaattattaatgtatatattgaaaaaaaaattattttaatttcaaaaaaattttatgctacacatattaattactatataatattaattttttatgtaattactaattattttgtcaaacaagattattaaaatttatatgtaatat

SEQ ID NO: 148690 - DNA, 782 bp, Cannabis sativa
attatagtccactaaaggacaaaatgtctaatgaggcaaaatgaccatttttcccttcccacactaaaagtcataaaatgtcactttggggtatttttgtcaactctaaaatctcgactattcccgacattcctaatttctagctatactgctagctatactaaaaatactaagatgtgattctaatagccaaacactgcgttctaatattgtcgggcacaaaacatgcaaaattatgaaattctatatatgacatataaaatacattatgaattcaaataaataatcgttaataaataattcaagactaataagaaagtttcataattaaaccttaattatctgctagtttccaaattaatgttaagtggtctttacaactatgccactaaccgagttaactaagaaaaattagcggttcgtgttgtcagagaaatttgaagcaagttttcaggagttgaagcaacgtttgatgacagctccagtgttagcttatccatcagatcgagaaaagtttgttatttactgtgatgcatctagacagggtctgggatgtgttctgatgcaagctgacaaagtcatagcctatgcctctcgtcatctaaaaattatgagcaccgctatccaacacatgatctagagtttgtgttgtggtattttctctaaaaatattacactgatcataaaagtctcaaatactttttcacccagaatgatttaaatatgaggcagagaaggtggctggaatttgttaaagtttatgactgtgagattttatatca

SEQ ID NO: 148691 - DNA, 546 bp, Cannabis sativa
  modified_base (496)..(505): a, c, t, g, unknown or other
aatttttccctacctacagcaatgtgtcattttaaagctgacacaaaatgttaaaaaaattgtgtaaaattatgtgtcaagttgtaaccgacgcaataatctaattagcttcaattacaatttgaagctaagtttcttgcttcattcaagaactgacgctaatagagcatactttttgcttctattctctattgaagcagaaaaaaaagtttgcgtcgctttggaaatgaagaaaataatttgactatttgcgtttgctgttataacgtcggtttgtacaaccgacacaaaatgttttgtgtcattttacaactgaagcaaaaagtcagttttgtagtactgaatgaatcactacttaaaagatattagtgacaataaaaaattgtggaaaagttgtgactaaaaaaatactagtcacaattttatgttgtgacttaatgttggatatttattttaccagtatattagatctactcataagtatgttgtttaacannnnnnnnnngaactttctaaaacgataatttaacacatataaagttaaga

SEQ ID NO: 148692 - DNA, 828 bp, Cannabis sativa
tgaaggatagataattattaaattataaaattactattttatccttataattattttaataatatttattgagggtatttatgtaatttacaataattgaacaaggagaattccaatccttccattattagacggattacaaattagagatttgagtggatttgctatcctctcacctctccttgctctccttcaaccccttttgccaaacaaagggatttgttatctcctcccacctctctcccttcttcctctccatccctccacttctccctcctaccaaatatattagggtgttcattagatcacatccaatggatttagacccaaccggtccaatcaaattatttattggatgttgaattttatcatccgatccaatccaatcgaattaagtcatccgatctgatctgatacaatggatgtattatgtattggtttgatcggttctaaccattggatgcattgactgattttctattggattggattggatccatccaaatcattttagctaccacttaaattggtttcattaaaaagaaaatatatatataaaaaaaaaaaaaagacataagttaaaacctaataatccaacatacatattaaacattagtttagtcaaacttaattctcatgatctcataataaaaccgtcaaaaattagaacttattcaatacgcattgataattttattagcatttaggaatatgagaattaatatttaagatctaagattttttttttaatctgatgtgttaaatgtatattaaattaattaatatatttttttaaataaaatatattaaatacagtagaacctctat

SEQ ID NO: 148693 - DNA, 627 bp, Cannabis sativa
aatatcacttagtaaagaactcaagccatcaattcaacactgccatttctgacatacaactctaaaatattttgactacaccatattaattcaaagggacttattacattgtgtgtacaatataattattaatataaacaacataattaatttagtaaagtgaaatcatatcatgtctattctttaaattaccaactaactctcatttgtctttaataatatattggagacttttgatctaacaattaacaaggaaaaaaatggagacttttcctttttttcaaaacaacaacaacaacacaacaacaacaacaacaataacaataataataatccattaaataaacatacaaattacataactctgctcattaatttaaaaagtattccataatttcaagttattaaatcaaatttttgcacaaacatataaaaaaaatagtgagacaaaatttctatttaaaaatctactatgaccttgatgtatacactaattaaaatttttgttccctatattttgacatgtatcaaaatcaaatcatgctccttgagttttttttttttttctcgttaaaaatttctcctgaactattaagattgttggatttaaggacatttgttcaattt

SEQ ID NO: 148694 - DNA, 870 bp, Cannabis sativa
agatattattcagccattgttgagcttttggggcccaattcccatcccattgctcctagccatgtgtaagagtgtctagtgagacctgtagagcaccccttggctgactaggcccttgtggtggccaggctagtcggccatggtgctgtccttaggctggccggccaggggtggctggccagcttctgagagggagctggtctgtcacttgatcctcatttgagtgctaatgtctttgtttaggtgctgacttgggcttcctttcggtgagctgtactgtcatatgacacttgttttgtctacataagcatatcatgtcatggggataaaaatttggataacatttccccccaagtgcctatgcggacatctattcaaatagggactttgccaactaaattggcaacgtgactattgttacctttgttgaataaaaagtgatgcattttttgaatttatcttgactatttgatctcattgcagtggagaaataactactttaagtgcctttatggcggttggtgaagtaagtgagaaaaagggggcccacatgtattacataagtgagttttggggggaaacctttttttcctttcgtttttcacttttactttctctcactagaaatttgctcttagaaaagctcttccttctctctaggtggtcgaaccttgaagcttcattctccacgagatttttgtgatatttcaacgatctaagcttcccaccttcatcttcatcgaaatattatactaggtaagctttccatccatgctttttcacttgatttgattaattttgccataaatgcatgactattatttcttgttttgaacatgctttgattcttacattagattgtagtccatt

SEQ ID NO: 148695 - DNA, 511 bp, Cannabis sativa
aaggtcatggtaatgtgtatgcatatgtatagctaattaaaggccttagaataactctcacaacagaacacaacacaacacaagaagttagatcatggtatgtgtatacaaatagctaattaaaggccttaaactaagtctcacaacagaagacaacagatgaactcaagatcatggcataggtacagtatgtgtatataagtaaatgcatttaacaaacttatttgtggttatgaatgatgttgtctaagcaaagtttatgttgtccacataaataataatcatatatatctaataagtaaaggaagcataagctatcttgcttctgtaatcccactctctaagaaggttaagtaacattaaaaaagctaatgtgccaagaacagagacattgttatgtagaagttacttttctggtgcaaccaccacagaatttaatgtccgataaattctagtttgatcagacgaaaagctaatattcaagtaaataacaacaaaagtctacagcaac

SEQ ID NO: 148696 - DNA, 701 bp, Cannabis sativa
  modified_base (597)..(598): a, c, t, g, unknown or other
atatatatatatataaaggagagaaataagatggtgacatagcgctttataatcactctaaatatttttatattctcttcttaattctcttattattttaattctttattaggtttataaatattatttgattcatttttccatcttttgaattttttattaagtttataatataactttattaattaattaaaaaataaataattaaattgaaaaaaaaaattatacatatgtaactattaattattattattattattatataccaaactatacttatagaactattaattatcattattattattattataaatatttactttaatcatccatctatatatttatataaagaatagaaataagacaatgacacggcgttctataatcactccaaatatttttatttattctcttcttagttctcttattattttaattttttattagatttataaatattattgtttgattaattttcccattttttaaattttttattaagtttataatattattttattaattaattaaaaaataaaaaataaaattgaaaaaaaatttatgcatagctattacttattattattattattnntattattattattattatgttggattaaaatcctcaatatgggctcatatgtatattagtgtattgctatttgaagtttggcccaaaataaagtgatcatttt

SEQ ID NO: 148697 - DNA, 1570 bp, Cannabis sativa
taatttccaaattaaactgagcggtctttacaggtaaatttagggtctctatctgaaatgatagactttggtaccccatgaagacgaccaatctccttcacatacaaattatcagactgatctactgtaaaagttaccttgacaggcgagaaatgtgctgactttgtaaagcgatccaccacgacccaaactgaatcacacattcctgtggtgctgggcaaacccaccacaaaatccatcgcaatgacttcccatttccattctggaagtgttaatggctgaagtaatcctgcaggtcgttgatgttctgctttaatctgctggcaggttaagcacttagtgacatagtctaccacatccctcttcatcccataccaccagaaatatgagtttagatcttgatacatcttggtggttcctggatgcaatgagtaaggggtagtatgagcttcgtccataatctctttcttaagttcagtgttatcgggcacacacactcgtgctttaaacaatagcattccactgtcagagattgaaaagtcctttgctttgcctgctaagacatcatctcgagtcttaagcagttcaggatcttctagttgtaccactttaattctttctaacaagtttgactgaagtgtcagattatgtaatctctcaattacaagttcaatgtttgccctagacatttccaaagctaactgaggagaaatcattaccatattggaaatctgatcaggtccttttcggcttaaggcatctaccacaacatttgcttttccaagatgatatatgatttcacagtcatagtctttcactaactctaaccacctcctttgtctcatattcagatccttctgagtgaaaaagtacttgaaacttttgtggtcagtatagatctcagaccgttcaccatataagtagtgtcgccaaattttcaaggcaaacaccactgctgcaagctccaagtcatgagttggatagcgctgctcataatctttcaattgtcatgaagcataagctatgactttatctgcatgcattaacacacagcccaaaccctgccttgatgcatcgcaatacaccacaaatttctcttgatcaaacggcaaggctaaaacaggagctgtaattagttgttgtttcaactcttgaaagcttttctcacacttatttgtccatataaaccgccggttctttctagttaactcagataacggcattgaaatcttggaaaaaccttccacaaaacgtcgatagtaacccgctaaaccgagaaaacttcgaatttcagtaactgtttttggtctagggcaattcttcgctgcttcaatcttctctgggtctaccataatcccgtcttttccgaaattatgccctaggaatgatacctgtgacagccaaaattcacactttttgaacttcgcataaagtttatgatctctgagtccttgcagaaccatacgaagatgctgttcgtgttctgtttctgaccgagagtacacaagaatatcatcgataaatacaattacaaaattatcaagaaaatccttgaataccctattcatga

SEQ ID NO: 148698 - DNA, 564 bp, Cannabis sativa
aatataatttttattaaaatgtttataatgttcttattgtccacattctctactaataaataaaattaataataatctcgatgatttaatctattaagaaaaaaattgcatttctagaatgttattgtaacatttcatatttactttagacaaaactatatattttgaaaatgttataatttatattgctacattttttacatttcataataatcttgataattttaatctatttacaaaatggtataatatctattgtcacttctaacatttacaaaatttgatgaatataaaaattaatttgattaataattatgaatcccaactatgatggtcgagctctactaattacggctgagtcatataattacaatttttattaatctcaaccacatatagtcgagctcaactactctcagttgagccattttttaaaattttgattaataattataaatctcagccatatatagtcgagctccacgtatttcagtcaagcactatacttttaatctatactaatatcaaccacttatagtcgagctcaactaacgtcagttgagc

SEQ ID NO: 148699 - DNA, 594 bp, Cannabis sativa
aaacaattttaataatttgttattttatagtttgtggtgagttttatttaatgtttgttttttttatgaacttttattttaaagttatttgatgttattttatgaatgaacttttatgttattggtttttttttcaattttcgatttcaaaattgacaatacatcgacattgcatcgatatatcgtcgacactgttggtcaacttcatgtcgacatactatcgataaaatgtcgatagtatgttaatttgtttttcatcgaaattctatcgaaaagccgtcgacaacatgccgataatggtcatcactgacttttcttggtagaatatcaacatacaattgatattccatcgataaatcgtcgataacatctggaaaacctagattttgaaagaaaaccagatctgccagatctcaaccttttcagaccaaagaacaccagttccaacaaatacgacacatataacgaaagcaaactacataaagtctaaaaaatgcttaaaacacaagttacccattataatggtgtaagattctttagtgatattagggtgtgctccgattttccaccaacgcccaccgagaaacaaccatt

SEQ ID NO: 148700 - DNA, 576 bp, Cannabis sativa
  modified_base (461)..(465): a, c, t, g, unknown or other
aaatattttaaaattagtccaagtattaataagttaatatatttaattaaacatatgaaaattacaagttaacctaaaaaataagctagggaagaaaattttttatacagttcaacatcaatcgtccaagccttcgtgaattactgtcagcaatttttctatccactctcgctgtaacggtaacaattcagtttttacatcgtatgctttttttttctcaaactgtaaaaaagaagtaaatatttatattagtatatattattgtttattaatataatataaataagataattgataatgaaaacttacatctttttgaacgtttaaataacagttagggtttgtatctgcaacgatgtcactcatgtatttcaatacataaaaactacatttttagtaaatttaccaatcattgccaccgagcttccaataagctaatttagaatttaccaagtaaattnnnnnacttattaatttctccttgcaccaatatagatttagaattgcactctcaattatatagaatgttctatatgttccacgatataaatgcgctatgagattatccatttgtta

SEQ ID NO: 148701 - DNA, 734 bp, Cannabis sativa
gataatgagatcatcgacatatactagaacaatcacgatttttgcttcccttactttaatgaataagcttgaatctgcatgcaccatgaaatatatccactttctactaagaactctgcaatcttggcatactatgcccgtggagcttactttaatccataaagtgcctttttcaatttgcaaacatagtcaggatgtgctctatcctcaaatcctcttggttacaccatgtatatctctcgatctagttctgcatgtaaaaaagcattcttcacatccatctgccatagtctttactagctgcaagtgctaacaaaactcgcattgttgtaatcttagtaactggggtaaatgtctcgtcataatctaacccatactgttgagagaatccttgagctactaactgagccctgtaactttcaattgagccgtcaggataagtttttaccttatagacacaaaataaattttacttccttcggctttggcaccaactcccaagtctgattcttcgttagcgcacttatttattttttcatagctcctagccacttggagttttggtatgcctctttatatgattctttttttttgaacttttcttcttcagctatatcaacattagcacatttcagatttgatgactttcacactcttgttgatctttgaagttttggttggctatcatcatgtcctgctctttgatgcacccctgtttgccatggattctgagg

SEQ ID NO: 148702 - DNA, 1013 bp, Cannabis sativa
agccttcaacgtttgaagcctcttcgaccactggctcaccaccattcacagtgaagtctatttttttggagagtttctacactaaaacaccgctcatagcgcttgataaacttcggcacctatttgtcggggtagcctaaccaactgaatgactttgcttctccattggcaaaccaagctttatagatggcatcgaaacataagcaatcatagaaggtgacatcaagaagagactgatcctcaagagtagtcacttgctcttttaagacctgacatggtctctaagatcggcagctattgaagttcatccagtgcaagatgataagactcttcaagatatgaagtctattttgagcaactgccaagtttttcttcagactactatctcaatttttggcactattagccacttctcgaagactagtctgctcactctccagagaactgatgttctttttcaaagcaatcacttattcttctgcaacaataacatgatctactacaacctcgagcttctcaacaagcttaaccgcctttttgtgttcgttattcatggtgtaagcataacaaacacaagcctaaagataagaggacaatgtcaagtgatgttaagcaaatgaaagttaagctagaaggagacaagacaaaaaagttaccccaaggatgtcggtgaagcatcattgagcaataacattcggaggcttggtgctaaccaaattctgcaacaggatattctcaaccttggagccaatccagcctcaccatttgcaataagccaagagccctttgacttgtcaaggagttgagaatgaggttaatctggggcaaggtattgggctgtacacggtaatgggcctttctaatgtggaggagacaaatttaaataatggtccacttgtaagtgggagggaaagtgttgactccaccttcactttccaagcttctaagcccatcacaaaggcacttaaatccaaaagtcttgttcgaagggatactgttggagtggctgacgg

SEQ ID NO: 148703 - DNA, 945 bp, Cannabis sativa
  modified_base (515)..(528): a, c, t, g, unknown or other
agggcataaaacccaacaagtttcccttttggtctttctgttattttaaatacagtgttattcagcttgattaagtttgtatataaacacttgtatagttttaaacagttaatgagaaaagaattcttccaaaattcgtttctgttattcaacgcattgtaattaattataacctaatatatgcttaaaatcttgagcatcagcatgtttcattgtaattgataaacattattggaattttgtgtcctaaataaaatctatttcaatataattaagatttactaattaataaaagatcaaaattattttatgttgaatggtttacatgattatatgtttaaatgtataaattctatgaaatccagaacatataattattcatgattatagtgttgtttacagagtggaatataatcgtgattataagtttcaaagcttaagtcccatgatttgtctgtacactagatttatactgacatgataatcagcgataaagtttacttgcaccttggatnnnnnnnnnnnnnnttccagggtattggcaaagtatgctagtattagatgtatggagtatatattggactagactgatattgacattggataagatatcataaagttattgttatatctttcaaagtcaatattacttagttgatcttaggttaatagatcttaatcttgagatggttaggttcttgcataaatgtattattcatgttcattgatttgtttgttaaagctgaccaattggattggcccaattcttacatcttgagaacattgtagtacaattgagtgggagcactaattatagatatggaatctatatgtaatgacagtgtaagtaatttggattagaaaagacaattagcactaattattggttttatgaatttaatttatttgtgggtcctattgttagaaatgggaattagagttata

SEQ ID NO: 148704 - DNA, 1269 bp, Cannabis sativa
atatccagagtatgcgtccatgaacgacataagctcgtgtccagtagttgcatccactaattggtcaatcttgggtagtggaaagcaatcctttggacacgacttattcaaatttgaaaagtcaatactagttctccaatttccatttgattttgggacgagaacagggttggatagccacgagggataaaatgccttgcgtataaagtcattaaccaacaacttatccacttcctgcttgagtgccctttgtctctcggaatccaagggtcgtctcttctgtctcttggctgggtaatttgggtcgacattcaagtggtggtagataatcttagggtcaatccctatcatatctgcgtggctccaagcgaagtgatcctggtttgccttaaaaaaacttgttagtttctatttcaattgttcatccaggttcttcccaataaatacacactttgtgggatttcctggatttagaacaaccacttccaattcctcaataggtttcaataaattcctttcatcttcaatctgaggatcaagatcctcactctttttctcaccttcttcagttacgactgccattagctggtgaccgaccattctattctgcagccctatgcggtagcatttgcgagccagcatttggtcacctcgcactactcccacacctatcggtgtttgaaacttctgggataattaattgaactaattgcccctagtccaattaacactggtcgacccagcaatttgttgtaagccgacaacaagtcgacaactaaaaagtcttgcattattgtggtggataaaggtgctttgcccactattaatgggagctcaattattccttgactggcaacgttgtcacctgtaaatccacacagatttaccatgcaaggttttaatttggctttttcaagtcccattttcttcagtgtatccttataaaggatattcactgaactttcgttgtccactagcaccctttttatccttttgttggcgagctggatagtaattactagtgggccgatgtgaggatatctcacgtgtttttcatctatctctgagaatacaatcggaggttcctcagtcttagctttcttaaaaggttctggagcaaaagcagactgctcgttcttcacttcctttacatatctcttttgggcattattactttcccctagaatatgtagccttcccaagataaccagaatatcctctccttgtagaggaggaggttgtaatccttggttgcctgggttattaggc

SEQ ID NO: 148705 - DNA, 533 bp, Cannabis sativa
ccctcactaacataaagcagcagccgggcgagacgcttaaggcctacttaagccgttttagcacagttgctgcaatggttaaaaacttggacgatagtacccagctcactactcttcaggcagagatcacaactgatctttccactgctggaggcgagctatgggatgacctgcagggtcccccagtgaaaaacatcagcgagttcaatgaaagagctcaagtgtttgttcgaaaagaggaagcaagaaaagagatgaagtttttaaagaccggctcaggaagtaaacccaacactgtctcgacaagcaccgtcttgaccaaggctgacaacccagaagcctctagttcaaagaggaaagataactctaaggagtcagctaaggacaagaaaaaacaaaagaagcacgacaaatacgtgctaatctacactatttacactgagcctaatgaaactcgggaaaagatctatctcgtacatgagcatcgggtcgcattccgtaaacctgagccataaggcatgcaagacataaga

SEQ ID NO: 148706 - DNA, 621 bp, Cannabis sativa
aaaaaaaaaaagtaaaacatgtatattgatggccataatggtgagagagagtgatggaattattgagattggttgatgatagaaagtgaagaaagttttaaagttatattaagattagagtttatatagaatgatgattcatgattacgtgtagggttagttagctaggtagatttattaatattattattaattaattttaaaaaaaattactattagaattttattagtggtttcggtacacagattagatatacgtatattttttaaattttattatttaatgttggtaaataaatttttttgattgtatgtgtaaatattttttaatccattattaaatttataattcaataaaaaattaaaaaaaaagagaattaagaagaaaaaaagaaagataactttaaagcatttttagacagccacgtcaccgtctcataattcttctttatttattttatataaagtgtcgctatataacaaaattcttggtttaacgatgctttttgaatttctacgttaactttaacaaaatatcctattaattacaagaatttattaattttataatattattatatatattaaaaaataaaaattatatagatattttataaaaaa

SEQ ID NO: 148707 - DNA, 510 bp, Cannabis sativa
ggtactcaattgtcccatttatgtattgagattttatgccctaaataaaatccaattttattaaaatcttatttactttcaataaagatcagaaaatatatcttgatttgtcatatgctttgttcacatattttatacatgattataggtttaatgtataagttctattaaatcctgaacatatagttattcacaattgtagtgatgtcatcacaatggaaagtagttgtgattatatgcttcaaactatttagtctcatgatttatcagtgcactttacactgacgtgataattagtgttaaagttttcttacacatgtataaggggaatgtcctttttagggcattagcaaagtatactagcatcgaatgtattggctatacttagaccggaccgattgacagtaaaaatgtaacgccctgactctcagggacgccacgtgtgtgcttttataaacttattattattactaatctataaatttttagaaaaagtgtggtttaattaaa

SEQ ID NO: 148708 - DNA, 778 bp, Cannabis sativa
  modified_base (353)..(357): a, c, t, g, unknown or other
  modified_base (720)..(720): a, c, t, g, unknown or other
aggttgatggatcgtcatcaatactgtcaccaatgaccatattaatttcaccatccaagccataacgagatggttttttagaaaccctcccactacgacgaggagcctagaacttctaaatatgaacattagtggtagttttttcggttgtattaatttgcattggttcaatcaagggagtgggatcatcctctatttgagtagaaaaagatggaacattactcagaattatatttgaaagcattttctctaatacaactttgctttgtggcttgaagtttttaatattttcttcaaggaatgtggcatttgtagaaacaaacattttattatccttgtgactataaaatagnnnnnccctagtctctttagaattgcctagaaatatgcaaatctcagttcacgcttctagcttgccttctttctttcttaagacatgagtagggcacccccagattttgtaatagcgtaaactaggtatacaaccattccataattctacagttgtctcggaaactgatttagatggaacaacattgaaaatatcatttgccatctgaatagcatatccctagaaggacgttgacagagttgagtagttgagcatagacctaaccatttctaaaagtgtgcaatttcttctatttgaaactccattttgttgtggagtgcctgaggccgaatattgggattcgattccaagttcaattaaatgatctntgaactgcatatccatatattctctacccctattagtttgcaagatctttaatgtttt

SEQ ID NO: 148709 - DNA, 890 bp, Cannabis sativa
  modified_base (542)..(542): a, c, t, g, unknown or other
  modified_base (835)..(841): a, c, t, g, unknown or other
aatttgagtgttaagacctttcgtccacgtgtccctgtttggttggtccacgtatattgggcaaaatcaggggcaacatatatatatataaggtgtcttattattcaactaaatatcatatattaataaatcaatatagttttaattatttaaatataattttaattatttaaattaaattaaaataaagcattataaaaaaaaatgatttttatatgaaaaaacaattaaatgttttttttttattttaaacttaataaagattgaaaaatgcaaaaaatatatatattctgcatttactttaaaaaaagttgtaatggctaagattaaattcaccaatcacccacatagaaaataaataaaatactttttatatgaaaaaataattaaagggctttttataattattttaaatttgacaaatattgaaagtataaaaatatattttgtacctttttcaaaaaaaaaaaaaattgaaacaaattaggtaaaataaaaactcgagtaagaaattaatcaatcacccataaaaaaataatatnttttagacaaaggaaagtaatgtaataagaatattatttataacctacataaacctaaagagtttttaaacaatgtgggacttttagtttgtttgtgtggtttagttttcaaacaaaataagaaaatgtgttaaaaattaggaaaataggaagaaaaatttataaaatgacacataaactcttcttgtgctttcctttatatatataggggcataagtactcaaagttttctgtttgtaagcggcttaaacccaatgtttatttttagtggtataagtacccaatgtttgtannnnnnnaattttcttccagttttgtcagtacagactctgctttgaatttattaaa

SEQ ID NO: 148710 - DNA, 1141 bp, Cannabis sativa
agtataaaagttattttgggcgtgtaacagtataaaagaaagaaaatgagaaaacacagtaaactgtgtaaatttccctaattataaccaatattcaaattttttattttcttactttttatattgtggggagaattttttttcaaaattactgtatttttttaaaaaaaatactgtgtactgtgttaagttttcagtgttgttctactgtagtttttttagttattccattgttgtttttagttgttatattttatgttctactattgttttataaaaacacaatatttttaaaataattttcatgtgacaatatttttataaaaattaacctaaatttcagtatttttataaatttcccttatagttcgatatagttcaattttttttccatactactttttccatttttttcttctttttttattgttacttggcaatgttttctattatactgttttttttttttattattattattgtaacttgcatgtagtgtcttgacttgaacatctattgaataatttttatttttttaagtgtaataaatgcataatgtgactttgtattgtcacattagtgacaattttttttattattattttcttttaactaaaattgtattatattttagaaataatataaatttgtgatttgattttgatacatttttttttcttttttttttttaatttttctttaatgaaaattgatgatgaaaaatttgatatcctaaatattaataccctttgatttcactttaatctcacttccccattattctctcttcctattcatcatcatcatcttcttcttcttcttcttcttttcactctttgtttcctcatgttctttctatctttatccattacattaacatataagtttttttttccttgttcagttcttcttcttcttcatatttttttttttatttttttatttagtttttgaaatttttagtcacgtttttggaagagataagagttagtgtggtttttttattctgattttttagaactgagcttgcaaatatagcctctattgcatctagtgttgatactgtgcagaaaataattagtttttttaatcattttttttatttgttttagtgttgttttacggttattttctataattt

SEQ ID NO: 148711 - DNA, 524 bp, Cannabis sativa
ttgaaaattggaaaaatcagatttatgggaaaaatcccatgaaaatcgcaaaattggtggtggctgctaggacaggctgcatgcagaagcgtaggaggctgcaaaatgcctgatgcgcgcgcgggagagggagtgacgccgagaaatctcggcgcctgcagggtcactctcggcagacgtgcagggtcctcgtgggcgtgtgaccgtgtttagacacggcttatctgagtgtacgcgcacgtaatcccatgttgtccgagtgcctggtgcacatcgatgcacccactcgacagctatggcactcaattttcaaaaattcatagctttctcaatttttatcggaatcgagttccttaaaaacaaaaattgcttaattttcacaaggaatccaaataaaatactttcaaaaataataaaaaaaatatttttcatggaaaaatattctgtacaacacatacattcattaaataacatataccactttaagccatccaaatcatcacataacatcgttttaattcata

SEQ ID NO: 148712 - DNA, 509 bp, Cannabis sativa
taataacagaataaaactcttaacaataccctaaaaatatgcaacaataaattacaataactacacaagaataatactaaaaatagaatgattttcctacactcccatcaagctagactaaaaatattctccatagccaacttgccaattagataatcaaactattttttacataatccttttgtaaagatatctgccacttattgttcggtaaggacataaggcatacaaatttgaccaccctcaattttctccttaataaagtgcttgtccacttcaacgtactttgtgcgatcatgaagcactgattatgggcaatttccattgctgccttgttgtcacagtacaacttcatgggagttgactgtgatgacttcagtccttcaagcaatcattttatcgaaatcatttcacagataccatgagcaacatccctgaattcagcttcagcactgcttctagctaccacagtttgtttcttgcttctattagaaatattttactaggat

SEQ ID NO: 148713 - DNA, 1204 bp, Cannabis sativa
tgatctgatccatatctttctcgaccgatatcgaaaagattatcctgtaaaaaaaaactttattagttaatattttacataattaactagaagcaatttaactctaaaaataattcacctttactctagacaatatcatcttcttcacagagtcaggtacttgtgcccaacttgtgtagtttggatccgtgtgctgtcatatgagcaatcctaactcccttgaaaaatctaaactgtacagacctacctccttgtatgtctttcctttgatgtcccactcgataggcagtggacgtttgaggttttctcgcttttctcgtgtgcttaatcccttatggtgtccacgtttctttggaggagctgctgtcatgtttaaatattaataagttagtatattcacataaatattaataacataagttaaatattttaaattatataacctcgcacacactcagctccaatatttgtcgcaccaagaggaggatcacttcctccatcacccccgtgagaatgagcaacatccgtatatctgagaaatataaatattagaaacattataataatattaatgtcataatgtaataaagtactaattaacaatatatataatatatgtaataaattaccacttattcatcactataataatcatcatcattataaatttcttctaaattatcaattttagcattgttttcattgtcatcttcatcttcctcctctacttcttttttgtcttcctccactacttcttccatctcttcatcatctacttcatctatgtcttcctcttccacttcatccatgtcatcctcatcgggtggattattatcgatatccacaaactctgttggagcccctatacgttgaaagttgatttccagtaatggaccaagatcagcaagcaattggaaaccatttgaagttgtatcatgcataacatccacttcaatatcctccaaatgttctacatttgcggaatatcccacacatttcgatgatgaacttggttagcctgatttgccaaaataaatttatcatctttgaacccttcaaaactagtgttaatactaataatgttatgttcagacttcaatcttcctgagggttgactagtgtcaaaccatttacacttaaataatacaacagaacatccaccaagatatgacatcacaataacttcttccaattggccataata

SEQ ID NO: 148714 - DNA, 1752 bp, Cannabis sativa
ttggacttcttttggcttagtcggtgatcgcatttctactaatgctttgatcttcgtaggggttgcctctattcctcgctgattaaccataaattcgaggaatttccctgaattgactccaaagacacacttaagaggatttagtcgcattttatatcgtcgcagtatttccaacattgcttgtaaatggttgacatggtcttctgcatgttgagattttacgagcatatgtcaacatacacttccatggtgtctccaatcaaatctgcgaacatcatatttactagcctatgatatgtcccacctgcgtttatcaaaccaaagggcattaccttataacaatacaaaccttgatctgtaatgaacgaggtatcttcctgatctggttcatacatcgggattcgattatatcccgagtatgcatccatgaagctgagaagctcatgacctgcagtggcatcgacaagttggtcaatgctaggaagtgggaagctgtctttgggacaagctttatttaaattagtgaaatcaacgcatgtgcgccatgagccgttaggcttgggcacgagtatgagatttgctaaccagtctaggtagaacgactctcgtatgaagccacatgccaagaggcggtccacttcttccttcagcgcttggtacctcacggggtccattttgcggtgcttctgtcggacatctcgtacttcggggtcaatgttcaatcgatgacacatgaactgcggagatattccgatcatatctgaatgtttccagacgaaaacatcaaagttttgtttgagaaatttcattagtttttctcgctgctgaaaagttagtttagaactaattttcaaaactttattattatctactggatcgataggtacctcaatggtgtcttccgcggcttgggcggttgcggcataatcgaggatccttggatccaaatctggttcgtctttatgaggcacttcttctattctaaagacaacctgacgaggaggtggtgcttctagcagatagatgacattgactgacttcttttcagtgagtttgaccgctgtgttgtagcattctcgcgagtgtgactggattcctcgcacaaaacctattccagcaggagtagggaaattcatcgtgcgatgatagattgacgtcacgatcttcatctcttttagaattggccgaccgatcacagcattgtatgctgagtattggtcgactactgcaaagtcagccatcgacttggctactacaggggcagttcctaaggtgatagggagcttgatcatccctttcaatgcaatcacgtcaccagtaaaactgtatatacccgacgttataggtcgcagattcttttcatgcaaccctatctgtttgaaggcttggaagttcaagagattcacagaacttctgttgtccacgagtatacggtggacgttatctccgccaatattggcaacgatgaccaatgtgtcataatgtgggtggtagacccatctcgcatcactttccatgaacgtgatgtcatcacattctctcttgaacaacttctttggtcgctcgctcaggttgttcacattggtgagtggtttttctttggcttctctggcatatcgctcctgggactttctggagtcacctgcaatatggggtccgtctatgatggtcaggatgttgcgaggagttctcgaaccactcgcattctggttttcttctttgtcatcagctcggggatgactttcctcattc

SEQ ID NO: 148715 - DNA, 694 bp, Cannabis sativa
atgtcatttatggatgcatattctggacataaccagataaaaatgtatgtcttggatcaagaacatacaagcttcataaccaacatgagacattgttataaggtcatgtcattcggactaaagaacgctggggcaacgtatcagcggctggtaaacaaaatgttcgcaaaccaaatagggcggatcatggaagcttacggcgatgatatgtttgtaaaatcaataaagagtagggatcataccttagacctcggagaatgctttaagatgttaaagaagtataacatgaagctaaacccaaaaataaaaatgatcctttggagtttcctcaggaaaatttttgcgattcatagttaacgcgaagggtattgaagcaaattccaaaaaaatcaaggcattaatagacatgccatcaccgacaaagcctaaggaaacaaaccctgacaggaagaatggatgcacttaacagattcattttaaagtcaactgataagtgtgtaccgttcttcaatgtattgcgaggcaacaaaatgttcgagtggacaaaagagtgtgaagaggtctttcagaacataaaaagacatctagcaacgcccctagttttggggaaacccataactgaagaaacgttgtttctctatttagccatctctaaagatgcgattagtgtagctatagtgcgagaagagggcaa

SEQ ID NO: 148716 - DNA, 512 bp, Cannabis sativa
tatatatatatatataaaactaagcattatggacttgtttggtactctatataagagtcgtattgtattaaataataaataatattatgtttggataaaacaatgtaatgtattaattattacgatcaatttttttaatacagtgtatgttgtattataatatttacgaaggatttggggtcaacatcaatctccgacccggacccgaattctgacccaggacctagacctggacctaagacccgggacccgagacccggacccgggacccagacccgggactcagacttggaacccggaacccagacccggactcggacctggacccaaacccgaatacggacctggacccgaacgcgaacccggacctggacacaaacccggaccaaggacccggacacaaaaccagacccgggacccgaactgtgacagttagtagtcccgtgatccgtaaagggaaacaccgggtaagctgtgcaatcccacaccgcctggggaaggtcaagtgggat

SEQ ID NO: 148717 - DNA, 848 bp, Cannabis sativa
gaattttccaatctaatccaatccccacaagtacggatattcgcactttgcggattgaattggattggatcagctattttatgaacacccctacttgagtctattttttccctctcaaaatctaaatttgtttaagtaaacataactttttttagtttaatttctagatttttgataaaataattttgtatttttattgaattttcaattattttttaagatatgagtttatcaatataaataagtttaatttttttttaaaaaaaacttaatttgtttaattatttattggattttcaataattttagtttgattttataaaatacgtatttataaataaaataaagtttgaaaatattttttaagaataattatttttttttaagtaaactcaacactttttaaataatttaatatttttattagattttttaaaaatttttattgattttctcagaattaatagaatattataactttaaaattatttttttaataaaaaaagagaaaattttgaattgatcaatgtttataaagtaaaaatactaacttttaaattgaacttaataaaaagaacataattatacaattattatattttaaaagaaatttttgtattttaaagagcaaaattaaatagtgtcaaaaattcaaaagaaaaaaaatactaattattcaattttatttcatttattttaacagtccaaatttggtcactgtttcctagtcataatatactcgtccaaatggtcaaaacgcattataatttatatatgatgatggcatttgcaaggggaaatttgaaattctatgcttaaaataccatttaatttttcccctaaatgca

SEQ ID NO: 148718 - DNA, 504 bp, Cannabis sativa
aataaaaatttattgtaattctcaattgttgtaaaaattgcgcaaagcgcggtaccattccctagtgattaatattaggcaataagagattagatcacctactatcactgtttaaaagaaaaaggttcattaagtcaaacattttacaaaacgaaacctcctatggttactattattcttgtaagtataattatcattatcatttaaaataatcttaatagctctttcacttacaatttcaactctgaactacacttgttagacaacaaaatacaaccacaaaaaaactagaagacacaggatggaacccattgttagactataatagaatatgaatataaagcatatataaacgatatgtaatgcggaataaactgtaaacatatcaaaattatatatgtaacgaaaggatcgaaaacctccagccattgatgtttgagcttcaatccctgtgatagcttcggtatgggtattcaaacatcctcactctttcaactctcttta

SEQ ID NO: 148719 - DNA, 908 bp, Cannabis sativa
gcttaggtcggctagtgaaaggacttgtaacattttgtaaatggtttttgggatcccaaaacttgtcacttttgattgtaaggtttaatgctattacaagttttatttttattctgttttagtttaaagtttaaatttcttgcgcttttcttcttagttatcccgcattagaggattagggttttcataactagttgtcgtgacgtgcctaattgttagggagttacagtttggtatcagagcgccaaggtttttaaagttcctgtagatcgactgaacatgtacaatcatcgtcagagacaatctgaactcgtggtccagtaagtgttgagagtaaatgctttactgcttatgtgatcattcatttaccactttccattttaggcattatttgagcatctagtgtatttatgtgatatatgatgccatgcttagaatgttatatgataaatgtttatttaattggaatgaatagttgagttagggcttaaggcaataagtgcataagtgtggtattggggcttaactcgctggggttgttgattacaagggtacttgtaaaaaatggatcctcctccgtaatatcatctatctagacagaccacagggcgagcaagtagagcctagtgcggaccaaatcgatccactggcactgcctgcgcccactgcctgcgcctctccagaatctgggggataatgcgggggttggcaatgctaatctacctactgactggcagcagatgttccaagaaatgcgaggtaccatacttcgtcaagaggaacagttgcatcagttgagggaaccggcaccgactgcccctattgagcaagcgttaccaccagcacctgtgccagtggtgggtaactaggggttcatgttgccacatagagattctgtgtttgaacgg

SEQ ID NO: 148720 - DNA, 739 bp, Cannabis sativa
taaggagagttacaagaagaacacacatgtgcggttccaataagatttggagatcaacgacaagaaactgcaaagttaatattagatttcataaaaccaaagtttttgaacctgaaaacaaagtgcagtcctgcagatataaatagagaaatgaaagacaaatgtagaataatgatgaattacatgaaagcatgagtagtaaagagcgagcacgaagccagctatatagaaatgctaaagaattatacaatctcttgccaagatagctgtacatgctacaaaaaataaatccaggtactaggaaaatagtttttcaaatatatttgttaaactagaaacgttgtttttgtgttgctaattggttgaataacagttgctaattattattgttaccaataaatgactgcttaaattacaggaacaataatttacatagagaaataaaaagatgatagtttccaatatccgtttgttgcattaaatgctgctattaaaggtttgccgaattggcaagccaatcatggttgttgacgacacattcctaaaggccgcgtatggaggcacgttgctcaatgccaacacacaagatgcagaattaaaaatatttccacttgcatactgtattattgattctgagaatgataaagcctgggagtggttcttcaaaaaaataaaagaagcattcgaggttcgagaagatcaatgcctaatctctgacaaacatgaaagcatcatcaaa

SEQ ID NO: 148721 - DNA, 532 bp, Cannabis sativa
  modified_base (428)..(444): a, c, t, g, unknown or other
  modified_base (487)..(492): a, c, t, g, unknown or other
tgttctcttgcattactctctatttaatttgttttcttctttgaatttggtatagtgaaaacaaggcaatccaattctttggtgtttttgactgaaaatagtagtaatgatggtttgaactttgatgattaacaaaggaatccaactctgatctctctctgtgtatttctctcagatttatgtatatctcatcttgccttgctttcacttttttgtttttgatttctgaaatttttaattgatttcctccacttctcagaacatagatcgatgaggcttttcaacaaattcgattgctctctgatgtatggatagtatatctcgaagagtaattaaatttaggtgcgatatttgattttgaagtttaggttactgttttccctctatgtatgcatacctcgaccaattaactaaggtggcgtttggtnnnnnnnnnnnnnnnnnttttttatttttaaaagtagaaaagtgaaaatattttttaaannnnnnttctataaaaccgtttttacttttcaattttataattaga

SEQ ID NO: 148722 - DNA, 524 bp, Cannabis sativa
ttatttcttagtgggatatataatatatattggagtaaataaaataatatcggggttatggtttttgaccatttttcccctaggtgggaaataagctagaaattaacatttagggtattttagtcttttgcttaggttagtggtttggtggctgccctttttggtgacacctagcttgtcaattcagtaaggaaattaatttttccttaatcctttatgcattagacaaaaaaaataaaaagaagaaaagtaagaaaaccaaaggaagttcattctctcttccttctctttccctcttcgaaccagctaggaaccaaggaattgctgctggtttttggtgtttgcaacaaggattcaaggttttgcaagtgagggcatcctttcagcacgagactctccgttaaggtcgaccaattcattttaatctggaacggaggtaagaattgtatataatgtgtgatatggatatgcgaatgtatgtatatatttagtatatatgtatgcttatatgttgtgattcatac

SEQ ID NO: 148723 - DNA, 708 bp, Cannabis sativa
agctcagggtctttttttttttaccattttggaaaatacaaagtccattttgtcatttaacaaaacagagggtccaattagtaacttttacaaaacacaaggtccaaaaatagtatttacccatttttatataaatgataaatagcggcgtaaatacccaaagttttaagtttgtaagtagagactcagttttaaatttattaaagtaacatttaaaattaactgatactacatgtttctgtctagacccaatgatttagaatctaaatcttatgtgtagcctatttaagaaaataatagagtttgtactcacaaaattaaagaataattatagttttataaacattgtgtactcgtgttgatatttacccttttatatatttgaatttccatacttacaataccttataatttttttccttaaatgcataattattaaaattggtcatatatgaccattttactaatttctcaaaactacccctaatatttcaaatcctaatctcagcctctctcttcctctctctcggtgagcctcctcaacccacaaaaacctgaagttgtgctcatggtgacggcacacggcgcaggcaacttcgacccaactcatcgacgacgagcccacccatggtgacccagccaatcgacgatgagcccacccacgccgaaccgaaaccatgttcttcattttttattttttttgttttt

SEQ ID NO: 148724 - DNA, 858 bp, Cannabis sativa
gagctacctatctcaatgtgtgaaagccgtctctgagtaagttgaaactatgtaattgggagttatatagaggatactctaccaataaaaagggctaccattgaggtagtgtgacagcgtctcctatggttacaatctatcagaaaaaagtctttttgacaaattgggcaatgttccctgcttacactttcacacacttatgctaggcacagtttgtggtaaatgtttcatatattcaaaaatggtcttataaagctgatacatactgtttgatttgccattaatattcttggtgactgagtcaacatttttcatgtgtaactggtatgacttcattccactagttcattagcttgataaaataatttctgactattctcatgagtttgattttttcatcagggacaaagacaatcggatattctttactttttgttgacaaaactgtcaaggttatttttttgcttttcattttaaaaaaatcataaaaaataaaaatgtgtgaccgacattgtcaattgagctttgttaattttttttttaattttctttgttatgtttcactattttcttagatattattgttgctctaaagttttgcttggtgctttaagttttttttgtgtggtgtcttttttcgtttttttttttacaaaataaaaaaatacaaaaaaatgggcttattttgaaaaaggggggcgtattttttaatttttgggttgtttttcttttatttttttttcttttatggaacatgtttttattgcattttatttattgtgtttccttttacttttgttggggatttgcttttatttttttctgtggttttaggaaacttgtttttttttttttttt

SEQ ID NO: 148725 - DNA, 666 bp, Cannabis sativa
atgaactcaggtgagttttgggagaacagacatctgatcgaccaagacctgcttcaacttttgcacgaggatcatcctcgtcttcattctagcccacctttctctagtgacggacattctcgaaaccttgtacccagtcatagaatgatggcttgtacaaagaaaacaatgtgtctagctgacacatatgatcctcaagtggctcggcacaccacttttcccaccgtcgaacaagatccatccgtccagatggagggggatcatgaaggggacgttgaggtccaaaagatttaggagcaggacgatctacgtcctggcagttccttcgaggcggaggaagaggcagaggttgaacacccaaactacggggagtacaatgaggttggggagccagtcgatgctgacggagatgtcctggttgagggcatggactacgtcagtgaggaacttgccgctgcagttcctcatagaaggcaaggtgcctttggcgccaggtgggtaagccctccgtccagggttactgaggcgcatctttggactctcgaccagggcggttacctgggcaaactggattgctacattcccgcccacaacaatcgtgccacaaaccctttaaaggggatgtgcgcctggtcgggtgcccatggccagcaaggggcattgatg

SEQ ID NO: 148726 - DNA, 915 bp, Cannabis sativa
tcgacaatgttattttattgcttcctgtgtgataatatatgtctacatcatgttgacaattttgtcttgctaaataggtgtgatgatattattggaatatcgataggttgtcaataggatgtcgatattttttcgacaaaattatgtaattgtttattgtttaataatgtcgacagaatatcgacatgatgtcgaccattttataattttttgatagtaatattgctttgttatttatttttttagatggctcccagactcataattctagcatccgagcattttactggtcgcgtgacatatagaggcactagaacttttacaaaaatcaagtctcggtttgtggagtacaatttgaataacacggtgaaagaaagccatttcagcaacttttggaatgtcgtatccctgacattctcctcggtgttatttcaccaactcatgttccacaagatgaaggttgatgttcaggaggagttgaaaatgcagttttacattggtcggaaggagcttagattcggagtggttgagtttgccctcattacaggcctggacttctcctcggggcctacagaagtagagaaggctgcgcaggttgctcgctcagggtcagaccgattgatcaacaaatatttcaaccggtctgatagtgtgaagatagaagcactccatgataggttcacaaactgtcagaacccagaagacttgtacaagcttggcttgtgcttgtttgttgaggcagtgcttctgggtcgcgaggctaacacattgattacgcctgacatacttagatatgtcgaagatctcgagttcttcttccggagtccttgggggaagcactcactcgccagacttatgcactctcttcaaaaggacatgttgaaacagaaagccaactacgagaagaagctgagt

SEQ ID NO: 148727 - DNA, 534 bp, Cannabis sativa
atatctaaatattatattttagtcacaactaattttttgtttgactaaaagttacattaattaatcacaaaaaaattatgttgtgactaaaaggttgtcactgaaggtcggctcttttgtagtgacatgtgaaaactacatcatttctgaggttgttaagagaattttcatttttatggtttttaaggtataagttttaaaaattaagagtttttttcaaaaaaattattttattggaaaattttagaaaagaattaagaaaaatatagggaaaatagtataagctaaatggtttccccctttggtaactggttacccttttgaatttgtttcataaaataattttttttttttttttaaaaaaaaaacatatttttatacacagtatgaaaacccatagaatttgtaatttcttctaatttatcaaaaggataattgcataaggcactattttttgtaaaaaaaaaaatacatttttacatttaattttttttatatatttttacgattttccatagaaacaacacaaaaaca

SEQ ID NO: 148728 - DNA, 752 bp, Cannabis sativa
  modified_base (368)..(368): a, c, t, g, unknown or other
  modified_base (485)..(487): a, c, t, g, unknown or other
actcagtaagaaaagcataatataataaaacatactaaatcccgggttataaccaagcgcccatacacctgaccataatcctaacttaatcagggatgtccatgacaacgttttattaaccgcgaatccagcctatactcggtaatctagtcgtaccgatgtggtagtagttaatccatactaactgatagcctaacatatatctgttggtatcttggtgcaactctatgtacacctcactgttgccctaatatgctaatctgacggctatataaaatttgccgaacatatatctaatattttaatctgatggcaactcacatatacgctaaacatgtataagcatatgcataacattatactaatcntaccttgattccgaattcaggtgtactggtcaacctgagtggaatgaacagctcggcgatttacaggctcctaagtcataataaccacaacactaataagtgacacgctaaatcacnnnccggggacttaaactcgaaactagttgtttccctctcgataaaaagcatggcaataccctaaacaacacaaaaatgggaagaactagggttcccaaaattgccccaaccagtagaccggttcctcaaccggaattacggttttgggaaaaaatcttggaagccaaccggtcgaccggttcttactggcctccctgaaccggaattccggttcagtgcaggaatttttcaaaattccataaatcgaccaaatcaaccccaaacaaa

SEQ ID NO: 148729 - DNA, 702 bp, Cannabis sativa
acactcatctttggtcttaagtaagtaggtccaaacacatctattgaaatcatcaataatagataggaagtagagtttaccagaatgtgttgggattttacttggcccccaaaggtcagcatgcacatactctaggactgccttcgtgttgtgaatcactgcagtaaacttgatcttgtgttgcttgccataaacacaagtctcacagaatggtaatgcacatgtctaaagccttttaatgactcctctcttgtgcaatttcctcatgccttgttcactcatatgtccgagcctttgattccatagctgcatatcactttctaaaccttttactgtattcacctcagccacaagtacagtttcaccctcgagtacattacaatccatgtactctctttcctttcatcacaagcattgaaccttttataaaccttaggctcccatttaaggacttatagccataaccttcatctttcaaggttccaagtgatattagattccttctcaattctggaatgtgcctcacattatgtagaattttcactttatcattaaactgcctcatagccaccttaccaattccaaaaaccctgcaagaaacatcattacccattagtactcaactaccattattagtttcttgataattaaagaaagattctaagttgggacacatatgataagtgcatcctgaatcaagga

SEQ ID NO: 148730 - DNA, 984 bp, Cannabis sativa
aagaaagaggcgcacctctactgcgcatctggtggctcaagtcaaaacaagaggttctagggaaccagggacaaggcaatcgtcagggtagttctgaaacctgatacacttacctagaatgccccagttgtaaaaagaatcacctgggagagtgtagagggcaagattgtttctagtgtggtatgccaaggcactataaagggactgcccacaacttaagaaataagaacagaagactttagcaaaacctgctctagctagggtatttgctctaactcaggcagatgcagaagctagcccctcagttttaacaggttagttatcggtcaacaactcttacttctttgtgttatttgattccggggccactcgttcctatgtggcagccagaatttttagtaaattgggtagacctcatgatagttatgatacagggtttggaaccctattgcctagcggagcattagtgatctccaaaaggtggattaggtctatgctgattagaattgaggatatggagttgagtgctgacttaattgaaatgggttttggcagatttggatattatacttggaatggatttcttatccaagtactcagccagtatcgactataaacgaaagatggtaatcttccaacttgagggtgaggaaccgtttgtttttgtcgaatcagttcagggtcttggatcccagtgatttcagtactaacagctagagaatttttttgacatggaggtatagggttttggtggccgtggtgtggtatggtattggataccacacagcctgagtcaattcagccataagacatcagggttttttgagaatttttagatgtttttcctaataaactttcgagtttaccaccacatagagaaattaattttattattgatttggcacctcaagcagaaccaatttctaaggccccttacaaaatggctccagcagaacttatagaattgaaaattcagcttcaggg

SEQ ID NO: 148731 - DNA, 517 bp, Cannabis sativa
caaaatgttgacctcgcttttagccaatgacagtgagtctaaattgtaaacaataaatagtataatatgagtgtgatataataaatcaaataaagacacaagaattttatagagatttagccctgggcagttcggtaatggcctaatcctcttagattgtattgacttaagaataaggaaaatggttccttttcatagagctcttataatagtatctctgaatatgaattcttagataagtttttcgaccctttaccaagtgagcatgaatcactatttatagggctataagcttgccatatctttgtgatctgatcccaaagttataggaatttcttcggtgactcacgatgcgaaagctgaattcgctaagtgttggcatgttgcgcggattgctcactgcgcggctaagagggctccgtccgagcgaatgtatgtggtgccctgttcggcatatttcttgcgagcaggtacatggagttgattccacgtgtcaccatcgtgtgatgtcacgtca

SEQ ID NO: 148732 - DNA, 1114 bp, Cannabis sativa
gtgtcgcggccccatgtggggagtgtcgcggcccgcccttcgtttttgggcagattcgaatgcgttattcgaatcctcatcactttgtgatccggactctattttaggagttctatatattgttagaaagctcattctgagctctatgtgaagatctgtgttttgaatgccaagtttatattatgtgaaagtggaattagggattaaccctatatttataaatcctagaatttatgagtaggattatcgacacttggtcaggagcacccagagatttggaatctccacaattgcgggacatcaggtaggacagtagttgcacatagagttatgcgcagtggcgcttatattggaaatgatatatgtgattaaatggaaattggaattagggttattaccctaacatgagcggtataatggcctagggttattaccctagtgaattattgttatgtaattgttatgccatgagattgcaatgtatgtaaatattcaaggattgtgcgttcaaggcataatcaggttggactcggtaaccataaccgagatgaactattctaaggccttattgtaaatagacatgtgagcgtaatacgtagatctatgccatatagacataaataggcatgtgagcgcaacatgcatgtctgtgtcatacagacaaatgtgaaatggcattattacttatatgatatattaagtatgattattgatattttatactatcttgctgggctgggctcacgggtgctctactgtgcaggaaagggtaaatctctctctggtcagccatgagtgcgagaactggacgatatatgtacatgttcgggccacactagatcaagcgagttgggtgtctaccagtgatgaacttttgtaactctattttgtcgcttaggctggctagtgggaagacttgtaatgttttgtaaaatatattttgggatcccaaaacatgcaaccattgtttttaatgttaaaattgttacaagtttattttcattctatttttgtttaaatttaatttccggcgcttattttactagtaatcctgtctaggggattagggtttcttaatcatcttgggtagcgtgcctaatagttagggcattac

SEQ ID NO: 148733 - DNA, 931 bp, Cannabis sativa
  modified_base (534)..(534): a, c, t, g, unknown or other
ttgttaggctattttaaagactaatcatgcatttagagtcatttagaaggatgttagtatattttggtagaaaatagtagaagtcaacgagctcggttttacaaggcgaaacttaattgtaaattttgacaaccatagaaacagaattggacttagaggtcagcatgaaatttgtagatctcgttcttaactttttggaacatcttgaatcgtccaattttaagttaaatggaagaagttatgaccaaaatactaatctgaacatgtggtagaaatttttttggcaacaagttgtcgttgcggcaaggggattcgtggttgcaacgggagcacgaattctgccagattttgaattactatctttttttaaaactaagatatttttaggggtatttataggactcttagaattcatttttagcaacttttaagctacaaaattgagagagaaacttagagaaagagcaaggaagagatggagatcgcggtttcgaagtgttcatcattatagttcttttcttctccttaaactcntactatttattatgattatcgttataatgtctagttctgagtagttttcttttagttaagggttatttcaaaactcgagacatgaattcttaattttattattgaatgttaatttctagtttccgttatatatcaaattgcttcttttcttctatgttcaatgtcatgattattatttttatcttgtttagacgatcactaaattagattttactttaatctaccgtcatcttatgattactattcacctaatagtctaggtttctaagtgtttgtgataaattgtaatttttaatattgttaaaggtatttttaattgtgatgaaaaataaaacttaggtaataaatgaattatatgctttattgatttattgcctatgtaaagtccttttttggc

SEQ ID NO: 148734 - DNA, 727 bp, Cannabis sativa
atttcttggccttcttggccggaggagatggaggagatgagcttaagctgcttaagcttcctccaactctcttcttcagagcatcgagcatcttctgagacatgtctacacggaacaaaaacaacatgggtagaggaaaaagacatcagaagcataaagcatgatagtcaagaagtttaaaaacaaggcggagtagcctgcaagacgattgtctgatcaagactcgaaagtccatcatcacctaacaagtctcttatctcctccataatagctttcccttttcctagcacgggagaaggtggtcgagcagatgaactgggctccctaatgcgaattgcatgatcaacgggcctgggctgggccagaagttttttcctccttttgagcggagtcacctgctcttcctcagcctcattttcaggattcaagggctcatgagcatactatttggcccttgcacctcctttcaacttagcttcacgcttaagttgaatgagttcatcgtcctgatgagctctctcagcccgttcagcaccagatttcttaatcctctccttcactggcttaggaatgaaatcctttggatagagcccgtacttcacaaagttgtcctcggagctcagttgaatgatattctggtcatcccctagcagttgagcaagcctttgagccctatctctaagagcaagagtgaagggagggcggtgatatgtggggatctgctgga

SEQ ID NO: 148735 - DNA, 613 bp, Cannabis sativa
tctaggtattatatttggttttatactctggatctggttttaaacttttaggatatttgacattaatcattataatatgttaatactgtatgtttgtatcagcatcagttttatgtttttctaatttttgaagtttttatatacagtcgcacaactatatagaaactattatacaactatatacaaacaatgtccactgttcagcgtacttgtaattttaattgcttatcaacctatttattcactgtttttcccttttttcattatctttattaattatgttttataaattcctatttgactttttaaaaactttaataaagaagttgtttttcgtagtaaacatttaacaagtgtcaaaactgtcataaaacgattttgcaactattagcaaactatttaaaaattttcaaaataatatcccaagtgtatcgaatataacatttcatcctgtgtgaattgtcccagagaattaaacaatattttattgcttgcttgttgcatgtctttcggttgtgctcgtgttgaccacatttgctgcacctgttatgtttttttgtatcccaatcagataaaaaccttcgtttccttggtcttccagatcttattttct

SEQ ID NO: 148736 - DNA, 509 bp, Cannabis sativa
tgttgaaaccacgtacaaaaaccttgtgtgtttttacttgtctgcactgtttgtttttttggtttcttctagagtagagttggttttcgtaactaagaaaaaactatttttcaataccagtttcattattccgcatttaattaatcattcaactaaataataaaactgggaatattaaaatatagaatttcaattggtatcagagcgggtcactaaattcttagtcacatctcgaatttatttcgtttaatttgttttgtgtgagatgtctttgtttgcagaaagaagctctatctcttgacaacctttgttaaatgaataaaactatccttattggaaggtcaggatgagagcatttattaaatcacaagatgagaaagcttggagagctatactaacaggttggacgcaacctacttaaagtgatgatgaaggtaatactaaggtaaaacctaaactcaattggactattgaagatgaaaaattgtctggttataataataaggctt

SEQ ID NO: 148737 - DNA, 709 bp, Cannabis sativa
  modified_base (319)..(320): a, c, t, g, unknown or other
tgcaaactcgtagaggcctgactgatccagcaaattcacagatggtggatcctgcattgcaaaacccaagaaacacaagtgttccgccagctgttaatccaggacagctagcgaacatggggaatggtgtaacaactcttatagattaaatcgtgcctggtgtgcaagagactatgaataatagttcctcacccaacaagggcactaataacacaaccgttccgcctggaaccaacacctagacgaccatcagagatgccactgagttacaaaatctccgtgacactctcggagtcatgcagggtcataacaatacccnncatcatgatcaggacgaactccgcgctgtagtaaatcttgcactcgaagaacaaaggcgtatgtttgcagaatggagggatagagagatggaatcattaagggctaccatgcagggatcaaaaatcgtagttgacaggctacggcgctgatacaaaaggcctacaaaattgtaggtcagcaaccgccgcacgtcattcccctgggtgagacggacgaagatccagcgatgaatacttctcagactgcaaatggttagccgccaaatccccggttacgagttccactcgggggccaagatgtaggcaggcagaccttgtctagtaattcatcaggagaagtcatacctgatggctccaaccagataaattgtgccattccacccgtcaac

SEQ ID NO: 148738 - DNA, 618 bp, Cannabis sativa
tgctgccaacaaaaccaccagcaaccgacctataaagctcggttgcatagaagctagccagcagcactagccgttaaaggaagaagcccaaccattgaatcccagccaactaaacagtttggtgagaaccaaactagacagcctgcaatcaaaaaaataggtgctgatgactctccaaacctattccacaaacaacacaacaagtattttcaacaacaatctgaaatctgctaagcatgtctctagtgagaaggttcgaatgaaccgcctgccaaagaatgaaaccatgcttcggaacattaaggctccaccaaatcactttggcagcagggtctataagttgattaaaggacgaattatagagtttaaacactctaaaagttcccccacaccagcagaatcgatgtcaggttgagtgtaatcaattctcagcctgcataacttcttctaataccagctagtgtctgctcttaagttgtatgaccagaagctggcacccttgagatacactgcattaacccatttcaccctcaacaagtcctttttgttcattatgtcccaaataaatctggcaagggaggctttattccaacgggagccatctttgaaaccaagacc

SEQ ID NO: 148739 - DNA, 614 bp, Cannabis sativa
acttgaaaagttctagaaattcagcactggttttaaatgatttccaatccaatagcttagtctggtctaataatatacttaaactgtcttcttctggttcattaagattgaagttgacctcctcctttttggttttaatatttatactttttgtctactattggcagattcgtgatgaatgcaaattcgttccttcaatgtgttggccacctcggtgttgtaaattgtgcctgtttttttttttccaagataaatacataaggcactaatttttgtaaaagaattacaattttacgtttaaagaattttgtttttacatttttatggtttttaatggaaacatcacaaaaataataagaaaattacataaaagtaacatgaatatgacatctaaataatattaaaacaacaacaaaaaaaaaataacatatagataataaaaaattaataacaatttaataagagtacaatataaaaagattaaattttttgtaaataaaattaaaaaatagtgaaaatgtttaaaattttttgaacctgtatttttataatttttttttttttgttttggttgtttttgtgtatttgtgagagaagaccctgttatttaaact

SEQ ID NO: 148740 - DNA, 530 bp, Cannabis sativa
ctttgctttattcttgtgatttttagcaagttgaaagtaattctagtagaggtaaaccttgttctagctccctttctttgtttcttggaattttttgaataatttgatggtttgcatgcttagtttaggttgatgttgttgctgtgattttgttgttgtttctgaggtttaatcttgttattttgagtagattagaggtagtttgatgtatgctaattgctttgtttcaagcttggaagtttttactcaaaaatgtggttttcaaagaaagaatgaggaatctgttgctaatgtttttgttgatgcttgctgttgatttttgcagtttctatatgcaagaatacgtaattttaatcaaggtttaatgcatgatagtgttgtttaatcaagtttgagtttggaactcaaagctcgatgctttaattgtgatttcggattgtttgcatgaagctcggttttgatgctttagaaatgttccttagggtctaaatagcaggtctggaaggttttgtttgaattggatttgattt

SEQ ID NO: 148741 - DNA, 572 bp, Cannabis sativa
taattaactagtatatcgaatctactcacacagcagtacagcagagaaaatccacctacaacacacactttcaagggttgaaagaacagacctgaacagcctcattggcagctgtctttgtccagagcgcaagtttgtcctgcctctggcgcacgcttgcgaccacaccacaaatctcatcagcctcatcaaattgctctccaatcaaagccatcaactgcccaatcaatcaatcaaatcaaacaaccctaagttacaaacttgcaccaagtaaccttttcataacaaaaaagagatgcacaagtacaatatctacacaaataaaagataaggagtggttaagatgattacagtttctaaccacatagtgtcaagggtagattttctactgctgataacagtccactttcctccattagcacattcaggatcttcccacttgggttcaaccccagctttgaacaaatggaaatctgcatgtgatgtcaacttgctaggcttgaatacctggtcatacaaactgcacagtccattgacaattcgacattaaagcagattcaacttttacagtt

SEQ ID NO: 148742 - DNA, 530 bp, Cannabis sativa
ttattagtaatcccaattgggggattaggatttagtaagtatcttgggtagcgtgactaattatttagggcattacaggttgccctgcagggagaatttttgtgttttttcaggtttcgtttttggtcccaggagttgcgtagtaactattttaggttgtttatggctgtctagcatattttggagttattgatggctaggttcctattcgatatcgaattagggtttcattccggaatttctatttaaggtattcattgagtttttgttgtcgtgacataggaccaggatcgcccaacttgttttccactcaggtcagcccacaagctttagttttgaactaaggtaaaaaaaagtggtaagcactgtatgtggctaaatgttaatggttgaatggttatggccttgattattatcaagactctgattaattgtaataccataagattaagaaaatggattatcaaactctaactagttaaatgtgtattattgtgaaattataatattatataatttattatatgtga

SEQ ID NO: 148743 - DNA, 663 bp, Cannabis sativa
  modified_base (321)..(326): a, c, t, g, unknown or other
aacattggggaactcctagataatcgaagctcgaaagatgaggaggaaggttgcacggtatatcgtagtagagggaattatgtagaaacgaggttctccatgccattgaagaagaagctgcacgacttttgtttgaagtacacgacggattttgtggaaatcacgctgccaggtagagtttatctaagaaaattctaaggcaaggctactttttgccaacaataatcgaggattcaatggcctatgttaaaaaatgtgacaaatgccagagattttcaaagatacctcgagcttcatccaacgagttaactcagatgcaannnnnntggccttttgccatttggggaattaacctgatcgaacaactacccaaaggcaaaggaggagtgtagtatgcagtggttgcggttgattacttcactaagtggatggaagccgaaccactggaaaccattacatctaaaaaagttcaagactttgttgtgaagaacataatctgtcggttcagatttccgtacaaaatagtttcggacaatagcaaatagttttacagccagtctttcactaatttttattcgcaccatggtatcatcaaaagtttctccacagtggcacatccttaacaaaatggtaaagtttaagcagtcaacaagaccttgaagg

SEQ ID NO: 148744 - DNA, 534 bp, Cannabis sativa
  modified_base (45)..(62): a, c, t, g, unknown or other
taaggcagattataactgcaattgtgtaaagaccgcttagctttnnnnnnnnnnnnnnnnnntaattagggtttaattatgaaaatcatttattggtgttgaattaataatttatgatcatttatttgaattacgaatgcatttttatgttacatatagaaatttcattattttgcatattttggtgtccgacaacattggaacgcggtgtatggctattagaatcacatcttagtatttttagtttaacgggacaatagtttagacattgggaatgtcaggaatagtcaggattttagaatttttccaaaatacacctaagtgccattttatgacttttagtgtgggaggggaaaaatggtcattttgccccatttgtcttttgtcttttgttagttgggatgtaaatttattaatcatatttttattacttttgtaagctgatttttaattcaaataaaaccaatttttattaatcattttacaaaaaaaaaaaagaagaaaggctttgaatcatgtttctgtagttagaat

SEQ ID NO: 148745 - DNA, 1001 bp, Cannabis sativa
aaaaaaaaaaaacaatttcatcaacaagatgatgaaaaaaaatataatctaaaaatgatactaactttaaaaatcaatttcatcatcatcaattgacagctaattatttcattaaaagaggcagaaaaaaaaaatcagtttcatcaataacataattaaaaatacacaatgcctaataaccaaactttaaaaataatactaacttttaaatctagtttcgaacatataaattttatatcaatacctaataattaaacttctaacttcattctcgaacatacaatatggagcaaaaataacaaagagaaccataaactaaaaccaaagaaaaaacaaaacaaagaaaattaaagagagataaaaatgcaatacaaaccataaaagaataacaaaaaaaataaataaaaacataagagggagagaaatcgtatataaaaaacaagaaaaatagaggtaggttaatattatatattctactaatcaaataataccccaatcaaatacaaaaccaactaaaactattagagttgaaggaaaagatagagaaataagaatcttaaaatgcaaatgcaaaataaactaaagaaaaagataaaatcaattgggttagaaataaaaacatgaaatatgagtttggatattagatttataaatagtagaaattaaactttatttgaaaagttataagagtttatatttttatggcataaataaataatgctaagggattatgggtttttttgtttttttaaatttatatgagttttttttatgctatatttttgtaaaaaaaaaaagattaatatctcatatttgtaagcaataataagttttgctggaaaagtcgtcggcactggaaaaggcaccgaaaagtcaccggtaccggggaagtcgctggaaaagtcaccgccgccggaaaagtcaccggaaaaatcatcgtcaccgaaaaaagtcactagaaaagtcacaagaagtagatatctcaaatataaacaaaaata

SEQ ID NO: 148746 - DNA, 981 bp, Cannabis sativa
gggcaaaatcaagggcaacaaatttcattgttttagagatattcctatttaggatgttaattcaacatacttgtcagtaaatctagatctttctaaaacattcccaacaattgccttagagccatagtaatgatttactttcatgtaatatgaatttaaaacaatgaatattatttactgtgttgatttagatgtgttcatgttggtttatgtggtatttgatgaatgtatgtgatttacgaaatttttcccttgaaaataattttatcttcgttctaaaaataattttattttcgttctgaaaatattttatttaaattccttgtgaaaaattaagtaatttttttatggaactcgattctaaaaaaattaagaaagttatgaaggtttgatttttttggtttcaatggtgtcgagaagggtgctcatgcgcaccaagtacccggacaagacaccttgtccgcacccgaagctcagataaaattgtgtctgaagctcgctgatgccgcatgttaggacatgatgcaccatgcagtctgcctgtgccacaccctgtaggtgaccgagttttcttggtcaagcaccttgcaacccctacgtctgcgcatgcatgaaagctgtgtgtagactgttgcaagccaatgggtgatttttcaccaaaaattcgattttttgggattttttcacccaattttagatttttccaattttcaaactctaatttaaaaaatattatttttaatatatatatatatataaacataaatatcaattttttcaaattaataatatttctttttaatagattattaatttctgatattttgatgtttaaatttaaaaattgattattgtatttttaaagtaatgtcagattttaaaaatttattaatttcattaatatttatatattatttaattataaggttagatattttaatattaagtatatcttaaattaaaagatagcattatcttttt

SEQ ID NO: 148747 - DNA, 561 bp, Cannabis sativa
ggctgatattgcttctttatctcgagaagtgacctgtcacaaagacaaaagacagggtctctggactcttcttcacaggttggaggaagagaagaaagctaaggaggaggagcttggggccgaggttgagaagcagaaatccgaggtggtgaggctcgaggagaaggtaaatgccttagagacagtaaatctcgagatattttatgacttttggaaggccaatcccaaggcaaactttgattatttgggcacttccaaagacatgtttctcaactactgcactgctcaggcagcctacaggaagcccgaggcaaccacttccacatcacctaccgatcataatattgaggctcttgttgcccagaatgatgatccttcggccctttcaaatccagctgacccttacaagcagcctagaactcctgttgttttagtgccttctttttatcatcttttttatctattcggccaataggcatttttttaagaaaaaatgaccgactaagaggtctttaaacttggaatatgtttttcattttttgaagaactggctgatcggcc

SEQ ID NO: 148748 - DNA, 643 bp, Cannabis sativa
ttaatatataatttaaaaatgaatatgcttctttttttaaaaaattataaattagtttttatgactaaatattagtcattggataattaatttaccaaattctttatttattattgccaactaaattatttagttacaaaatattacaccttccatgactatattttagttgttaaagtttacttttttggttgtggaaagtccatattggtatttatgcgaccaatttatcaatcttattgtgactaatttcaatatattttgtaactaaattttagtcacagaaaataacattattcgtgactaaatatattagtcaataaatttcttctacgaccgactttcaacgactaaatagtgactaaaaataattagtcgcaaaaaatttagggtgactaattaatgaattttaatgactaaaaaactagtcagcgaaaatgggtctttcttgtagattaggacccactattgggatgcatgttactaagaataacacacttacaataatacttatctttcgagattatacaacgtgaaattactaatgaacatcaatctattggggatgaatctcactaaaataagaactgtgtagaagcaacaatggagatcgaatatgcttataactaaagctcattatttt

SEQ ID NO: 148749 - DNA, 662 bp, Cannabis sativa
aggtaaatttgattaattgatgaataaaagaggtattttttaacttatcccatgaatatatgtatattccccatattggacttttgctaaaggcccatatccaaaatcattagtggtgtaagcgtccttccacatgcattgacctagcctaggcccaaaacaaaattttcccttttaaaattagggtttttacaaaaaatattagatttctaataaaagtttacaattttactattaaacacaatattttataaaaatactgttttttttagcctaggcccaaaacaaaattttcccttttaaaattaagatttttacaaaattactggatttcagataaaagtttataattttactgtcatacataattttttacaaaaatactgtcttttttattaaaccactgtaaaataataagggtaaataccattttggatactgtgttttgaaaaagttaccaattagatcttgtgttttgttaaatgacaaaatagactctgtatttttcaaaatggtaaaaataagttcttgggcttaatttttgacaagttttttcttaatataacaaacttgaagataattcctaatacggacagatacagaaaatgtaagcagttttgtcatagcacttttaaattgcattataattaaattttattttg

SEQ ID NO: 148750 - DNA, 538 bp, Cannabis sativa
  modified_base (42)..(42): a, c, t, g, unknown or other
acggttggggtttgcatgtgcgacgatgtcagtcatgtattncaaaatataaaaaccacattcttgatttttaggttgtcttggacaagtttctagtgaaattcctgaccacgacccaagatacgcatttgatgtccctatatattcgtatttctctgtttgaaaaattatattaagatttcaattcattcgtaattaaataatttgttacataaatagtaattaaattattacattttcaacattgcagtagtttgttcgggaacttggtggccatgtttagggtctaaatagataactttccttggcgcaacgacctctagcatccagtgcacactagaaaattatatatattgggttataggtaagatagtataaaaataattctaagttaaaatatagaaataaacaataagcacaaaaaattaactagtatttactcgatattccagggtataaagaacatttggtggttgttattcatcaatgataaccaagcagccaatcgtcttgctgcattgtcaaaagactgactctt

SEQ ID NO: 148751 - DNA, 911 bp, Cannabis sativa
  modified_base (850)..(867): a, c, t, g, unknown or other
aggaaactgcaaaaatccaagtgaggcccatttcaccctatggtcggccacatggtttcaacaatagcttccttgaatgtttttcgtgtgtttgatgttggggaggttgcacccctgttgcaaccgttaacattgttctgttttagtattttttttgtctgatgaagtttattttccagcaaaaaaaaaaaaagattttaatttgtgtttgttaaaatggaatgtaataataattaaatattattttttttaaaaaaatattaaatatagtggtattttttgtgtgtcactatatctctaaaaataataataaaaaattaaaaaaaaagaaaaaaaaaaaggatatagtgacacttttagcgtgtggttgttaccttttcaatcttataaaacctcactctatacgcatatagtgacgcgcaaaaagtgaatgtaaaaggattcagtgacacgtgtgaagtgttactaaaaactgtctttctagtcaccctcattagtgacgcgcgttgaagtcactactacaatatgggcctttagcttccctttttttaacccattttatagaaagggaagctaaagggtgtgaaaacacccacctgattcgaaattgagattcagaggcggttttttagtaaaaatcgtaggtatatatattaataaaccctatgtcgttggttggaaattgagaaattttaagggttttggtcaaaccctatctcatcagttcttagcaaagaaccgacatcatagatgcaaactttattgacacgtgtgcacctacgccgtcggttctttgctaggaactgacggcataaggctcaactaaaaacctgtaacaccctaactagcnnnnnnnnnnnnnnnnnnttttaaacgtactgtgcagctcgatgctaatcaacgaggtttat

SEQ ID NO: 148752 - DNA, 521 bp, Cannabis sativa
taaatcaatacatttcaaaataaaacatatatgacacttttataaaaaattcaagaataaccctcaacccaaccgaaccctcaaccccctcaccacatcgtactagctgacccagcccccttacccccactccgaccacgagacaaccccctcctccgacctcctccgaccgagacgactccgacggagacccacagccccgatccgaccgagacgactcccacggacacccactaaccgaacaaccttcaatctcaaacttcaacccacaacaccatcgaacccaacacacataacccatcggaccccaacccacataacccatcggaccccccacataacccatcgaaccccaacccacataacccatcggaccatccgaccccccacataacccatcggaccccaacccacataaccccacgagacgaccatcggatgccaacccacataacccatcggaccccatcggaccctacccaatgtaccccatcggaccatcggaccaataggaggtccga

SEQ ID NO: 148753 - DNA, 1811 bp, Cannabis sativa
agtcaaattcaactttttttaacatttttttatttttttgttgaattttttttttaatttttttttttcagctgatggaccaatctaagcccatataacgtaaaaatcagaaaattttctaattaaatagaaaaattaatcataaaaactcaaaattttctaatattacccatacataggtaatacccataattaagagtgcacccatatatatatatttatatatacatacacatacatatacatatacatatataacttgagtgagcaatttacaaaggaaatgttttcttttttgttattttattattattattttgagtcatcaaatcaagtctatatatttatctaatatatatttgaggcaacatccaattattttaggattctactttttttttattcatttctattttaagttgtgtttaatatacttataaaacattatacataacaatatagtataaataattatataatagaatctaaatataatccaattaatgaataagtaatcaatttttttgtagtaattaataatgatatctaataatagttaaataaagaaataagaaaaattaaggtgatggaatatgaaataaaagattattatatttttattgaaaaataataaacgattatggtttataatattttacttatttagtaaaaatattaacaactacttaaaatatgaattttctaaataaaaaatataaaaaataatcacaaatttaaatttatttttcaattattataatgattatgcgaaacacgatatgattataacaatcgcgcaattacataactaacttgatacggtacttattattttaattatcgcaaaatagtaagataaataaatattttattatggaaataattatatggatcattacttccctttttatcattacaatttaaggtataaatttcacatccatataatttattaaaattaattctcttatctaaacattttatataaaaatattctattactaatatttttatataaatctcgcagttttcaacttttaaaaaaaagaaaatgttatgacaaccccttttatagttgtcattctacattcactttgtagagaagacattctaatgataccataaaataaaatgtaaaaacttttataaataataattaaatacacacattaaaatattatattttagatatatcactcaatatcacatccggccctaatggtgtgcaagttgttccattgcacagggcccaaagatagaaagggcccaaattttttttaaaaaaatcagattcatcaatttaggttagttatttcggttacaaatattaatgtacgtcttatattaagatattaaattaagtaacacggaatataaaataaatgaagctaaaaaaatgtggttaaataatataaattaatttagttttgacaattagttgatcataaaaaaacaaatgtgtatatgacaaatatgtatagctaatatttgttaattgccaaattggatagttagtggtgagaatgtgatcaactttttttttagaaagaaattattatttcgctcaaggctctcaaattgtttgggccggccttgttagttttatactgtgtactgtattttttttttcaaaaatactgtgtaaattttatactgtgtaatgtattaagttttcacggttgttttttagaagttccactgttgttttaattattctgttttgttattttataaaaaaataatatttttgaaaaaaaatttgtatgacaataaaattataaatttttaccaaaatctaatatttttgtaaa

SEQ ID NO: 148754 - DNA, 529 bp, Cannabis sativa
  modified_base (42)..(58): a, c, t, g, unknown or other
aaaaaaatgtaaccataatggttataataaaaatgtaaccannnnnnnnnnnnnnnnntatatatatatatatatagattactaatatttttatttatctatgttgttaaatttatagaataagaacaatcacaagaacgcacttcatattattttttttgtagaattattttaacgatattaaggatttaaatgttcaatttattttattaatattttttcccaaaattatgtgaaaagttcaagaaaaaaaacttttgattttattgttgtctcaaattttttctcaattgtttaaatatataacatttctagaaaataattccgaaacacatataaatatataatctgaaaataaagttttgaaaaatacaaggaaaaagtcacaaattggtgactattttttttttttactttttgatgtttaatactattatgtttttgctctataaattacatttttacttgttctcttcatattctaattgggaaatttcaatttttgaccctaataatacaacctatatca

SEQ ID NO: 148755 - DNA, 514 bp, Cannabis sativa
ttgggtctatatggtagatagggggccatttagtagtgggtacgattttactgaacccaaccctccgccatttagtccaatagcttgagtttattttccaaagtcatactcgggcgtaatcattattatgtgatgtagcttagaacctagttaatagttactagtgataaaattaagtttatgtattgctacttgtctaaatatatgcatgtacattttagttaagttttattttatttatttatgtgactacctggcacacatttccttactgagtttagtagctcacccttatcaaattaccatgtgcagaccaaggtaactaaaagtctagaatgccggtggcgagtggaactttggatgcttgtgtgtgtgaactcgctgagggccatataactgcgggcggtctagggggctttgtttatttatttacgctattaaatttttgtcgcaattattttagttattatttattatgtcttttgtacgaaaactggccagttgtgaatatttt

SEQ ID NO: 148756 - DNA, 724 bp, Cannabis sativa
gtattattttacaatagagttgtaatgtatcttcatttttcttccattgtaatagattctctaaaaatcaaaagcttatctcttttcaatatggaagaggagataaatcaagatcgtgagaatacaaggataagagatttaatttttgtgaaaaccattcatgggtgagcatggtggtgtatattatgtgatttactattttatatgatagtaatatacatgatatatatatgatatttgattttatatttgcgctaatattttttagctttgaagacaatatttataattcccttcctttatttaattcatgcagccaagccaatttcaaagcttatgctgctgtacatgcagataaatcaaaagtagatgtgagtgacttgaagtgtgttatggatcttttatttttgatcttttatttagtgttctttagttaatcgagagtttggatttttcaggtccttggtagttttaaagagcaatttaagttgcttgtgaggaagagattgagaattgggcttcatatgaagttgagccttccccttcgaaggttggtgttagacggaaagggaagaagttaaaggagacattatatgctgagccaagaattgagatttgttatattattttataatataataaagtacagattaaactgtgataaatatatgtgaataatatatattaagtgtatggtaaataaatatgtaacatatgaatttaa

SEQ ID NO: 148757 - DNA, 611 bp, Cannabis sativa
cgtagaattagaacctccgtcccagagaagattgacctatgatcaagaggctaaccattctctcctagcagaatcacttgacaaaatcgaagaaaaacgagcttcagcgaacctaaagttggtggcccatcaacaaaaggtgctcggtacttcaacaagcaagtggaaggcacaaaatttttttgtgggtgatatggtccttagaagagtatttctgaacacaaaagacagcacaactggggtgcttggaccaaattgggaaggaccatatcaggtggttgaagttctcgaatcgggagcgtacaaacttgggtggtatgacaaaaatatggaactcattctagtaccaaggtattggaatagggaacatttaagaaagtactatcagtaaaagtaccaggtcggatgaccactctaagtacaaaattaaaataacatttactcttaagtaaatggctttctgagtggaccccgcctaaaggtttggataaaatgattacgtactcaggtcggatgaccacatttgatagtacaatttcttttaaatgcaatttgttttgtttaaacttagctaaagatcagattagatcattataatagcttttatgtaa

SEQ ID NO: 148758 - DNA, 811 bp, Cannabis sativa
  modified_base (782)..(785): a, c, t, g, unknown or other
tatatatatatccttctgtcaagaaaaaataattactagttaagatttttgtcttgaacgtaccaatttatgtctgccaaactattatggttgttaaaagttttttttttttttgaattattgagatcgttagattcaaaatttttgtcaaattccgttcgattttatttacacgatgattgtccacgtactaaattgtgtcctctgaattatgatacctttcaaattgtgtctttcaaattttgacatgtaccgaattgtgctctttaaactttcatctatgtgagactttcgctagtgaaattgaacaaaagcctttaaatctaagaaattcaatagttcgtaagaatttcttaatgacttgaaaagttcataaggcatgatttggtacatgtttaaattcaagtggtaaaaattctaattagtcaaaaaaaaaatgtacgaagataaaattttactatttaatttaaaaattattataatatgtataccttttggtaagggcaattccagtagtaaatgttaaatttagtgttaaatcaatacaaaaatgataaaattttggctctaaatttttttctatttcatcaaaatactaaaattacagtaaaattatatatttaattaaattataaataaacacaaataataaatatacaaaaaaattaagcataaatatatcgtttaaatattaaaactaatagaaaaagatttggtgcaatttatagtgtcatactaataagggtaaataccattttggactctctgttttacaaaagttnnnnactggaccttgtgttttgttaaatga

SEQ ID NO: 148759 - DNA, 692 bp, Cannabis sativa
cctccttgctttgctatagctttgccctctgggagtgcgtgggcccctcacgttttctccgggaggtatgtttcttactgatcttcttgacttaagaagacttagtcaaattatcttaaaaccatatccctcaaatccacgtgtcatagttgcattggtccacgtactttggaccaaattaagggcaacatttaccccccaagccttgtttggcgggaagtaaacgaggcttgtttaggtgcctccgcttgtcttattaactacttggcacgtgctttgggcgcgtggggtgcatttatgaccatcatcattgcagtttttactttttgcaggcaacagttcgtttcctatccattaatgatctggcgcatttaatggttgtcagtcgagtactcaagcatttccaaccgccttgatgaacgcttgtcctagccattagatctggagaatgcgaatcgattgctattctcaccgtacgatgatgcctgatcacagctgcttcacacctgttctagcctataaaagccagccttctcatttcatttggttactttcactaatttgccaaattttctcagatctttcacagagagaaaaaattctagacagcatagatcatttgatactcttccttcgccgttgccagtccttgctgtaccgacgatcaacaccaacccccagctctcaaactt

SEQ ID NO: 148760 - DNA, 747 bp, Cannabis sativa
taaaattagtttgaattttgaattttgaaaagatattttaggttgtttcaacaaccctaaattttcaaaattagttggttattcaaataataagttaattatataactaataaatatctcaatttcacagagtgttacatgggtattgtttattttatttaattgtttattcaaaatttttttagcaaacctactattattttatctaaattgctattattaatttattcacagagccaatgatctaattttagtcatagtctaattgtcaatagatcatataaataatttgttaaaggtaaattttgtaatttctttcatctatgataaacctagaaacatgatagggcccatccaaatcaatttgacctgtatgagcctatatgtttgcttttgggcttagatgcatataagaaacccatttatttttagatatttaaatagactaggcagctaaaataaaatatcacctatgatagttttattttatgtttattcaattaataaaaattatttaatgaaaaatcaaattcctcttttttgggcctttatgtgagagttagggagctaatagtagtgggtacgacatactgaactcagtcctccctcatatgaactacatcaattgttaagtcccatttcccttatttaaataactaggcaactaagccgcgcttcgcgcggtgttgcctaacttttgtaaattatatatatatattatatttattgagtgatataatcttaaat

SEQ ID NO: 148761 - DNA, 569 bp, Cannabis sativa
atacgaaaagcctaccacactgtaggccagcaacctccgaatgtcatccccttgggtgagaccgacgaagatctagcgatgaatacttcccagactgcaaatatatggttagtcgcccagtccccagtcacgagttccacatgtgggccaagcggtaggcgggcagaccttgtctagtaattcattaggagagatcatacctgatggttccaaccagattaacggtgccattccacatgtcaaccaagaaaatcaattgctgaggcagccatgtgcttctgtattcgaaaggttgggggcgactcatgacctaaggaatgatctgaatagaaggagaggtgtagacgatcagaatgtcacgacgattgtacagcctggagcccgtgctcaaattcctgctcagaaagatgcaaacgagattcaaattgaccagaatgccgagcaggttagcccagtcgtctaggcgcacctagacaaactgaaaaatatgtttcatggcatggttggacaaagaaacaatgatctcgagctagaccgagcacgtggaactcctttctctctcgagatca

SEQ ID NO: 148762 - DNA, 812 bp, Cannabis sativa
attggaacgcggtgtttggctattggaatcacatcttagtatctttagtatagcggggcgatatagttagacattgggaatgtcaagattagtggagagtttagaaatcactattttacccttagatctttttgttaattaatcatgtggggaagggtattttagtcatttaccctatgttttgatggctgaatgttagagttgcagctggccacaatatgttaaaatagtcaaagtgtaatgttgaccctttttggaaaattaagaaaatagagaaaaggtggaatttaagagaaaaccttcttctctctttctcttgttcgaaagccctaaggacaagcagctttgggtgtgattttcttgctgtaatcagagttgtagatcaagtgttagtgatctattccaacgtaaggttccatgcacctctctctttagttttcttaagctttgagttataattttttttttcatgaaattaggggtttgagctctgtgtttactgttggtgtttgagtttgttttcttcagttggattatgtttatttaagttgttttgagcaggtttggtggcttgtggtgagggttgttcaaagttagagcttattagctcaagctttgctctcacatggtgaaaattgtttctgagcttgtaatagtgttttattgccttaaatatgttctttaggttgtataaaacagatctggaaggtttgctttgaattggggttgtttggagtgagttatgattttttttgttggattcttgcactgaactagaattccgattcagagggacctgtaggaaccggaat

SEQ ID NO: 148763 - DNA, 740 bp, Cannabis sativa
agatacggaatgaagctcaacccaaagaaatgcactttcggggttaagtcagggaagtttttgggcttcattatcagtcagagagggattgaggggaatccagaaaaaattcaggccctcctgaacatgccatccccgaagaaacacaaagacgtgcagagcctaactgggaaggttgctgctttgagccgttttatctcccggtctatagataagtgcattcccttcttcaacatcttgaagaagtgccagaagtttgaatggtctgacgaatgcgaggaggcattcaaaaaactaaaggagcacatggcgaagcctcccatcctgtcaaagcctattctcggagaggacttgtttctgtacttggccgtctccgagcatgcggtcagcgcaggcttagtttgggaagaggagaaaactcagcatcccgtgtactacgtcagcaagcgcatgataggggcgaagacgcgataccccgtcattgaaaaattggtcttttacctcctaatggcctcgaggaagttgagaccctacttccaagctgacccaatcaaggtgttgaccaatcacccactccggcaagtcctacaaaagccagaggcatccggaaggctcctccaatgggcaatggagttaagtcaatttgacttacactacgttgcccgtatttcaataaagggacaagcgctagcagacttcatcaccgagtgtaatgaagccgaagcaaccgcgaacgtgcc

SEQ ID NO: 148764 - DNA, 718 bp, Cannabis sativa
agatcaaagatctaaaagcatgccatgcaaaaagccaacacttggctagacaaggctgctcgacggagactactacaaacaagacaaagctagaaagtccttatcctaccaaatgattgaacgggaacttagggggtgaatgtcatcctaaattttgtccacatgacgtgacatgtccatgtaagcaaaatacaaagtatataggaaatacttacattaaaggtatggcaaaacagtcaagcagcaactgaaagaagtgaagtgagccatcaaggagttgtaccaacatgtttggctggcgaagagaagcctataggccggccaggatcttagcacaagctgaccagcaaaaaggtgatttccagatcaagggagcttccatttgaccaaggaacctgacctctacaaggaaatggtgtgcaaagttgtcctccacttgccaaaagttggcctccacatccaaaagctagcctcctcttggtcaagctaataatgacctccaagatcttggcaggagcatggtcgaccagaacataacctgcaggacttgcatggctggccagatcatatcctgcagtgtatggccggcaaggattggcgtggaagaattctctatatagcctgatacgtggattacaagctacctacgaattgggcccttaatagcccaacaaactggatggaaaatatctactttcaaggggcaatatagtttttt

SEQ ID NO: 148765 - DNA, 506 bp, Cannabis sativa
atttgatctttctttaattaaaaaaaaataaataaatattcttcaaaatcttaaaaagaccaaaatcttaaatgaaacgagcaatacatggctcggctatagactacagtaagtaattagattgtcacatcattaattttttagtatccatcaatgtgtattactcattaagaagtgttccatatatatattttatatataaaaatagtctttttttgtgagataaaatgttgacattttataaaaatagtcttgatctgtctaattgtaaaaataaaaaaggaaaaagagattaataatgtgtaagttatatataaaagaaacaaattaataataatgattgagcgcatttaaaatatgcaccaatttttttttttatctttttttttacaaaaataggtcttcatttaattaattataattaattaaataatttgtttcgttattatgtgtcattattttaagtatattattactctatataaattatctcactttacataata

SEQ ID NO: 148766 - DNA, 670 bp, Cannabis sativa
  modified_base (425)..(433): a, c, t, g, unknown or other
tttttttttttttttttctttcatgttggtgtgtttttatcattacaaaaaattttatttttagttacaatttttgttgtgattaaaaataaaaaaaaaaattactaattataaattattattctcatgttgttattaaaaggtcgaccgtagctaaatatattagtcacaaaaaatacaatttgttgtggctaaatgtgtttttagtcacaatacttgttgtgactaaactaaattagtgacaacttgtaactaaatactatgttttagtcactagtaagtttttgttgtgactaaaagtccatttagtcacaaaaactttatgttgtgactaaaaagttgtcactaaaagtaatatttttttgcagtgcatattgtcttattgttggtttaatatttttttaaggtaaatagtggcataagtnnnnnnnnntttaagtttgtaagtggcataatctcaatatttatttttagcagcataagtactcaatgtttataaaactataaattttttctaattttgtcagtacaagctctattattttcttagacaagccacatataaggtccagattctcgattattggttctagacttaaacatgcatgtagtatcagttacttctaaatgttcatttaatatattcaaaacagagtctgtactgacaaaa

SEQ ID NO: 148767 - DNA, 903 bp, Cannabis sativa
  modified_base (97)..(101): a, c, t, g, unknown or other
  modified_base (863)..(869): a, c, t, g, unknown or other
aaatatttccaacaactggtatcaaagccatggtaatgatttactttcatgaaatatagatttaaaacgatgtttgggttgatttggatggtttcannnnngtttatgtgcttatttgatgaatgaatttgatttacgaaatttttccaagaaaatatttgttttttctttttaaaaatattttagtgaaaaattaagcaattttagtttttacggaactcgattccgataaaattgaaaaagttaggggtttttgaagattcgggtgctcatgcttcaatcgcacgaaccaggcttcggacaaggcaagcctacgcacgcggatttcagacacaacccgtgtctgaagctcggtctcgctgcttgttcagacacaaagccgcgcctgggaaccctgcaacccgccgagttttctcggcagatgaggctgcatttcctcctgtccgcgcgtgtccatgggcatatgcagcctgttagggctgcacgtgcagccctcctgggcagcaacaccccaaatgtgatttttcacgcgaccgtgtgcctcgtgcacacttctgactctcgaacaactcccgtcgagtcatgctcgcaagcatccatgagtgcatccatgcatcgaggctctctagccaagatactcgcaccgtccataggttctcactatgataagacaaatcccaacaccgacgctcacgttttcactcgtgaccaaggtagcatgtatggcaagatgccaacaccaagccaacgtgccaacgcttctttcatgccccattcgatactgtccgaatagtctccctcgtcgcccaaggactcccatacgtccatggactcccataccttacattgattgcagcggaatnnnnnnnctccttccatttagatctctagcctttgattcct

SEQ ID NO: 148768 - DNA, 631 bp, Cannabis sativa
atccacataattattaatatttataacaaaaagcacaattagcagagtatgtttacaacacagttgactgaacagtcttatgcgagataaaaatatattaattgttgccatgtgcctcgatgagaaaccatgtaacttcaattgtataagacgaggcactaacctcattacgtggaagagatataatgacagcagagatacttagtgtataatgtaaggtatacaaactaagtataaacagatgagtaaatcaaagcgagagatagtaaggcgtccacctcgccgtaagagggcatgcacgcaaaaaagatcatatcgtcaccagaaactgcagttgtcagaattaaagtaaaagtgttatcaaccttgggaaggcatatgacgagctcccgctcgtcattaaggttaactcaactccattcccagcgaggcattacaatacaataaggcttaccgtatatctttaatacacattcataatggcccagtaaaaatgggatattcacagctgtatgaaatttaaataaaaatcgcgtttactcagcgtgatatgtaatcaaatcccataattccagaggataattgttgtaaaaagattacagacaactttgtaattaactgcctactatgt

SEQ ID NO: 148769 - DNA, 611 bp, Cannabis sativa
  modified_base (520)..(523): a, c, t, g, unknown or other
aggagttccgcgtgctcggtctaactcaagatcattatttcgttgtccagccatgccgtggaacatatttttcagttcgtcaagttgagcctgtacgacagggctgacctgctcgacattctggccaatttggattatgtcagcatctttctaagtagggatttgagtacgggctccgggcggcacggttgctgtaacattctgatcatctgttctcctccttctgtttagatcgttccttaagtcatgggttgttcctaacctttcgaacacataagcgcctagttgccttagcaattgattcgcttggttgacgggtggaatggcaccattagtttggttggaaccatcaggtatgacttctcctgatgaattacaggacaaggtctgctcacctaccgctgggcccacgagcgggactcgtgaccggggatagggcggcagaccattagtagtctgggaagtattcatcgttggatcctcttccgtttctcccaggggaatgatgttcggcgattgnnnncctacagtttggtaggctcttcgtatcagcacggtggctagccgactacgatcttctatctctgcatggtgagcccttaatgcctcca

SEQ ID NO: 148770 - DNA, 675 bp, Cannabis sativa
  modified_base (291)..(297): a, c, t, g, unknown or other
tctctctctctctctctcaaaaatcctagggcagctagggttggtgtttctttgtgaaattcaagctgttttttgcaagaaattggtggtcttaagctctaggtaaggtttcaagcaactcccttttagtttcttaattttaaagttagtgagtcatgcatgtttttgggatttagttgttgttcttgctgctggagttaaattgtgttctctgtagttaaattatgtttggttatgttgaattgagcttgttttagtggttgttgattagtttaaccaagttttgagttnnnnnnntcaaacttggagctttaatggcaagtcttgattttgagcttgttgaagtgttttgttgttttgaatatgttctatgtgatctaaatagcaggtcttgaagttattatggtgtttggggttaaactgagattgtgggggaatttttggtgattcctgctctgaaccgaaattccagtttagggggacctgtaggaaccagaattcctgttggtccccaggaaaccccacagaactggaattctggttgggaaccggtctaccagttgggccagtttggggaaccctagttgttcctatttttgtgttgtttgggtattgccatgctattcatcaatagggaaacttttaatttcaagtttaagtccccgaaaagtgatt

SEQ ID NO: 148771 - DNA, 709 bp, Cannabis sativa
gaaggattaaggtagtgttcgagagctagagtagagccatagattacatcgatctatcgaatttgaaccagtatatatcttggtgttgatttttttattttctgcatttattatttttggttttatatactctatatgcccctgttttattttcgattgttgttcttggtttgttaatcttgtcattgctaatcgttgattgtttagagtttcattgatttgattctacacatttattcaaaacttcacacaaatcaaagcttcgtaatcgatcaagatcgcacaataatgattctttccacttcaatcttgaagaaattttgaaagtcattaatagcaagatttgaattggagaagttcgatggaactggggactttgcgctatggagagaaagtctgaaaggaatcctagtgcactagaaagtctctaaggttcttggagacgagaagttattggcagaaaaaaactagaggaaaacattgaaatagaggagatgacgtactacactatcatcatgtatctatcaaacagtgtttaaagaaaactcattgcagagaaaatgacaaaaggagtttgagataaatttgaagaatagtacttaaagccttcaattgctagcaaggttaatttgctagaaaggttatacagttttagaatgatttcgtccctttctttatatgagagtattgatagatttaatgagattat

SEQ ID NO: 148772 - DNA, 596 bp, Cannabis sativa
aaggtcctggttcttgctctgtcgaaaataatggaggtccgactacagctcctggttcagcagggaagttcaactcattgatggcgcatcgtgaaggagatcggggacagggagataatcgtgggattacggagcaactgatgtgtaagttttggtggaaagcttcttcgaagaataaatcgggtatacattggatgaagtgggactgaatgtgtgaagcaaaggattagggagggatgggttttcatcatctacatgattttaatatagctcttcttggcaaacaagcgtggagactacatacaatgatgaattctcttgttggcaagctttttaaagctaaatactatcctcgtggttcttttattagttctgaattgggaaataatcctagctatgtttggaggagcattcttgaagctaaggatttaattatcaaaggtggaagtttacttgtgggttcgggggagaatatttctattactaaggacccttggctcccgaatataaataaccctttcatcacttcttctcatcctagcctttgtgacaaacaagtgaagtgcttaatgactatggatggaaaaaattgggat

SEQ ID NO: 148773 - DNA, 815 bp, Cannabis sativa
  modified_base (307)..(309): a, c, t, g, unknown or other
  modified_base (363)..(368): a, c, t, g, unknown or other
  modified_base (497)..(498): a, c, t, g, unknown or other
  modified_base (618)..(623): a, c, t, g, unknown or other
catgtgatcatttatttacttatttgattaataaattcatcaaaatccttatcacattgatattcttgtttatggtgtcgtcaacacagtggaaagtaagcaagattgtgtaattaaatgtattcttagacttatcagaacacatggtttaactgatatgataatttacaacgtaatttagttacaccttggataagtgctatgtcctttctagggcattggttaaagtaagcttgagttggatgtatggagtatgcatcggaagggactgatattgaattgggattagatatgataaacttaccgnnntatctattcaattctatatcacctagttcatcctagatcaaatgatctcaatcnnnnnntggttaggttctagttcagttgtattatttgtgttctttaacctattagttaaagtcaaccaaatggttcttcccgtgacgtataagttaagaacatggtagttcaattgagtgagagcgctaatcatnnatacggaatctatagcttctattgggacatagaagtgaaacgataatttccttcgagcttggttaaatggagataaatgatagagcgctcattttagtgattatattagttcactgaaannnnnnttataggttgctaagtgttttaagtataaaatagattgaagggtgtaaaggtaaattaatccctttgtaatgtaaatcatctatacaagatcattgattattaagattataacaatggataactaatagcgtatctatatcttggaacatatagagcgttctataatacttagagtgcaattccaaattcta

SEQ ID NO: 148774 - DNA, 579 bp, Cannabis sativa
  modified_base (165)..(168): a, c, t, g, unknown or other
tatagtgaaatagaactgaatttcgatataggacaagagtatgtatatggtttagatagcttatagggtttctatgtttaatgcatgttacatatttaatttatcgcaagagtaaaagatttgtatgtaattgagatttatatatctaagaagactataaattannnnagtaaacctgctattgcatagaaattaataataggaagataatcatattaggccataatcgatagaaataattgaaatcgaagccttaatttttcttaactgttaatttccactttcactgtttttattttctagttttaatcttatcttaatttttattcaaccaagtagaagtagaagtttaatttaacgtacttaactacaatctctttgggatcgacctcactcctggtgagtttactacttgtcacgatacgtacacttgcatgtgtaaaatatcacaacaagttttggcgctgttgctggggattgttagttaatattattaaaaattaaattttgttctactttggtttttcttttcaattttagtactaactctgtttgtttcaaggtttttttttttttttt

SEQ ID NO: 148775 - DNA, 860 bp, Cannabis sativa
aggatcaaacattttcctgatctgcgaagccgatattatgaatataaagtaagaaaaaggaacaacctttgcattatttcttccattttagaaagtctgagaaattcttaagcttcttcgataagaatcatcgttgagtatgcttgaggatttgcatgccatccctgtccttgacatttttttttctacgagtttcctccgacttcatcttctcaaagcaatccttactacattcaaagatttgcagaccgaacaaccattcattgcccgaaccctaacttcaaacagtaagttgctttcctcctttacatgcttgttacattgtgtttaattactgcttagtttgtttgtatcgtttccatctcatttggttttggtagttttttaggattaaactgcatttacgtcgatactagggttcacgcagtacgtaggttttctcagaatatccgactcaccacattcagtttgataaaattctctccagggattgggactactttctgcttgcaccaatgtcctactatggttcaagaatttaccgtccagaatatttagaatttgagtttcctacagaattagccatcccatataaacccaacccctcaaaacccacctccaaattagaattgaacgatgctagggttagggaacacgtagtgagaacccaccaagaagataatgctagttgttataggtgtttcttgcaagaaatctccgaaggcaaacgccgattcttgcaagatgtggcctggccagaacctcccagcgtgttctttattacttttgaaccatgtgacttggactttgaaataattattgggttttatgccctgaataaaactcatttcatataatca

SEQ ID NO: 148776 - DNA, 682 bp, Cannabis sativa
gagtcatcgcattatgggtcattacttaattttttttttaaaaaattattcatgacaaatatttagttacaatatcagttaaatatatatatattttaatacaatatttgctaatttttttatgtatatatctttatcaaatattgtaaactttgtgatatttatgatagtttaaaatttgtattttttttttatatttacactttttatgtgtattaactgaggtaagttaattataaataatttgttggaaaaaaatatattatataatacaaataattatttataatataatataaaaataaagaaataaaattaattttgcagcaattaatttagaaaaaaaaaacaaaaaaaatctaatttcaagtgcaacttagctggactagaaaggggttcatagtgtgagattgcttttcaagtccaacattgttggactagaaatatttttctagtccaacaagtatgtttcatgttgtgggaccgctttttaagtccaataatgttggactagaaaaacaccccttttatgtcccaggctattatgtctaacacaaaagggactcgaaacatttatttagtccactattgatggacttaaaaggggttttttctagtagtgagtactcatttcacttagctgaaatatcatttatacaggattaagtgttttaaggataaa

SEQ ID NO: 148777 - DNA, 616 bp, Cannabis sativa
tttaatcacaatctattttgtatactttcttttatcaaaattcatttcatttatctcatcactttctctctcattttctatcacattatttttactgtttttacttaaatacaaactagaacgtaaaagtaaaagttataaacacatttttatttaaaaattttatacaatacacttaagatcagattatatatatatattaacattttatgaattttatttttttttacagatttttctttgttttttttttttctagaaagaaacattgttttcttgttgaaataatatgaaaataacactccgtatttaaaaaagaaattaaaattcgtaaaaatataaaagtaattgtagatctataaaaatgtaatttttttgttatttttgagtgtttataaaataatcccttttttaatttccaaaaaaattaataacatgtttttttagatttaaatgtttaatttccaaaattgtattttttttttcatcttctctagtctaaaaatttatttattgaaaaagaacttcaaaaaaatactcaacaaaaatttattaaaataataaaataaattaaataattacctacaataaggtgcattgtattaaagtgaaactc

SEQ ID NO: 148778 - DNA, 588 bp, Cannabis sativa
agtattgtattaaaattatacaatccaatacaatacaacccaatacattacaatacaatacaatacagcgtaccaaacgagccgataaaaaattattttataaaagattttagacttacacatttgaattcaaaaaattatcagtgtcataggaaagttccttgaaatagataaagtataatcactcaatgttgttttcataagattcgtacaaatgcaattaaaaaaaccaataaaaatcatactttgtgaaaaatatttaaaattctgtgtggtagtgaaaaagagtaacagaatatgctatttttggcagtttctataaaaaacatttataaagaaaaacgtgggtagttttgataaaaagcgggtatgttggtatttttcagttaacccaacatgttaagcccaagcccaagcccaagcccaagcccaaacccaagcccaatcataaatcaaagcgcacaaccttcttggccgtctctctctctctctctatcggccattttggctttcttcggttctgtcactgaactcaatcagcgctaccctagaaattttatcaaacttagatcggagattggagaggag

SEQ ID NO: 148779 - DNA, 657 bp, Cannabis sativa
taaaagaaaataaataaaatagtgcagtctattcttaaaccaaatacagaatttctttcagcataatctaatcttgtccggtctagtccaatccttttcagtccaatccagacctattactctttttggtacgcaagactgaagactagagtggattagacaagctaatttgtccaatccaatgtttaggcatggtagaagtctggataactaatctagctaatctcatttgtttgtgattatttagcctacccaacagggtgggataaataatcccatgaatgtgagattttttttatccttttttttaattttaatttattaatatattttatgtaataagaatttaaatgaaagaattatcacgtacgcaattagtaataaatttttttatcaaaaacttttccattaaaattaatgaaaatatataatttttaaattattatacataagttttcaaaatttaaaatattattaataaaacaatagttacttaaattgattctaagataaacaatatgacaataaaattatatattattttttaatgactagaaaatttatctaaatattttaataaattaatatttatattaaattagtgtttaacataagtaattttatattattcaagtatttttattttactattttaat

SEQ ID NO: 148780 - DNA, 756 bp, Cannabis sativa
ttagtctaaacgcactctattagtttttaaaagctattttttgtttttaaatttgaaaacaacttttaaattatgaagccaaacaatctctaagttttaaatttttggcttcaatttgaccaaaaattgaattttgaattttttgtgcattttttttctttctttatggtttttgagttttttgcgatatttagcgatatatttataatgataaaccaaatctaagattagggatgaagtttagcgatgaatagcaatgtttaactaaaatagtaaatgtttgcgtatttagcgatgatttttgtgatgtatttacgatatgagactaaaaactacaaaacacatcactaaatcacactcaagtttttacgatgattagtgttgtttagtgatgtgctttgcaggtttagtctcatatcttaaatacatcgctaaatacgccaacatcgctaatcatcgctaaacttcatccataacttcagatttggtctattattgtaaatatattgctaaatatcgcaaaaagagaaaatgcaaaaaatttaaaatctattttttgggtaataaattaaggaaatacaaacacaaatgtatagatatgttaaaaataaactatatacgtatagtttggaagttacccaaacttagagcaagaaaatgagatgtgcgcggtggtgagcggagtgcgatggtgagcggtgcgttgtggtgagttcaggtggtcttttataagagagagaatatagagaatgagag

SEQ ID NO: 148781 - DNA, 622 bp, Cannabis sativa
aatctagagatgtttactttcatgaagatatttttccactttccaaaactatttctcccacatctatcaatgaattattctcactttctttaattccttctacataacattcacatactctctctgaggaccctccacatgttcccaaatttgatggaacttcatcctctaacagcttgcctgtcataaacattactccctatgaagtaccatccacacccaagaacatgtctactacttctcctgtcacttcaacaatgggaagacttctatctaaactaaaacgtctttctgattatatttgcaatactactactgcttcttctactgctcaccctattaataaatatttgtcatacgataggttgacacagcactttcaagcagcagctctcgctgcccatacatttgtagatactaccagctacaaaatggcagcaaaggatcctatatggcaaaaagctatggacactgaaactgatgctcttgaagctaatgacacttggattgttgtgactctccctgagggtcaccatgccattggctgtaaatgggtatacaaaataaaatacaatgctgatggctctattgatcgatgtaaagctcgattggttgccaaagg

SEQ ID NO: 148782 - DNA, 1011 bp, Cannabis sativa
ggaagaaggttgccggtgttcttgaagttgatgccattactgctttatctgcccaagttgcttctatgtcaaatatgatcaaaaatattagcatgggtcaataaatgggtcaacagagtgtttcctcacctgtgggacaacttgaggaggtttcttgtgttttttgtagtgaggctcatacctttgacaattgcccattcaattctgcatctgtgttttacataggaagtcagaatacctacaaccagacatacaagcaacacccaaacttggcatacagaaatcaaggggctggtactagcaattcatctatgcttcctagatccaactttcaacctggtttttctcaacaagcctttaaacaaagacaacaacaaggtgtccaaacaagttctcttgagagtatgatgtgtgatttcatggtcaagacagaaaatttcatgacaagaactgagagttatatggcgaaaaatgacactgcgatccaaagccaatcaacctctatgagaactctagaaaatcaagttgggcaactagctaatgagcttcgaaataggccacaaggtactttgcctattgatactgaaaaatccaagaagagatggaaaggagcattgcaaggcggtaaccttgaggaatggtaaaaatttggagtcaaatgaggaagaagctaaggatcaaaatgagcccacttcaatccaaagtctagtagaaaaagagaaaaatgttgaacgttctaatatggcaaaggagcaacctgaagaaaatgctgcagcaattcctcatcaaaatgcagcagaaaagttacttagcaagccacccccaccatttcctcaaagattcaaaaagcagcaagaggatggtcaattccgaagatttcttaatgttctaaaacagctccacatcaacataccattagtagaagctttggagcaaatgcccaactatgtaaagtttttgaaagacattttgacaaagaaaaggagactaggtgagtttgaaacagtggct

SEQ ID NO: 148783 - DNA, 965 bp, Cannabis sativa
  modified_base (75)..(78): a, c, t, g, unknown or other
ttttagagaattcataattaggatgttaattcaacatacttattagtaaatctagatcttggtaaaatattcccnnnnactggcctcagagccatggtaatgcttttctttcatgtagtattaatttaaaacgatgaatattgtttttgtgttgatttggatgtgttcatgttggtttatgtgttaattgatgaatgtttatgatttacgaaattttttcatgaaaataattttattttcgtcctgaaaatattttatttggacttgtgaaaaattaagaattttggtttttacggaactcgatttcgataaaaattgagagagttatgaatttttgaaaatcgggttgaaggggatgtcgagattgggtgctgcgcgcaccagcatctcggacaaggtagtccttcggtgcgcgtgacccagacaatcccctgtctgaagcgcacgaacgcacgacttcggacaggatgcaccctgcatctgcccgtgtcctgatgctgcacctactgaggattgccgcacattcacaccctgcagatcctttcttccgcgcacgtctgaggcattttgcagcctctcgagggctgcacgtgcagcctcgacagccaacacccaaattttgaaatttgtgggatttttttttccattttttcgaattttgaaattttcaaaccctaatttcaaaataaaatattatttttaatacatttaaacttaaatgtcaattttacattaataatatttaatttttaatatattattattaattttatgatattttgaggtttaaatttaaaaattaattattttattttaaattatggtgagattttgaaaatttgtaattattatttaattataaatcagatatttgaatattagtcatattttaaattgaaagataactttattcttttaatttgaaatattatattataatcatcttatatgataaattaaataat

SEQ ID NO: 148784 - DNA, 537 bp, Cannabis sativa
gtaaacttcagcagtccacatcatttgaatgtcagcttctatatgagagagctaacttgacggagcagtgaatcttattgaaagatgtctaaagatgattaaagaaggtaagtagccttcctatagcgagatggatgcctcgctattcgttgttcaagttcattcaactattatgcttagtttgtataatgtatattatatgctaagtgttttaacagtcaccatgtctcgaatacacactaccacaaaaaagagtattcgcgacagttttaaaaatactttttttggggaaccgttgctaaaaaaattaagtgagtgtttataactgtcgaaaaaaataggatatttccaacggtttaaaacataggcgacgatttttaaacgtgcctttaaaggtaatggcctacggtttaaaaccgtcggcattgtcgcctatagtattgccgatgattttaaacaacaggccattctcatgcttcaattttacgcgtttcacatctgaaatgtcatttcccgcatcttaaatttcaaaatttt

SEQ ID NO: 148785 - DNA, 792 bp, Cannabis sativa
tataaatttaacatttttgtaaaccctgatcaaaatcataatttaggtaattttttttaagtaaatactattttagatcgtgtattttgtaaaagttactaatggaccatttattttgttaaatgacaaaatgaaccctgtttttctaaaatggtacaaataagattttgaactgattttttgtcaaaataagacttaataataatccgatctagaaatgttataacaaaactgattacattttctatatctgttcgtgttagaaattgtcttcaagttagttatattaaaaaaattatcacaaattgagcttagagtcctatttttactattttagaaaatataagatctattttgtcatttaagaagacaaagagtttaatcaataacttttgtaaaatacaagatctaaaataatattttcctttaaacttttgaatgaagtatctaaatctattgcttaaatcacgcactacatagtctacactactacacttgaatattttgagttatttcaaatttaaattaatttgtacacataaatatatataaggttaatatctattttttttttaatataataatatccgattgagatttaactttgaataattaattgttcttaataagaaaaattatagcaaataatctaaaatcatagctttatataagtaaatgttcttatatttttttacactatttattataacattgtcttttgacacataaaaaaaaattaataattcttttttttcataattttttagaattagaagcaaattacttaaatat

SEQ ID NO: 148786 - DNA, 817 bp, Cannabis sativa
atatacaagatacaactagccatagccataaataaaaacaaaactaacgatttagggcttaatttttcactaaaaaacaaaatcatggacaaaatgtcaagattatatatatatattctttcattagttctttttgcaatttgattcataataaccagaaacaagacttcaaagtcaaaagaatcaagacttacaattgaaagtttgttgaggatgatgaatcaagctccttccttcttcaacatccacactcatggcacgtttactaaactgtaattgaaattagaataatcaatggaagaaatgaattgagttaaaatataaaataatcagaaacaatattttattttattgtttactaaactgaccggaaaagaaatcaaaatcattttttttttttgtttacataatcaggaaaggtaatcggaatgacttaatttgactaaattgttattgttagaacatataattgttttttatttatatattttttaaggacatatttatcttctttcatttttaattaataaaattataaataatataaagtaagttaagaaaagagaaaggtattctttatgaaaataaggggagaacctttccctttgtttttcccttaatttgtatgaccccactagtttcttccattccaaaatttagtaaacaaatgaatgggaattaatctcatacaattgattctcattcccttttagtaaacatgccatcaattctaacttttttttaacaatgtggtggcaaagccaaaattaacaattgcacataattttaataatttttattttacatcaaatatata

SEQ ID NO: 148787 - DNA, 912 bp, Cannabis sativa
  modified_base (28)..(43): a, c, t, g, unknown or other
ttgaaaatatgagagagagagagagagnnnnnnnnnnnnnnnnagagagagagagagaggaagaaataggaaaatcgaaaattccatcaatcaagtacattacaaacattgaaagaagaaaaaaatgaaatgaaattatgtgagaaatagcaatggcaggctagatgagcaggtgtgactgtgagtctccatttcttgttctcgtcagcgcccaaatctcctctagcgatcagtggtgacagccaggatctcgcgtatctatttcttagtgattatttttcggcatttttattttgtttttaggtcatcaccattcatcgagatccagaggagaaagaacaagtggaggagggagagagaggctctaagatggacaatgatggcattgcaatgatggtgagtgaaaaaatcgaagaagatgagctttggtaatgcgaggcgagggggagtcaaggtatgggatttctaggcattgcgtgcacagtggtgtggtccgtttcaattagcgtcgatcggagaatggccattttcgtctagctatgcatgtgagacaatgaacaaagagataaaggtgggatcgagtgagaggggtagatgcagagaagggttttcgcgggtttcttagggtggtagtctgcgtggaccaagatgagaaagaaaaaaaattattattattttaaattaatttattttaaatcaatttatttgtatttcttaaaaatatttatttatgtgggccaataatattgtgtcatgtgtacattgtgttaatatagacaatacaaaaaaggaaaaaaaaattacaaaaatactatgggccggcccattgaacatttatacagtccacatacaactatttacaaaaataccacatgcactaagccttcagctgtacagagcgaaccatgaaga

SEQ ID NO: 148788 - DNA, 1559 bp, Cannabis sativa
cgggttcgttttcaattttttgaacccgaaacctgccaacctgaaacccgataaacccgcccgatgttcagtcctagatcttggtaaaacatattccaacaaaggattccaaaccctttctcaataaagtcacaaagcctacctaattgattaattaccaggtcgtatctaatctttgcaattagatctgccagatatttctccttcaaactgaagtgcgtaggcacaatacccgaagccaacttggccagaggatcaaattttattgtgtactctgttactgacataccctcactctgaaccagcttagtaaattctttccccttagcactgcaaactgcctcattgtaatacttagcgttgagcaagtctgaaaactcttctgaggtcataacagtgacatctcatgtgagggacactaactcccaccacacgagcgcatcttcctggaactgaaaggtagcacaaatcacctggtcatttccaatgactcccatgaaattcaaaatcctctctatcaccgtgagccactactcagccttcatcacatctggacttcccaaaaaaactggaggtgcctgcttgcgaaatctttcgtacagtggctctatatggttgtcagcaagaggttgttctactggcaccacaagaactaaagcggcctgaacttgtggtggaggcgctgtaggaggaccctactacctcaacctcacaattttttcatcttgttgtagaatacgatcttgcatttttgcgaatgtctgctcccaatctagaggagcttgaggtgggttttcatgtcgaccaccctgaaacctttcacgacctctaccgcgtccacaaggattctaggaatttgatttccctgaccgcctccggtctcgaccctattaccctgactccttgtattttggtggatgtccatttagtaggacttagcctgcaaacccataagtcaggcaggtcagacaaagatcacaaaaacttaatactgctcttatggattttaaggcaacacattaaaataaagaattataagctactatgcttcctaatatactttactaatcacatacaatactaaacaagtaaaggcttattgaatcgtgagccgagctattctctgatgatgattgtacatgtcttggtgatcttcggtagacaaacctagtggctctgataccaaaattgtaacgccctgatacttaggcacgctacaatgattttcaattatagtgccacctttgctaatcaaagggtttttcttgaaaatcgtgtgaaattaaaactttagatttaattgctaaactttataaatttttatacgtttatttacaaaagtcgggatcccgtatttaaacttttacaacactatccaaaatatatttagtagggtcacacaacgactacaaaataaaaccccagatgtcccaagaccgaacactccaggtcgcgtcgcctcgacatgtacaaacatcatcctagctcggagcttaatcctattcagccttcgcctttcctttacctacacatgaaagtagcaactgtgagtcgacaga

SEQ ID NO: 148789 - DNA, 594 bp, Cannabis sativa
aataatatttaaatttctaactttttattttgttttcaaaaatattttatatttatattaatatttttattattatcaaacaatatcaacctaagttttttataatctacaatttttttacaagtgatgaaaatataatttaaaaatgttaaaaattattttcatcaaatgcatacaaatttatactatgaaaaaaataattaaaaatatataaaaaataaaaattttgatataacatatttttgtatatatatttgtgattataatgaattagatgaaaatattatcattttataatagaattttaataactcccagcactttagaatttataatttgccaaacactcagttcagctttttcctacagttttgctacaactgttttttttacaacacagctacaactgtttttcctcacagcacagctgtgccaaactggccctaaataattaaggctaaaataacataatagagatttgtgagtctacctaacatacatgaaaaaattagggattaccttgggaaatttacatggtatactaacttttgccatttttttacaaaaatactgccaggcggtattttttacttt

SEQ ID NO: 148790 - DNA, 614 bp, Cannabis sativa
atgattctaattctcaaattgctgattctatcttgctgtttttctatagcactttcctaactagtgggattgtctcatttcataatacttcctttttctagcccaaaaactggacaagatgtttttcccatataataaatttgtctgaagtttaacatcatcacaactcaaaatacgggtcgaatccaatacatattttctcaacttggagacatgaaatccgacaatgcaggagttaaggccaactaataggctacctagcctacttactccagtgaacatgcatctagtatttatctcgtaccacacttgttaaggtacctaaccagtggtacatttaattatcagttttaaataaacacctcgtcaggaaagagattactctaagataatctaacctttatcaaatatgctctcagcatgtttctaatattccattgatcctctcaggttacccacctttcaagaataaaacattatactattttcgctttaacctccattgttctcaataacttttgttttccttaacatcatagccaaagatatcaaccttggaatttcacaagatattccttcgtataaattctatatccttatttgttgtataaatt

SEQ ID NO: 148791 - DNA, 677 bp, Cannabis sativa
gattttgactttagtcttggatctatcaagactacaaatgatgctttcatttttcgtcatgtggttactgcaaccactatcaagataacattaacaagtatctttttcttcttctgatgcagcttggcagacatagaagagattactttcatcatttttctcttcacaaaaattaacttgatgggatttctttaaatgataagttttctcagtgtggcaaaattttttacaattttggcactgtggttttcctttaaaccagcagtctttctccaactgactttttcatttacaaatgccatatggaggatacttgtcgttattttctttttgtttttcttctgtccttttcccatcaggttttggtttttgagatcgcgaattgattttaaactgaaaggcattttcagcttcactttccttatgaccttttcatctactttcatatgcttcaagagagcctataagtttagttggtgatagagtttctaaatctttatagtttctgtctatcaccgaaacttttttctgtacaagaaattagtattttttgtactatattcttgttaggaattatttctccataggctcccatttgatttactatttctttaattctagaatagtaatcttttgcagtctcattatctttcattttaagattctcaaaatctctt

SEQ ID NO: 148792 - DNA, 1021 bp, Cannabis sativa
aaataaaaaatattcttatactattcaccatatgaaatcttagccttgccagatcgaaacctaggggaggctcttgagggaggaaacatgtttttttgtcgagacttcaccatactaaactgaggatcacctggagacttggacggactacgcaaaggcactaaggatgatgtaaatgagctaccttgtacagtcctccaatcttcaatcacttttgaacgcagttcatttaggttatcagatattatcctcgcagcgatttccaaacacgcctcaatcgggtcaaattgtgaaaaaagacaaaaaaaaacaaaaaaacaaaaacaacattcaaaatataataaactctgatcaaaatctcagtacgtatcatattacacaaagtagaaaactaaattaactttcaattacacaacacaaatatcaatgaaacttgggtaatagattctgaactaaataaacaggggtatacctgagcaactggatcttcctcattagccacagcctccatgtacttcatcacatatacactgcaatctcggtcattatcttgttgaggaaggccacgatctttattctcaattttgaaatccacaaaagtcaaattttttgacttattcccatcgaacaaaaggtccaatgtcgacaactgcaaacatatagaattagttagattccatcaacaatgaattcacatcaaacaatgacattttgtaattttactatttctttcgtagcgtcaacacaatacttctcatccattgtgctatgtagggagtgcaaaaatgagactactttcgacttcatattaacttctgcaccaaactaaagtggtggaccttctaccgtcaaaatcggcacaaacatctataattgataagaaaaatagtaaagtcataaatacattcaaattatagaccatatagcaattcgacactacaattaatgaaattatttgaacacatcgataccaatattcatcattaacataaatcagttttcaaattaacaagtaagaaga

SEQ ID NO: 148793 - DNA, 533 bp, Cannabis sativa
tagtctttgaacacccgattcattaaatccatgaatgccaccggggcattagtgagtccaaaagacatcacaagaaattcatagtgtccatattctgtacagaacgcagttttcgggatatcttcctctcgaattctcagctgatgatagcctgagcgaagattgatcttggaaaagaccgtcttccccttcagttgatcaaacaaatcatctattcaaggtaaaggatacttgttgttgatggtgagcttgttcaactcccgaaaatcaatgcacattcgcagggttctgtctttcttcttcacaaacaaaactggagcaccccaaggtgagtagctcggtctgatgaatcccagattcagtaattcttgtaattgtacctttaattccttcaactcaggtggagccattcggtacggtgccttagatactagatccactcccggaaccaattcaataactaattcaatttcccgggtaggtggaaatctcggcatatcttctagaaagacatcgaggaactcgcataccaa

SEQ ID NO: 148794 - DNA, 537 bp, Cannabis sativa
ttttgtgtctgggtccgagttcgggtctctggtttgggtatgatgtcaggttaaggttcaggtccgtgttttgttctagtttgggtctggtttctggtcctggtcctggtttgggtttggggcggggtccgtgttcgggttcgtccctggtccaggtctaggtccgagtctaggtttgagtcctgtgttccgatccgggtctaggttccagggcccgattcctaggccctcgtcccagtcccattttcgggtcatggggtatggattcagtttcatgtgtaggtttgattctgggtcctagtctgggtgtcagttcaggtgcaggtccgggttcggatcccagttcgggtcctagatccagacactgactacgagtcgggtccatgccctgagttcatatttggatccggatctcgcgtccttgtctggttctagttcaagtgtcgggtcacgatctaggtcctaggtctgggttagggtcagggttcgagtttgggtccgagtttgggtttgggtctagctctgggttcaggttca

SEQ ID NO: 148795 - DNA, 1143 bp, Cannabis sativa
ttgttctcatttctaaaaataattctttgaaaacaaaaaacagaaaacaatagcaaacatgctcttaatttttttaatttatacatttacattatccctaattttttttcctttttattgttttttatttatgaaagcttttacagagctttttgttttccattatatgtctgtcttttttaatgtttagctaactattttttattttcattttgagtctttttttttttcttctctttttttttttcattttttcttcctcttctctctttttttatcctttttttttctcaaactaatttttatcattatatataaaaatatataataaatatatatttctatatctctttttttaataatttttaattctcacaaaacattgttttattttttatttttaaataaaatatataaacacttattctatttattttttttttgtcttttttaaatttttttactattgacactcaaactacatcaaactatttttattgaattaatcacattttataaaaaaaatcttaattaatttttttttttacaaccaatgattaatatcattgaaaaaccaaaaaatattgtacaggctaagagactaaacaaaagttacaaaggaaggatagttctctagccaaacaatttgttcatccatccgaagagcatgcacagctaatccatctgcagccgtattggccattcgacgaacatggattagggacactcttggaaatctgaagaacaaaattgcaacatcctctaataaggaaccaaagtcatttaaatagacatggctattattaaaagcagaaataacggttaaacaatcagattcaacaatgttaatttctaatcttgaagaaataatccaatccacagcgaccacaattgccatacattctgcttgcaaaactgaaaaatttcctgtaaaagaagaaaacaaggaaattttgtattaataaaattgtagaaaacataatgttaatcgtaataaccaaaaaataaatctcatatgttataattgttattatatattattaagaggatgtaataataaaagtggaaaaattaattttaattggaatcgaagagattgttcccttcggttagaatagcttttttatatattataaaatatat

SEQ ID NO: 148796 - DNA, 610 bp, Cannabis sativa
  modified_base (577)..(585): a, c, t, g, unknown or other
tggcataatagtaaacttctcaaacttcaaacacctaccaatatgtatgctaaaagcattagcaaatgctaaaaccatgttcaccacctccaaattaaacgaatccttctcccaatcaaagtattaacattcagtgatagatagtcttctctctgacccacgactctttcactcaaatataaaacttccatacaaaaggaaaacacaaaataattaacacaattattgttgacaattaagttacaaatataattcttaataagaaataatagtaatgacttacctcaagacttggcttatcttctctttcatgatcgagcacctatttggcaagtttcctttctagtctactctgtagaaatctaattctgattctgcggattaggatctttttaagaaagtttgtacagttgtagaatcgattttatagttgtctttagggttgctatgttctataaatagcaaccctagagagcagccaatcggttcaactcttgtagctttcattttcttgcatattttctttggtgaagagagattctttctctaggcgtgacctgttgggttttatgccctnnnnnnnnntccatttcaatgtaatccattttat

SEQ ID NO: 148797 - DNA, 1086 bp, Cannabis sativa
agctcttgaatactcgcacaaaactagtgttgtcgaaattcgctcgacaacagtgggaggccatgggtactagctctttcatagaactgctactgtagagtagtgtgttgtaagctagttactgatagtatttggaaaggttctctccataccaatatcttggtaggagaacaagttccatgttctcattgtaccttgctagattacaggctcccttactagttatctctgtaacttgataagggccttcctagttgggttcaaacactcctgctgctggatctttagtgtttaggaaaactcttcaaagcagcaggtctcctatgaagaatatgatgtccttgacttgtttggttaagtgccttgctacctttttctagtaggcctggagctttaggttggcttgatcttttctttcatctatttggtcaatggattctgtgaacaggaggttgtttttctcctggtcatagattgtcctcctgtgagatagtggcgccagatctacaagtaacatcacctcatagccattagctagagagaatggagttggcccagtggtcgtcttctcagtagtcttctgcgaaaacatgacctctaagagtaactcaggctagttaccttttgcttcctcaaggagctttttcaagatgttcttgaaggttttgttgacagattttacctgcccatttggttgaggatgggtcatgacaaagaagcttttcatgatatgccatgtctattgtagaaaataatgaacatatgttcactatcaaattgctttccattgtctgacaaaatcttttgtggatgtctgaattcacatatgttgttcttgacaacaaattcaaggaatttttggaggtgattgttgccaggggttcagtttctgtccacttggtgaagtagtctagtgtgactatagcaaactgtacccctccttttccctttgggagttgaccaatcaggtatatcccccatattgcgaagcgccaaggagactgcatcatcgtgagctcattgggtggagctcttggaattttttagaatctctggaacttatcacatcttttgacgtagtccatt

SEQ ID NO: 148798 - DNA, 774 bp, Cannabis sativa
  modified_base (384)..(388): a, c, t, g, unknown or other
taacgataaaaacacttagcgtatattacaaggtatacaaactaagtacaaacagtttcgtgaatcaagatgacagacagcgaggcgtctatctcgctggaagagggcatgcatgcgagaaagatcatctcgacaccagagaatgtagttaccaaaattaaagcaatattaatctcaggaagtcatatgacgagccacagctcaccatcaaagttaactcggctccattcatagcgaggcatccccatgagataaggcttaccgtatatctttaaatatgcgttcatctcggcctaataaaagcaggatactcacagctatgtggattttaaataaaaattgcatttacttagcataatttgtaatcaaatcccatgatttgannnnnataattgttgtaaagattacagtcaacttttgagatttattgcctactatgactcgtggactatgcagaattttagctgcaaaaccacgtaaaaaactttgtgttcatatttttatttctatagcttttattttttctgtgtggaatcgctatcgtgaggctcaaatttggttaacaaaaacttgcgttaacagtttggtgcttttattgagagcctctgtcaaaaagctcaaaaaaagcctcctgacgtaaaagtaatggatgacgccaaagataatgatcctcaagaaggaattagtcattgccctaaaaagaaccattatgtcctaagggatctattgagtcatcgcatgaacagactgcaagccccaggaaaacctgggttg

SEQ ID NO: 148799 - DNA, 1653 bp, Cannabis sativa
ttggaggattgttcctctaaagtgcgttctattgttttgaatgagtttaattaataaatctcctgattaatttaaaaaaaaaaaaaaaaaaacccttaacatatactgaacagttactaggaatgttcataaaaatatccaatccaatcaaattcacacaattcgatttgatctaacctaatccgcaaattgcagatattcgtactttgtgcggattggattggattagaaaatttaaaattcccacttgtacggagtagatgttgattgacatataaaaaataactgatccaattaaatccatacatgtttatatatatatttaaaaaagtattatataaacaattaatatttcaatgtgaaaaataataatttaaaaatctaatacatatgatacaaatatatatatttatatatttcaaaatatagtagatcaaatatatattttattatgatttacaaagaaaatataatttaaaataaaattcaatattttttttatatatataatttttttttcttgctttaattttttaattttttgttttatttatttcaaattcttgttggagatattaaacaaaaataatttattttattttgttgttagttatatatataaaaaatatactttttaataaatattaaataatttaacattaaataggaactagtctgaaataaccgatccaatccacacttttgcggattagattggattggatccaaaatatgaaatccgcacttaggcggcatttggttagaggtaatgaaattgaatggaatggaaaggaaacaattttcattctattattttatttggttgcattttaaagtattggaatgacattccaatggaatgttcttttcactattttggtggaatgactatttcattttaaaaaggaaggaaagaccattctaatgtaacaggagaaaaaaataatgattttttttttttatcaattttttatgtattttaaattttatttcattctattcctattcctattcccattctcatttctattcctatatatattttcattccttcctactaaatgtcacctagtgcagatcggatgcattataaacaaaataatgtgaattgaatcgaatgaacactcctaatagttaccatgtaaagaaaaaaaataatactcatagaggctctaacttgacctctactcaaacaaaatcctaagccttaggtaaaataaaatctgaattccatgtacaaatatttttctaataaattaatattaaacatagtagtttgatgtagtggtaaaagttttaagagattaaaagtgcacaaaaaaaaaaaaaattaaaatatcattttatttggtttaagtctataatcaaaattttgaagtactaaatttcagtagccaagatacggtctcgtctgccttagtctaaaactgactctacttaatacaagcttgttgggtgttaggttcgtttctatttgttttactctattctaagtttcatttagctcaagactctccacaatgaaaatttacttttcatataagatatagaatatataagaggaatgtgttagacatttatatgtataaactgaaatatatgtatgtgtatataacatgcggaataaaagaacatatacactatatgaatata

SEQ ID NO: 148800 - DNA, 683 bp, Cannabis sativa
  modified_base (50)..(50): a, c, t, g, unknown or other
tttagtattttaatttttttttctggtataactctatttagttataaccnctcaattagaatataatttgcttggtcccaagtctattcttgaatagaggttctactgtattaagtagaggagaactgaaccgttgaagagaaaaagcactctcttagaaataattgggataaaatatttatgtatatatatactagcaaaaagttacgtgggaggcacgtatattaaattttatgctaagttttttctacgttatttaaaagtgatacaactaaaaataaaagaaaaaaaatataattagttattaggtgaaattattattatgtgtatctaaatactataatttataatttttgacaattaaaagtaaataccggatacaatatattagtgtacactgtattctttgtggagttcttatcttgttgtgcagtagtgactggtcaatcaaaactctaacaataaatgttgtttttgctcttgataaaactatatataagtgaaaaatctgttggggtaatctaatatttggcctagacttatttaatcattgcaaaacttaaatcttataaaaaaactgagtttgtttaaacgaaaagccactattttaaaacaaggatgtggtagagaaataggggaagtagaaacttgatgatgagtgtgctttatttttatagtgtgaa

SEQ ID NO: 148801 - DNA, 621 bp, Cannabis sativa
  modified_base (267)..(270): a, c, t, g, unknown or other
actttgattatattagattatattggatcactaacaaatattagtaaattatatattcacttctgggaatatgcaaactgaattaaatagtatatgtacatgtacatatacatatcttgtatcagcaatagtttgaaactattgatttcaaaaaataataaaatatgtatatattaatttgcttctcgcattacaattatatgtaaaatctatattctttgaaatataatttcatgtctattcattctcttcagggaatgatatttnnnnattctaaatgtacaataaatttgtgatatactaaaatataagaacaattcacattctattcaataattaaatataattttatcttgattataagtgtgtccatactgcaggtacatgactattctacacatgatatatagatttcatgcactttgattttgtgtggtatttcatcttttagttatttctaatttattctagaaatattttagtagtaaacaatgccattgattatttaagattattgcattcactttggggaatgacgttgaacaagtagaacattattataaatttcttaaaaatttattacttgttcatccataaaaatataagaaattattcaacaat

SEQ ID NO: 148802 - DNA, 517 bp, Cannabis sativa
gctccctatgagatgttgtatggtaggaagtgtcgttctccgattcactgggatgaaaccagggaaagaaagtatataggtccagaatcaaattagaggactagcgatgctatagaaaaaatcaagactcaaatgcttgcttcctaaagtaggcagaaaagttatacagatccaaagtgcagagatatagaattttaggtagtagatcatgtcttcctacgagtctcacctatgaaaggtgtgaagcgctttgttaaggagggaaagttaagacctaggtttacaagactattcgaagtactcaaaaaggttggtcaagtagcatatcgtttagccctacctccaacattattagtagttcacaattttttccatgtgtcaatgttgaggaagtacgtattagatccaactcatgtcctcagttatgaaagaataaagttctcaaaaataagaccataactttagttaagatactctagaaaaatagcaaggtggaggaagctacttgagagttaga

SEQ ID NO: 148803 - DNA, 661 bp, Cannabis sativa
aacaacaacattaacatcaacaaacaaactaagcagaagtgatcatatcaatactcaaaattgttaaaacaagaaactttaattacaaaccaaataaactcagaatcaaaacttcaaaccaataaaacaattattaaatttatgtatgatattataccatgaggttgatttttggaaaatgatctcattgtgtggtaatcttgcttattataagcaccgttagctcttcttctccaaaatcccattaaaaagctttgactgaagaaattgaaaaatgggtaagattgatggtatcgtggcagttgggactattatggaagctccgaggtctattaatatttgttggtcttatgattttgtgttttgggtttatcggtatttatagagattattagtttcttttttgattaggattagataaaaaatatataatataatatatttaaatgttaaattgttttgaaaatgggatttaaatttatttaatattataaaaatgataattattattatcattagaaaataacggcataactacggatttaaactacggataattgtgttgaaaatgataattattattattattattagggaaatttgagtttctatgcattttttatacctaaattaattatctaaactaatacttataactctt

SEQ ID NO: 148804 - DNA, 788 bp, Cannabis sativa
ttgcttcacacttgtctgtccatagaaatcattgattctttttagtgagtgctgttaaaggtgttgagatcttagaaaatccctcaacaaattgacggtaatagccagccaaacccagaaaacttctaacttctataactgtcttttgtctcggccaatctctggcggattcaatcttccatagatcgaccttgatcctgtctttactaaaaatttgttcgagaaaagacacttgagatagctaaaactcacactttttaaacttagcatacagtttatattctcgtaatcattgcagatccatcaggagatgttgttcatgctcctcttctgattaagaatacacaaggatgtcgtcaataaatactataacacatatatcgtggaaatccttgaataccctattcctcaaatccataaaagttgcaggagcattggttagtccaaacgacataacaaaaaattcatagtgtccatacctagtacggaaagtagtctttggaacgtcctcttggattctcaactgatgatagcccaatcagagatcaatcttataaaagattgtcttcccctgaagttgatcgaacaggtcgtcaatcctaggtaaaggatacttattcttgataatcaatttatttagttctcggtagtcaatgcacatgtgtagcattctgtctttcttcttgataaataacaccagagctccccatggcgatacactaggtcacaaaaaacctaggtgaagcatcccctgaagttgaacttttaattccttaagttcagatgga

SEQ ID NO: 148805 - DNA, 728 bp, Cannabis sativa
tgttctggtttatggctaagaggtctggcacctctcacatggtatcagagccatggccgccattaatggcgaacatggccaccattggtcttggaaacttaagctctcaagctactcaacaaggagctcgaattccagctccaagaaatcgaaccagagatcaagaagatgcaactgtctacttcaatcacacgatctcgactaagctcaatgatcacaattatctcatggggaaacggcacatccttgctgccattcatggaaatagattacagagattcattcaagttcttcctcctcctcctcaatttctcagtgatgcagacaaagctgcactaaatttcaatcccgagtttctaaattaggaagtttaagataaacttctcgtgccttggctcctatcttcaatgtctgaaagcttattaactcgaatggtgggatgcaattcagggagacaaacctggaaagttcttgaacaacattatactctaaaagtttcatctaagatcctcgagttcagaaccaaacttcagaagcagaagctgaagaaagggaaactgaacctcaatgactatcttcttaaagtcaagcaacatgtcgatcttttagcctaagttagagaagttttatctgatcgagaccacattgttgctattttcaagggcttaccaagtgaatatgatacttttatcatttccacaaatactcggattgaaggctatacagtt

SEQ ID NO: 148806 - DNA, 1093 bp, Cannabis sativa
  modified_base (385)..(387): a, c, t, g, unknown or other
aatattcacccctttcaatcttacagttaccatccaatttagaactttggattcaggttttactcctagtatcaattcaattcaaaattaatttcccatttcatcagtaatcttggtagctcttttgaaaaggcatctaaaagcccttgagccacaaaattgtgtcccagttcgactgatgtttcctttgcaacatttgccacactaactgaaaggttggtacatccatcccataataaactttcagccttaagcgtcatgatcactggatttcgggacctttgatcctttcccaagaacacgaaggtgctcaccttctgattcaaaagttatcatctttccttcctaatcaatatttgtaatacactttacaagtcaatccaannntggacatttactttcatgaatctctctcttcatattatttcctttgtgatctaatccatgtaccctcaacaagggttggctcaaccacctgagcataaaactagaaaactcctagttatttagccataatatctacattctgaacaatatacacgttccaccttaaaaccttcctagcggccttagcagccgctacattttaacaaaactttgccaatcagtccagcctagtgtcattctccatcactgtgctgcccgggattaaccatacaggttctactaccttatcagtgaagtaatctcacttcataacatacatttactctcagtcttatggtagtagaagattcatacccacaccacctacaccgagcttaggagactcgcaatcattcttactagattgcctcaagtacaccttctagtacactcgcgaccattcgttgctcatagttagaatcttttcaactaaaactgatgctaattagcattaccgccaatgcataaatgtactcaacaattttatatcaaaacttatcatgcttctctaacaacttacacatttcaaataagcagataattcaaataatcaatagataattcactaatcaactaataattagcacttactaaaccatgagtcgaacgagtcttcgcagccaatgtacatatcaaaccagtgttcaggatctttaaaccttggtcg

SEQ ID NO: 148807 - DNA, 942 bp, Cannabis sativa
  modified_base (226)..(238): a, c, t, g, unknown or other
  modified_base (291)..(321): a, c, t, g, unknown or other
  modified_base (527)..(534): a, c, t, g, unknown or other
  modified_base (572)..(579): a, c, t, g, unknown or other
ataagttagaaaaatgatattttaaatattttatatgatttttcttattagaaatttataaataatattttaaatatctaaataacttaaatatttttgtataaattttaaaaaatacttaatttgagatattttgacatataatttagataatttttatttgtttaaaataataattgcctaaccatatctattttaaatatggtttattttgttattttaattnnnnnnnnnnnnnagattagaaaatgatattgaaaatttctttttggttattttcaaatcatttannnnnnnnnnnnnnnnnnnnnnnnnnnnnnnataattcaaataaatctagatattttaaattagcttgaattttaaatttttgaaaagatattttaggttgtttttttaacaaccctaaattttcaatatagtaagttagttaaaataataatttaattatataaatatcttacttcacaatttgttacatgggcattgtttgttagatttaaattgtttattcaaacatttttttnnnnnnnnttgtttattcaaacatttttttttaacaaacctattannnnnnnnatctaaattgctatgattaatttgttgacaggtctaatgatctgattttaatcacagtccaattgtcaatagatcctataaataatttgtaacatataaattttatatttatttaatctgagtaaacttagtaacatgataggacccatccaaatcaatttgacatgtgtgagcctatatgtttgccttttggacttagatgcatataggaagcccatttattttgagatagataaatggactagattgctaaagtaaaatatcacttatgatagttttatttaggcccaattaaaattgggtttattcaatgaataacaattatttaaataatggttcaattcctctccttttggccttgta

SEQ ID NO: 148808 - DNA, 593 bp, Cannabis sativa
gttttttgtgatttatattagttactattttttttttttttgtatttcatgcagttggatcatcctattttcaattggaacatttggagggagtagaacaagcattgactgaaaatttaggtgtgaaagatggagatttctagcatttcaagcatattttttggcaatattaatgacgttggataggaattttccttcaaaatttgttgttcttgttgatttttattctttagcaattgtatctacttttgctaggagacattctttttttttttttcaatgatataggatcattgttagagaatgtaacaagtttattatccagttttcctggagtgtccctgatctatagacattggtcggtcattgtgaatgcacatggattagctgtgcatgctcttcggatagattaacaacttgtttggctagatgacttcttattattttattcattgagatgtatatagtcctttagtctgtatgacattattcagttatcaatgattttggtcattgttacaaaaaaaaaatggaaattgtcatttatacgattgagattggaagcttaaaatcccaaaaatacgattgactct

SEQ ID NO: 148809 - DNA, 1289 bp, Cannabis sativa
tgcttaataaagtaatcttttcctgaaatttcaatggtttccttatatacaatattgactatccatccaattataaagtactctctatcattaccgtgtcaccttaagtaattcaggtaatcttttttaccttagtgataccactactcttcccaatgttcttttaaccgctaccccggtaatgtccccactacaagcctgcatccgacccttactcccacggaatgatggctcttatacacgagtgcatcactctagctgcttctcagactgacgactggccccacagaccaatccaagtgttttcaacgtgctttgctctgactcgcacgcttcatgggaaaatttcctaaatgaaatcaccccaagtcaaggacactcaaccatggagttccttcatggtggggtaccaaaacaagatgcttcttgctaacataggtagtcccacacctacataatctcaaaattactacacaatcgccgccttcaattcacctaggattctagacaatactcataaattgtcctacctttgcaaacgttagatcacttgtaaacaaaagatttgtgattggaatcagttagatcaatgcctccattaactactcatgtcctatatttcaattaggaataccaacaaatttaactcatactattatttctctaatttgtctaccccgtcaaatgggttactactaaataacatacatacacagtccattcaaatttcttgatgtctctaactaaatgtacaatatttaatattgatatcaattgaaacaaaaattgtaatattgcccataaaattttaatttgagtcggtcgaaggaccgatactcgagtctctttgagtcataacaacaagcacttgggcaggacccatacacttttctcctttaacatatcagtctttcttaactacggggaggttcttttcagattacccactaccccgcaataaaataagatatggctctacatcaaatggcgcctttttgtatcttgaacactcagaataaggtcaccatttcttattctcacctcgaccactattttggtcaccctggaacctttttgttctgccccataattggtggttcgtttagttttcgctccctgatctgctcgtaagttggcttcatatatatcaccacatccagtggaacaatatgaagtgtagatagtacaagaatagacacaagacgagcatgttgttctcttagatctcggatctattttcctttattgtctaatcatatcctgcctagcagaatttacatgttcctagt

SEQ ID NO: 148810 - DNA, 1072 bp, Cannabis sativa
agattcccccaccgagtggaaggcttcctaaacctatggagacgttcatcgaaccctataggcctaaggctagtatactcacggacggaaggaacataatgtatcgttaaagcggacttacaggaacccaaagtgctggcattgggagcccccgtagtcggtacagggaccacaggctttggtatgggggtccttcgctccaacggagccccaatacgaagaggtacttctggtacttccggcggtcgcttgggccttattgtatgtaagccaactcctgttccctcttgaagaggtacttctggtacttatcctccgtcatggcgatgatgtcattccggaataccttctctgtggccggagccctcacatttgggcagatgactttcgaaagattgtagtcatccaccgactgatgtcccaggataaacttggctttccaacagtgctccatcgtgaccaactccccgacgccaagggccttcttgtcgtacgtggcgaaggtcttggcccgttggagaaaaatttgagtaggttcggtctgcatgtaaggtgggatcctaacccactctgtgagaagctctggatgatccacggcctggaaaccagaggagaagaagaagcggtgacggtattccttcacgtgtttctgataattgaaagggaccaggccctcattcaaaggatgggcccggagaccgtaaaaaaccgtccttaagtttatctccctttttagggatggaaatgagttcataaaactataaaatttctgccagatttggcgagccccagctccgagcagagtaaaaaataaacaagcctgaaagtaggcggtaagcttgaggaataagttggtatggcgcaaggccgacaaatacaaggaagttaataaaataatcttgaaggggaagcatggccccggccatcaggtgtgtctgggtccaggctccgaagcccctgtagttatggttgggcgtatcctcgtctcggggcggccggtggtaggtcttggaggttgtaggcttgatgcctgccaccaccacgatctgttccaactggtgagggcaggtca

SEQ ID NO: 148811 - DNA, 711 bp, Cannabis sativa
aactataatatttatttaacataaaaattattatttatattattattgaataaaaaataaataaaactaataaataaatatgaaaattaaaaaaaaaataggaaagagttaaaaaaactcatctaagttgccaccttaactcttaagtgctttcctttatatatatatattgatgattgattgatatattgatatattgattgtaaatgtatattaaaaatatataaatataatttaatgataattagattatatcagttcaattaatttattgtatcagatgtctcatttaacaaccaatctgattcgattgaatttttaaaatttatatcacatccgatccaattatgataaatattcatgagttgtattaaatccgtcgattataattagattagatgattatctgcatactcctaaatatataataaatttatttacacatataatgagaatagattaattaggaatcaaatttattttcttgaattgatgaatcaaaattagatcatataggttgtttacttgcaggatttgaaatcgaagaagtagtatttttattattttaaaattagaatatattattttaagctacaaacactttcctatattaaagttttatatttagaatttttttagttgaaaaaatcattaaaaaatgatagaaataactgttagggtttataaaacacttaagaaatatataaatca

SEQ ID NO: 148812 - DNA, 564 bp, Cannabis sativa
gataaactcgagaaagttcatctgcatatagctcggaaaaagactggctacacgtagagagccttaatctctgcaaagacctcattcccctcatcatcaaaggatcccatttcttgaagctcagatctgtttcccaaccttaggaaatttctcaacactggagagaggctgacgcaaagatctcctggcacagggtagggtcttgggtgtgctggcttctctgatcgaaacaacaagaacttccttcccagatccacctaaaaccatgccaatcttcctctggaattcttcatcagcctgaggaggaccttcgagattgctcataagatctatacactctgggatcacttgtgaggatcggccatggaaggctatggggttcccctggtttggattggccggaagctccacagacttggaatccatcgtttcaggcttcagttgaggcttaaagtctgtaggaataaatggaaaatggttggtgcatctaggtattatgagtttggaaagataaacttctgaactcagaagagacattttggcaggaaggaagtaatccattct

SEQ ID NO: 148813 - DNA, 806 bp, Cannabis sativa
  modified_base (747)..(748): a, c, t, g, unknown or other
ttggtaattattgtatgagactccattgaaaagtcaaataaaaatttataaatgatagcttttttttgtccataagtctttacttatttatttattttatggaaatctatttgtttcctttttattttctttaaaacattatttcttctttaataatattgattttttttataactttaataatatagatttttttaaaaactttaataatattgatttactttgcaagacatatcacttcaaattttttaattatgtataaaatgataattcttattcttacacttctagaactaccaaaaaatgatcttttttagctataaatatagtaaaaactacacttcacaacaagataaaaattgaatatttaagtagttgcttgctagtattgtatattaaaaaagagaaatcataaaaaaaaaattagtattccttatcaataactttcgtggtatgcaagaaagaggttccgcgttttaattttaattatgaagctttttttttttgaaagaaattttaattatgaagttaataaaggatttttgaaatattttatcacctaaatttataatatattttgccccccctaactttttattctggctccgcccctgtttgtggtagaagatagtcgttaaatgtttcttctctctgggtccttgtattcagggttttaggttttgtcgacctattgtatgcattgataggtctttcttcaagaataggtatggtgggcaaatgttgtgnncagtggcactggatgcagggagccatatctttcagatagcttttgctatagttgacag

SEQ ID NO: 148814 - DNA, 880 bp, Cannabis sativa
ctaacatgccagtgctaggtgtgtgttcaatggaaataaaagactctgtaactttttctttaataaaatagtactttatgtcaatgtgtttagagtggaaagtacttttaacatttttaaagaaagctactactgtggaattatcgcaatacaatttcaacggcctcgagatagagtccataacacccaatgctgaaatgaaattctgcagccatattgcttgacatgtagcctcataacacgccatatactctgcctccattgttgaggatgttgtgagtgtctgtttgacacttttccacgaaatagctccccaagcaatcatgaaaatgtagactgatttggatttcttatcatccacgcatcctacataataggcgtcactaaaaccaactatatcaagagtgtcagctcgccgataagtcaacatatgatccttggtaccctgaagataccgcatgaccttcttagccgctttccaatagctaagtccaggatcactaaagtatctacccaacacgccaacaacaaaagcgatatcagggtgtgtgcatacttaagtgtacatcaggctacccacaagtgacgcataaggactaatttcatttcatctctctctttatcattttgtggacattggccctttgagaatttgttaccttttactattggtgcatttccaagtgaacaagcatgcatattgaatcttttcaaaattcgatcaatgtaagtactttgagacaaccaaagaatacctttagttctatcccgaaggatctgtatcccaagtacgtatgaatcctcaccaaggtctttcatatcaaaatggtcagataacaattgctttgtctcagacaacatatttttatcattagaagca

SEQ ID NO: 148815 - DNA, 769 bp, Cannabis sativa
tcaaatatttccgattgaagagacagtggaactcaaacagtaagaaacacttactacatgcatttacttttttaatttttagatcaataacataatatttatttaggtgtattatgagataagatccaatataaaatttgttatttttgtatttagaatagtatttttgaaaaaaaaaatgatatttctttaaaatttggaatctcgtagacgctagacacaagtctgacccacttttatctacaattgaactttaagtaaattttaagtgaaacacatagggatttattttaattgtgattagaaaatgtaattgcacaactataccattaattaagtatttttgttattattatttgaaaattttacgaaatagattaaaaattttaaaaaaattacaaaaatagtttaatacagaaaaaaattctttcttactatttgaatttttttatttataaaaatatattttcagtgaaaataataaactgttttttttttttgttatttatgatttatttatagttgtattatagttgtcacttgtcatgaaattattttcgtgattgtcttataaaattatagttttcatgaccatgaggttgattttttattatttttttagtttttttttattttttactgagcaaagtgtatttttttaattttaaaattttgaaagtatattttaataaataaaaattttaaatcgtaaaattataaatatacataaaaataatatttttaaaaaatttctttattatttttctat

SEQ ID NO: 148816 - DNA, 1367 bp, Cannabis sativa
ctgagtactttttcatttttgtcgaaacctttgagcgtagtccgcccagcaggccccttaaaagtaaatgttctttcagtacttagtatcgtcgtctgacctggtaccttattggttgtattttcttaaatgttccccattccaataccgtggtactagaataagttgcattttttcatcatatttacctaatttgtatgctccaaatttgagaacttcgaacacctgatatggtccttcccagttagttccgagtacacatgtcgtactgtctttggtgtttagaaatacccttcttaggaccatatctccacaaagaatttccaagccttcacttgcttattgaaataccgagctactttttgttgatgggctatcaactttaagtttgctgtggttcgcttctctttgatttcatcaagtgattcgaccaggagtacgtgattggtatcttggttgtacgccaatcgcctgtgggatggtggcttgagttctataggcaacatagcttcttatccatatgccatggcaaatggagtctgtctgattgccgttttctcagttgttcgatatgaccatagaacttcaggaagttcttccagccaatttcctttggcatctttgagtcttttctttagtgtatccttcaaggtcttgatgactgcttcagcttgaccattcgcttgaggatgtgccactgcagaggaacttttgatgataccatggttcgcacaaaactcagtgaaggattggctgtcgaactgcttcccattatccgaaactattttgtacggcaatccgaactggcagattatgttcttcaaaataaagtcttgaactttctttgacgtaatagttgcgagtggttcagcttccgtccactttgtgaagtaatccaacgctaccactgcatactgcactcctcctttgtctttgggtaattgtccgatcaggtcaattccccaaattgaaaagggccacagactttgtatctgagttaactcgttgggcggagctcgaggtatctttgaaaatctccggcatttgtcacatttcttaacataggcctttgaatcttcaatcattttcggccagaaataaccttgccttagaattttcttagacaaactctacctgactacatgatttccacagaatccgtcatgcacctcatataggagtcgtgcaacttcttcttgagtaacgcatatgagcaacgacatagagaatcttcttttttacataattccctctaccatgacataccgtgtatccttccttctcatctttcgagcttcattctaattatgtgggagttccctagtgttgaggttgttgggttttgtgccctaaataaaacccattac

SEQ ID NO: 148817 - DNA, 558 bp, Cannabis sativa
aatggttgcgctcagtggagtccatattggaatatatggacgtcaatgataggaaaagagtatcctgtgctgccagcctacttaaaaaggatgctcgaatctagttggaagtagtaagacagagtcacaacataacaactatgacctggttggactttgttgatgtgttcaacaggaagtactacagtgctgccatactggctgcaaaggaagatgagtttatgaatctgaggcataacaatctcaccgtcacggagtatgctaggcaatttgaccgtctggcaaagtttgcacaagagatcgtaccaaccgaggcccttcgggtcaaaaggttcttcaaggagatgaactccatgattaaaaaagatgtgaaaatcatggtggagaccaacacagtttatggtaaggtgttagaaaaaactcttgaagctaagttgctcgaaaatgatataaagaaggagaatgctgctaagtgggaagcccgaagaaacaatggaggaaatcaagagaataagagaaaacacgagggaaatcacggtaatgatcgtgataaaaagg

SEQ ID NO: 148818 - DNA, 696 bp, Cannabis sativa
  modified_base (96)..(107): a, c, t, g, unknown or other
aaattaaaaatatcaaattccaccaaagcacaacacaatatatatgactttgaaactaacaaataagtatataattccgttgcaaccaatgtaagnnnnnnnnnnnnttatatgtgtttaaattctattattttagagatttatatttaggaagttaaataacatacatggtaacaaatctagatcctgataaaataattaccaacaattaaacctaaacaccctattaagatctgaaaggacattcataattaaaaacaaatagggttcatcctaagatatgctaaaaaacgagatcaaacctgcaaggacctcattaatgtttctccgcgtttgtttcaatctcttctgtaagcaagatgattccggtctcaattggtggagtggagatagttgaatgtcattcgacatgaatgttggaccaccacaacatagagaggggtggagaaaatatctgagaaaacgaaaagatgagtaatcataatgacgcctgaagtttaaagaggtagacgatgaaatctgtgatgaaagcatgcttgcggaggatggagggtattcttgagggtgtgatctccttttcttttccctaacgaggtgttcaaaataatatgattatagggaaatgtgtaaactgtgtttggttgtgtagggtaatatgtaatcatattcctattaattaaattaaactgtttggtt

SEQ ID NO: 148819 - DNA, 851 bp, Cannabis sativa
ttgataccaagcatatcaaaattaaacactaatttagacaccaaatatgtcaaaattttcacatatatgcacatagccaaacatgatttagaatttttattgaaaatcaaataaattaatcaacaatgtctcaacacactttgattaaatttgtgacttaccccatatttctagcataaagtgtatataaaaatatcacttttgtatatttttctcaatgagattaactcaaatctaccaaaattaacaaaattctcatcaattttgttaccacttatttaagactcaaaattgcttctcaatttcgttatcttttcataatttttgaatccacattgactcatttactttgagtctaaaattgctcttcaaatttatgactcattttacaagtttggatccacttttgatctatttgttcttgctatgacaagacaattctcataagtgtaactctcatagttcactttttttatctcataaaatgagataattatcacttgtaattctcaaagaatataacttctcacaagtcacaattttttttttcaaatcactattggaaaaagaatttcaaattctctttattcacaatatagatgataataatcttcacatcaatagtaataaataatattactatattactatcagttttattgtcatactatataattcatatatcaatataaaaatattaatatataactcccacacataaaattataactcccaaataataattttatgctaattaatatattatgtaggttactaacaacatcccatgtgtaacacactcataatatatcaattattatacagctatatatgttacatatctcacacat

SEQ ID NO: 148820 - DNA, 1303 bp, Cannabis sativa
ttaaaatcaatatttataaaatcaatatttataactatatatttataactattttttaaaaaaaaaaaattaaatataaatataaatatataatcgagtaggataggataggataataaggtagggtacacatatactcgtacccaaccttatacatgtatcgtgtacatattttcatactcttacaccctattctatacccagggtcggccctgggcagaggctggctaggcctgtgcctaggacccacccagcccagaggtccaaaaattttttttctctcttttaaaattatacatttttttaccgattttgaaaaatactacattttttctaacataaagggcccaaaattttttttttccctatagcccactttgtttcagggccggccctgtctataccctaattcaacaggtaatatagtaataccatacacatacaggtaaggtacccacgggtaaatgaatttaggtaaaattgtcatttctaatgaatatagtcaagactatcttgaaaaagagacattggtcactaaaatttataaacatgaagccttatttttgcacgcgttgtttgttattggcccccctaatatttagtcctagctccgcccctgccgacaagtaagtgtaactacttagagcatttttaatagtggcgttgttgaagagaattaaaaatttctatcacttacaaaaaaatatattatcttatacacaccttcaattcaggatccatgctttcgggacaagtatcagtgcaaccatcgggcaattacgcagcaacccaacacaaccgaaacgaaaaattcaaccaaaaagagaaccaccattaatttcggtgacttcacttgagaagacgaccagaatcaattaaaacatgggctgtttcgaattcatgaaaaaaaaaaagtagaaaaactactatgaaactaaaattcaaccggaaattcaatttaatttacataaaactaatttctcacttcaattttcagatccaaggcaaatctcaaaaagttgaaatgaagttcccaaacaatctaactcaagtataatccaaaaaaaaaaaatacatcaatactatagtaaaatgtttatccttgtgtattttcattattttccaaatttttaatggtaaatttgttcatagacatgtagatagagttacgtacgtagaaacactcttctgatttttgttaggttatttttagtattaattttagattaagtttagtatatttttaattaagttttaatcgtgttttgagcatttttacgcttgttatcttttatttttgcag

SEQ ID NO: 148821 - DNA, 513 bp, Cannabis sativa
taacaaaacacagggtccaatctataacttttgcaaaacacggggtccaaaatggtatttacccttgattttattcaagatacttaattatttatttttattttcaagaaatttaattgaatagaaaatatattaagttgaaaataattttttttttaattaattctagaccaacttaaaatataatatattcttagatataaaattagaattaataattaagttgattttattctagatacttaattatttcttttttaataaatttaatatgtaagtcagaaatttgttaatttcaaatcaagttatattagaataattttcagaatatattttaataatcattcccacagattttgattttttttttaattttgaaaattagattaaagttgataattaatttgtcaattaattttatatcaatttaaatcaagtaattttcattaataatttaattaaaataaatagactaaaatatattatgttttaattagaaaattagtaattagt

SEQ ID NO: 148822 - DNA, 511 bp, Cannabis sativa
taattttcaaaattgaaaaatttcaaaatatctacattgaaaatgtattccgaaattatgttaaaaatgattattaaaataaaacaaaatatattcagaatattattctaatttaaattgatctgaaattaaaaagtttccagcttaaatataattttttatttaattaaattcattaaaatagaaataattaagtatctagaataaaatcaacttaattattaattataatttaatatctaagaaaaataatcttaattaagttggtccaaaattaattaacaaattaattttcaatttaaatatattttctaatttaattaaattatatgaaatagaaataaataattaagtatcttgaataatatcaacttaattattaattttatttaagttctaagaaaaaatcataatttaagttggtctaaaagaaattaacaaattgattttcaacttaaatacatttttctacttaattaaatattaaaatatataaattagttactagaaa

SEQ ID NO: 148823 - DNA, 929 bp, Cannabis sativa
attatttaattttttaagtattatataattattaaaaagtaaaaaaaaaaaattagtgtcgtctacagtgtccacctaaatatagtgggacagtgtagacaaacctaatattgatgttacttttaccgtgcgattggagtattttttttttgtgtgaaatcattctattattaggtttttaaaggcccattggagttggcctaatgttataaaatttgagatgaatttggttaaaaaataaagcagagttatattttaaggtaaatactattttggactttgtgttttgcaaaatgtattaattggatcctctattttgttaaataataaaatgaatcatgtatttttttcaaaatagtacaaataagaccctaaactaattttttgtcaaaataaaatttaatttatgtttctgtgttttaggaattgaaactagttttgtttctaatttatgtttttgtgttttaggaattgattttctctttgttttttttttttaatcataatcgatttaagttattgtgtgttactcattatgctatataaacagttctattttagttataattagtttgagttattttgtgttatttatttttattcattataacacctttataaaaccggttatattttaattataattgttttgagttattttatgttatttgtttttattcattatgttacagaaccggttatatatcaattataaccggtttgagttatttttttattcattatgtcatagaaccggttccaatttttagttatctccgagacatctacttctggtaacttttccggcgacaatcacttttttggtgattttccgataatactaacgtttccgacgacattttcggcaccaacaacttttctggcaaaacttattattacaagttttattaaatttttttattattatt

SEQ ID NO: 148824 - DNA, 654 bp, Cannabis sativa
tattgacatagatatttaagttgatatcctaatttttctccaaccactttagaatcaaacttagtctttttattccacttacatgattattataggctccaagaaaccttgcatatgtatcataacgtacacatacttaagaagaatatcactaatttaagcttcattaaactgacttttaaatataactcaagtcaatttaaatggttcagttctagcctaatgggctagttccgacttactccaccgctaatggaccttaaattatatttcaggatttaataaaataattttcttaactcataagaataccaaagtcttttatttgttgaaactaatacaactttatacttattttaagaaaaatagccactatactttaataattatctctacttacactatttataaaaataaataagacaactattttcatacgattattatttcaataaattttaaatactattcttaatctggatatttcgttctaccctccttaaaaaaaattcgtcctcgaaatttaactttccaagcactcagggtattgtgtatgctatgtaccacattacctccccttctaccacatgaacccaatagtcatgtatgtaacgtttgtcttatcgataaaattataacacatttaatatactc

SEQ ID NO: 148825 - DNA, 535 bp, Cannabis sativa
  modified_base (499)..(509): a, c, t, g, unknown or other
tggttttgtggaaaccctcctattaccacgagaagtcgtgaccttctgaacatgaacacttgtggtagatttcttggttgtaacaacttgcgttggttcaaccaagggagtgggattatcctctacttaagtagaagacgatggaacattagaaggagttatttctaaaagcatttcttctaatactactttactttgcgggttgaagttctttatatagtcatcttcaaggaatgtggcatttgtagaaacaaacactttattatccttgtgactataaaatagtccacccctaatctccttagaatttctgaaaaatatgcaaacctcagatcgcacttctagtttgccttctttctttcttaagacatgactgttgggattttattccctaaataaaacccattacaatccaatctgatttgttatcaataagagattaacagtgatttatgttaacatatagttttcatgtttatggtttaatatatgtacaaannnnnnnnnnnccagaacatatagtcattcacaatta

SEQ ID NO: 148826 - DNA, 704 bp, Cannabis sativa
gagagagagagagagagattttcaaaggagcgtactagttggggaccgacggtggcggcagacgagcagtgggcggagggcggctgggtttcgaaatgggtctgctagggttttgaattagggacgacgcatgaagataatgaaattacagtttgtaaaatttgagttttacaaatgcttaatcttttgctttagtgcacaaccgtggcaaatatattaacctcaatttttaactgaagcaaaagagattagcttcaatttttcactgatgcaaaatgcaaaagacaattttttaaattgtcacattttacctcggttacacttttttcatcggggtatgagccgacgctaatttttattttttagcttcagttacacaatgaagcataaaatctccccttattttttgcctcgcctcggtcaacaaatttggtgagatgcattgaccgacgcaaaaagtacttttttgtagtagtgaaatctagatcggggtaaaacattcccaacagatgctatgaatatgaaaatatctacttttaaggttttaagggataattttgtcatttctatttattaatttaatatgtaaatatctattattttatttgttaactaggacttatgctctcctatttaaatagccttaacttaagcctaaaaggctaagtcgctctaagtctcatttaggccataaagctttaagt

SEQ ID NO: 148827 - DNA, 511 bp, Cannabis sativa
tctcttgccttgccttagaattttctttgacaagctctgtcaggctgcgtgatttccacagaatttgttgtgaacttcgaatagaagccgtgcagcttcatcttgtgtgacacatatgagtaatgacatcgagaatcctcttctgtacatgaccccttccactatgatgtaccgtgccgcctttcttctcattttccaagcttcatttcggttatctgggagttcgccagagttgaggtaggccgctattggcatcatccagtttggagatgtgtcaatcatttcgatttcttctgtgccagtgatgctaggcctttcaaggaaatggatagggacaaagtttgccttgtcacttacattgctgcttgccaatcgagccagcgcgtctgcagttgtattttcgtctcttggaatttgtctgagaccaaagctttttaattgtgcgagcaggtcatgtattttgctcagatatgctatcattttttctccccgagcctcgtattcgccggat

SEQ ID NO: 148828 - DNA, 717 bp, Cannabis sativa
tttccatattaaacattagctactaaaaaatattattttcccatgtaattactaactattttgccgtacaagatattagaaattcatatgtaattgacacctcatatccaaacacaccttgtattttaaaatatagtgtaattactaaaccgtgtaattaccaccataataattactctacctaataattacacggttacttccaaacacaccctaaatattactgatttgattggacgtgtcacttttgtgactattttttttttattttttttacttaaattttatgatgaaaaattgaattaccttttaatacatgttttttttttttgtatttttttttcttttgaaatttagacaacaacaaatatgatctcatcattctcaaaaaaatatatatgtttatatatataatattgggaaatttacaccacatactgctttttcctattttatttcaattttactgttttaaagaaaatattacattttcactgtattttttttatactgtgtatgtgtacaattttttatttatttttttttcttacttttttacttgtcacaatctgcctatcacattaaataaatacatatatgttatataaacggtaaaaaatgtgtgggagtgggtttctttttttttttttttaattaaaattatattatattttaaatgatataaaagtgtgatgtgacttgtgttgtcactttagt

SEQ ID NO: 148829 - DNA, 606 bp, Cannabis sativa
tttttttttacttcatataaagaaatatcgttttttagtcttttatgcatttttttacctattttttttttgtcatgtattttttttttcaactttttttttcaactttgtttgaccgttttagtttttttatttcttttttctttttttttttaaaaacattctccccttttatgtacacttttttgcttatctttttcctcttgttttttgtttttttttttttttttaatttttcttattaatagtgtaaaaaattatatgatcttaggtgatatttagttttgaggaatactaatagtaatgtaatggtaatgaaaattgattacgatatttattttttattggaataaaatttgaataagtgataaattatgctttaatttatattcttacataaaagaagatttatatttaaacaacatgacaaatgatacgctttatcttcaagaataacctttttctaaacgtaattgatgaaaataagatatgattaacttatatgttttgatgggattttacgtgccagaggcttcacactagtatttatatatctattctatataaagtgtgcctatataaggtttataagaaatttatgggtga

SEQ ID NO: 148830 - DNA, 511 bp, Cannabis sativa
aatgtaaattattatatgcatttttattaattaaataaacaatgaagttacaaataacttttaaatcattacaaatacaacatttttttagaccaattagttatgatttcgataagatagcagttggataccttaataaaataatcaattttaaaataaaaagatgataatcatgtcaaataaacttattagtttattttagcatattaaaataatttttcattctttgtttacattttttgtatagcctaacatcgtatatgctaataaatttattagtttattttgacatattgaaacaaattttcatttttcttttcgtatactggaacaataattcatttcattttttataacctatcatatatgtcaataaacctactaatttctgtttgttggaacaattaattttttcaatacaaagtaaactataatcaaacataatgatatacactaataaacctattagtctatttttcgtatattgacacaataatttattttttgtttc

SEQ ID NO: 148831 - DNA, 653 bp, Cannabis sativa
  modified_base (124)..(131): a, c, t, g, unknown or other
  modified_base (219)..(225): a, c, t, g, unknown or other
  modified_base (385)..(385): a, c, t, g, unknown or other
  modified_base (582)..(584): a, c, t, g, unknown or other
catttaattgattttaattagtcagttataattttaaaattagactatgtctagtttatgaattttttagtaagatatgacttgattgtgaagaaacatacttttagggtttatttgttaattnnnnnnnnttatggagtctaattaataaataaaacaaatgaaaattttgtttgataattaattttaattactatataaatagttttggcatttatnnnnnnnaaattgcaagaagtggtatttgtgaaaaatagataaatgattgagaaaaatagaaaaaatctaacttatggtggacccacttgtgaccggccatagggtcttatttttgctattattttatcattttttattcttaataattcaatcctaaccctaagtnaattagtataaaaagaaaagaaaggtctcattatccaactaatgcttctaaacctagttttcattctacatacaactagtgttttgagacttcttcttcttcttttctctctactatttcgaaattcttagtcttcttcaccatcaaaattcgagccttagtgtttgagtggatgcccacccatagcaagttagtcnnnaatcatagtgtgtaagagtgtgaagaatccaaacaactaaaggagtatcgggctcagatcttgattata

SEQ ID NO: 148832 - DNA, 934 bp, Cannabis sativa
  modified_base (206)..(207): a, c, t, g, unknown or other
tatttatcaaattaggaatttcatattggcgtattcgaacaagaaagctatcatagttgaccactgttaacgaagattttttgttaactaaatttgaacctcacagtagtgatttcacaccgaaaaaataaaaactatagaaataaaaaaaatatgaacacagggttttttacgtggttttacagttaaaattctgcatagtccannagtcaatcttattcagattttttattgcttttctcagggcctctcttgtatgagtttttttgtcccccttttgatcttttctgcccctatttataattataccgtgggcatttaattacaaaagttgattgtgatctttacaataattattttctcaaaccataggatttgattacaaatcacgctaagtaaatacagtttttattaaaattcactcagctgtgaatatcccgcttttattggactgggatgaacgcatattaaagatatacggtaagccttatcttatggggatgcctcactggcaatggaaccgagttaactttgatgtcgagctggtgctcgtcatatgacttcccgaggttgatattgttttaattttgataactatagtttctggtatcgagatgatctttctcacgtgcatgccatcttacagcgagatagacgcctcgctatccatcaccttgactccccaaactatttatacttagtttgtatatcatgccatatacgctaagtgttttattgttatcgtatctcttctatgagacgaggttaatacctcgtcatgcacacttgcattcacatggtttctcgtcgatacataagttagcagttagtatatttctgtctcatataagactgttcagccaaccgagttataaacatactttgtaaattgtatttctaacgagttattccatgccaagtgtacttatgattg

SEQ ID NO: 148833 - DNA, 627 bp, Cannabis sativa
  modified_base (557)..(565): a, c, t, g, unknown or other
ttaaataattataacgtacacaattatgaaaaaatttagactaaaaaattcttataaatactgaaacaattaggagttgcatcagtacacccattacccattttaatgaagtgtattatagaagcacccaaaaataaatacacaacataatgtttttttttgatagattttgtttttttttgtttttttggtgaaatgtaattctttcattcaactaagtcaacacgaaaaaaaactgaatcaaattatatttgaattttatttttcactgtaaagtactatagtatttttacaggttgttctacataaataaacatatagaatcataaaaattaaacttttacgtgtcgaggtagataggagatgtactaatactatcattttagatggtatactataaaattatcctctcatatttaccacaataaatattactacaccaagtatatatatctttggcccaaacatttttatttaaatgttaacataattaataattattaattagtgacaatactaataattgagtaattacataaggcactattttttgtaannnnnnnnnatttttacgttcaaagaatgttattttacatttttacagttttttaaaaaataacacgaaaa

SEQ ID NO: 148834 - DNA, 831 bp, Cannabis sativa
acttaacacagtacacactataaaatttacacagtatttttgaaaaaaattctgccctacagtaaaaaaagttgaaaatttgattatgcggtgtaaacatctcaattttaaaaggcagcacttagtactttatagatgtcatatcaatattagtgaaattaaatatgacattttatataatttaatttaataatttttgtggaatatttagtaactaatgagaagacaatacctataactagtgttaagtactactaatgctcaataataatgctctttattattttcaggactaacatctcgtacgtgttgaggctttaatttccactctgtggtaaggtgaggaggtactatgtttgttaggttttaagctttaattaaaaatctcaatttatttttgtaaccttttattaagaaaaaataaatttactttgacttgatcaatcacaatactcacatgtatgattatttttttaatattacttttttttaaatcccgagaatataaaatattaatttaaaatcttatgattagtaattatacactactacaatatgtgcctttagcttcccttttttcaacctattttataaaaagagaagttaaagggtggaaaaatacatgcctattgaaaaattgaccttcagaggcgcttttttttttttttttttttaaaaaaaaagcgtaggtatagaattagattataccatttagagtcggttggaaattaaacgatgggtcgttttgtgggagaggcctatgctgccggttctttaataataactgacggcatagggtacacgtgaaatttgacacgtgtaccctatgcc

SEQ ID NO: 148835 - DNA, 614 bp, Cannabis sativa
gcgtgaggagagagacacactgcgttttcaagtagtgttcaatgggtttttagagttttgcttatgaattctaaaaatatcgaaggtattcattgtccgtgtgtagactgttgtaatggatctaaaggaaatagtacaatgattaaggacgatgtgtatttaagaggtttcaatagaaggtatactacttggtattggcatggcgaaaacttagctggtgatccatatccattaggaaagcggggggtagatgatatcgagggtaatgatttcgatgatcatccattggacttgcttaacgaagcacaggaggaatttcttaatgatcgtaaaaaattcgataattttctaagtgatgctgataaacccctatttgatggttgtacaaaactatgattaccaacaatggtaaagttttacaacataaaagcagaaaatagagtgagcgataaatgttttactcaatttttagctacttttaaagatatcttattatttgacaactgcttcccggaatctacatatgaagttcaaaaacgttcaatttcataggattgaagtatgaaaaaatgcatgcatgtccgaacgattgtattttatatcgtaaggaatat

SEQ ID NO: 148836 - DNA, 686 bp, Cannabis sativa
agctcatgcatggaacagaactttggtgaaatgtgcttaaatctatcacctttgatgaaacctcattttatctgagctgacatgcagcattatcttcgtacagaattgtgggacattccttcttagaaatatgacatgattcccaaatatattgaatgagcaatctcaatcatacacattctcggcccgcttcatgtagtgcaattatttcagaataatttgatgaagttgcaaccattgtttgtttagttgagcgctaagatatagtagtaccaccataggtaaataaataacttgttttttgtaatgccctgatgcttaggcgcgctacagtgatttttcaaatgacatactaccatactaatcaaggatttttttttcaaaaaatcgtgtcaaatcaaaactttgaataaaattaataaactttataaacatacatatattatacaaccgggatcctgtgttaaagcttttatatataaacattttgaaaatatttttacagcttgtcgcacaacgctacaaaatatattccaaaatgtctcaagaccgaatactccaggttgctccgtcttgacatgtacaatcattgcttgagctcggaactcactcttgttcagcttccgcctttcctttacctacacatgaaagtagaatctgtgagccaatagactcagtaagaaaag

SEQ ID NO: 148837 - DNA, 520 bp, Cannabis sativa
  modified_base (32)..(37): a, c, t, g, unknown or other
  modified_base (104)..(114): a, c, t, g, unknown or other
  modified_base (208)..(209): a, c, t, g, unknown or other
agtcataacagggtgagttccttgaaactctnnnnnnacgacaaggtaccgtgacttttttgtctaagaatataaatggcattgtcctcttcggttgtgtcaannnnnnnnnnncagtgggaccatcttatacataataagatgatagaacatttttggaatcaagaaaaaaaatatgtcctttatttgctactttgttttcagactnngtcattttcttaaaaaagtagtatttgttaaaacaaacacttgcttatctaatgactatgggatggtccaccccgaatcacttagaatagctaacaaacatgcaaaccttggttaatagttctagcttttcttattctaactaggttatccatgaatctagtaatggtttatactgagtacacaaccattccatcattctaaaattttcctttaactaggttatttcctttgaaggacttaggcaactactagtaactaattatagaccttatactatcatcaataagcaaatcaaatttctggggaggta

SEQ ID NO: 148838 - DNA, 642 bp, Cannabis sativa
  modified_base (329)..(330): a, c, t, g, unknown or other
cttggttaaatcccactaacagccactacaactagcttaatcctgtctaaaacaacataagaaacatccagaaacaaaactcaaacataaacaattaacacagaagcaaaagcaccattataccattgaaatccaaagttttgagtctaaaactccatactagattaaatccaactaacaaccataaaaacctgcttgaatcatcattttaaaacataactaagcttcagaaatcaataacaaacacaaacaacagccacaaccacaaattcatcaaacatgcaacaatttatttttctaaaacttcaagaaaacaaagagaagcttgnntaaatattacctcaacttgaattactctgagatttgatgaaaacttgctgaactgatgaacaaaataagccatagcatgcttaggattttcgagagagagaaagagaatttgagagaggaagaaatgtgactttttttttctttttctttgatttttttaaaaatgaagaaataggaccgtttttacttgaattaatttcagcaaacaaagataatacaagctgaaaacaaaaggaaactaagtccactgaaggacaaaatatcaatggggcaaaatgaccattttgcccctccgcactaaaataacataaa

SEQ ID NO: 148839 - DNA, 511 bp, Cannabis sativa
aatgattgttagtattttcccaaaaggacaatgaaacgttctatcaagtttgggagagatttaaagatcttttaagttagtgtccatatcatgggtatgaaagttggagaatcgtgagctacttctacgaaggcctcacgggtcgtgagcttcagttagtggagtcgatgtgcaatggtgaattcctacaatatgagcgtgaagaagctcttgagtttctcattggctcgctgaaaaatctcacacatggactggtccaagcgctgctgaaagcaccaacagaaatcgaccagctgggatttaccaattacgggaagaggacagtataaaggccctagtcgaagctttgagaaagcaagttgaaatcctttcaaataaagatggccaaaaagagcgtatggttgcccaagcacaaaccagaccactcgaaccttgtttcgtttgtggagaaaatgagcatttagctaaggactgcttagtttacaaagaaatgaggggggttcatgaggag

SEQ ID NO: 148840 - DNA, 681 bp, Cannabis sativa
caatattcaaccatagtgaagtataggttctacgaatatatatgttgtggtgggatggatgaataaacaactgttatatctgtgttatttttcaaattggcatgtttaaaattttgggggcattcaattacaaccgttatgttgcaaaaatttcagtagaattaggatcaaatttgatatattatggtgtattttgtataggatcaactcgctcaaccaccttcaagatgtgatgtgtcgaaggggaaaaagctcccatgccttctccactaggtggtcatgatgaagaagatgaattattctcacgaaatgtcatgaatttgatccctaaatcgttaaaattgatggttgctgaatttttgaaactcaaagataaaacgtgatataatcacaattcttgtgcctaagggattcataacaccgcgtacccagatcacgttatctggagagaatttgcagcaggttgcattgtgtgacttcatcggcaaccagggaatgtttggaatgatgtatactctttcttaatctaattaacctaatatatcaaattctagtgaaattattataaaacactaatacttaacaattctatgtaggcacatctgggagagcataaataatttgagaaaaattttcaagttttacgacccagagcttctcgcagtgaatggtatcgacgat

SEQ ID NO: 148841 - DNA, 545 bp, Cannabis sativa
ctaccgacgctgttccaggtgacggctgaaaaaagcgactctaaaggcttgttttgtagtagtgctaaatttagcctaccataaatattacttttttattttctataatgccactaattattataatttattgacttttataaaactttatttattttatttattatattactattatttaaataataaaaacataaaaaataataaattttatatattctcaataaaatatgaaatgaccattaatataataaattatttttttcttatttacatcttgtgcattggagcacaattgtaaataataggctaaatataacacaagctcatttttgtgccaatttagtacaaattttaaatcttgcattggagatagtcttaagtaatacaaaattttgaaattgtacataataatatacacaagatttaaacagggagaccctcaaatataatagatcataggaaaagaaataaattttagaataattacataatgtacaattttttataaaaaaaattatatttttacttttaaagattttttt

SEQ ID NO: 148842 - DNA, 529 bp, Cannabis sativa
ccaagttccaccctggcgtcatcaacgtccttcctggccaagtccacctctgccctcatggtgttggacagagccgcgttcttggaagcagcagacttagccctgcagtatgtgtaggccaacttcaaacaggcctgcacagagaaaaaactttagtatttaagccaagtaaagaggattaaaggaaatcgtcaagaaagacttacccttgtgaattccttcaaaactccacccatcagcagctccagagaagagtcattgtcagcaccggccaattgctcactaacctcaggaataaactggttcatatagtgggcgagcatctccttgcctttcttggcctttggaagcactgacaaaggtggagtagggatccgcatctgctcaggtccactcttgatcagctcagatccacctttcggttgtttaggcttgtctgaactccctcctcgagactccttagacttagaaacttttggagtagaggggtttgcaaccgttagctccttagaaagatcaatgacctccc

SEQ ID NO: 148843 - DNA, 1107 bp, Cannabis sativa
  modified_base (1059)..(1071): a, c, t, g, unknown or other
aagaacacaaggttttaaagaggttcgaccccgttcagttcggtaatagcctactccccttaatttgtattaactcaagaacaaagaatacattgtttcatctcttgaagctctcacgatggaatctctgagtatgctctcttagatttctctaaagcaattctttcgacccctttaccaatgagaatggatcattatttatagggctaaatacttgatggaaggtttcccttttacttacaatgtctatagttggtaagaacatatattacatatttagaatacacaaattgtgggatttggacaacttgccatatctctatgatatgatcccagattatagggattgcttttatgcttcacgatgaaagttctggaattgctaagtgttaatgcactgctcggattgtccactgctcgactgggaagacattatccgtataggtgtatgctatgctctgtttggaacatctcttcagccatatgtagggaatcaggtccacgtgtcaccagcatgtgctgccacgccatagtgcaaaaaatgggataacatttgtcgccaagtctgcacgagacttccaatgttacgtgtagacttcactcgagccgaccttacatctgaatgggtgacacgtgttggatgcgtctgttcgtgatccgatgtgactctgacctggcgtcccttcaactttggctaattaatgctctgattgaagtataccccgagacgcgcatttcactcgcacgcttttgacggttactcttcttcaggtacttgattgcttttaatttcgcaatatttgcttttgggggaaaattgaagcgtttgaaattccaatcgattacacccttccactaatttgcttacaaatagggcagaaaatccttataaactacttttaccatttttcttgctaagtacttttagagcgaaagtagtattttctcttgaatccgctgtggaattttagcagaaaggaccgatcagctttgtccgaccaacatcaaagcttcgaacagtgagaaagtttcttatctttttctcctttattcttgaannnnnnnnnnnnngggtttccattgtagaaaattcaatcgttcttgact

SEQ ID NO: 148844 - DNA, 883 bp, Cannabis sativa
aaccggggctgggacctagaatcgaacctggtctcaatcccgaacccaaacttggacttggaacccaggaccagaaccagacctagaccggtaacagggatccaaatcttgaatcgaaatccagtaactggggcttggaacagacccgtagtcgatgtttgaatctgggactcagactaggacctgaacccagtctaggacccaaacccgaacccagacctagacccaggacccgaaactagcacctaacaagaactgccggatcaggaccgtgtaacaagactaggaccctgaccaggacccagacccagacctagaaccgaacttggaccaagcccaagagccaaactgagaaccaaactcaggcttaatcctggtcgtgtacccagatcggaaccgagaattggattagacctaaatttgggacccaatcccaaatacagacttggacctagatagggattaaggtacgaacttggactcagacccagacccagaccaagatcgaaacttgggacctggatcaggacctagatccagacccaaacccaaacccaaacctggacccgcactagggacctgaacttagacctggaccgaacccagacccaaatcgggatctagacgtggacctatactcgaacaaggactaaaaccccaaccctgacccagacccaaaccagaacgcagacacagaatccgagtgtgggtctatgtcagagtccgcaccctggtccagttacagttttgggtttgggtccaggtactggtcctagtcgtattcttgggtcccgatccgcttctgattttggttctactttcaagtcatggggtacgggtcgagtccaagcatcgagtcctggatcctaagtctcggggtggg

SEQ ID NO: 148845 - DNA, 528 bp, Cannabis sativa
  modified_base (64)..(65): a, c, t, g, unknown or other
ccgatacttagaccttagacctgagaaccgaattgtgacccaaacctagaccaagccaagaccnnagacaaggaccagtaccgaacacggactgggacctgcactcagattgggaccctaacccagactgggaccttggaccatgacttgaatcgaggacctgaacccatgactcacgacccaagacccaaacctagacgcaaacctccacctgacactagaaccatgacccaagacatgagctagaactggactaggatcttgattttggcctgtgacccaagacccaagaaacgaggcttggaccaaacccataatcggtgtctaaatcagggaatcgaacctggagcaagacccagacctggaccaaaacccaaatccgtacatgaactcaaactagactaaacatgaggtgggtatttggatttgtgaccgagactcggacctaaacccaaacacggacctagacccaaataaggactcggacccagacccactcccaagccttaaatcataccatgtgacccg

SEQ ID NO: 148846 - DNA, 965 bp, Cannabis sativa
  modified_base (568)..(574): a, c, t, g, unknown or other
atgcgtgaggttgccagcagcaggggcatcttgcaccaaaaatctaatttttgtggattttttcaacaagttttgatatttccgattttcaaacacctaatatctaaataaaatattattttaatatttaaacttaaatatgaattttacaaattaataatatttaatcttttaatagattattattaatgtatgataattgattattttatttttatctgtggtagatttcaaaatttagttaatttctttaatatttatatattatttaattataaggttagatattttaatattaggtatattttaaattaaaagagagcacgatctttttaatttgaaatattatattaaaattatcttatatgatgaattaaataattagtaaatttaaaattcacctagatattttttttatcgatattctaaccataatattttcaaatttaaaaataggttattttgttaaatatttaattgtttataaattatgagttagaaaaatgatattttatatcattttacttatcaaaaatttataaatggtattttaaatatttaaataacnnnnnnntttttgtagaaatttgaaaaaggcttaatttgagatatcataacatataatttggataattattatttgtttattattttatttttaaaataatgattgcctaaccatacctattttaaattggtttatttttttattttgttattttttttattttttaattttattaaattataagatttgattatatctatttagtgatttttaaatcatttgtcttaaaaaattaatttatttaatttgataaaaaaaataatatatataaataaacctagatattttaaatttagttggaattttaacttttaaattttgaaaagatatttaaggttgtttcaacacctaaattttcaaaaatttagttggtaagttaaataataatttaattata

SEQ ID NO: 148847 - DNA, 546 bp, Cannabis sativa
cgaaaaaaaaaagaatgaagaaaaaaaaaaaatcaaccgagagatcaaaagttaaaagtgaaaaataagtgatgtctggaaattgttaaaaaatctcaattattgttagttgtgggaacatttcaggagaatttaattggtgaaaagtttgtgggttctattgtgcttatgatatctttagccaaaaatgtctttcattttctgaatatctaagccataaattcttaccctaaaagtctttttgattccgaaaagaatgttgtcaacattagtggagagaggtaagaatgcaagcatatgggctattggtttgtggactggtttgatggagtgaaataattatgacattatttcaatactgaagttaatttgtatctgtacattgtttttcaaagttagcatcataattagttgttagagtttttggaattaaaaatctagtttagttaatggaaggaaatttcacatgagccagcggtaatatgattatatgatagcttagttaatcgagttttagtgttagtcttagtcttactcgagggcgag

SEQ ID NO: 148848 - DNA, 797 bp, Cannabis sativa
gagtagtgaaaatgtgtttgtttgcttaattttagttagttttagtttcattttctatttagtaagctaacttttaagtcttgtaaaaattgataatgttaggtgtgtttgttctaattaattgtacttgtttgttgttgaaaaggaagaattaaattgataggaaaaagaaaaggaagcaaggaagaagtgggaacaaaagctgaaattggggcaaattgctgaagcaatgctgaaacgaattcagcattctgacagtgacgtgggaacacgaaattgagctgtccacgtcagtaggagcatgtttgttacttaaaatcagactagctgaatgctttgcaaagggaggactaaacctagtgggccaaagtgcaaaaaggattgggcttataattttagggtgtgatttttgtaccctagggacccaacaacaaaaagaggaaagaaaagccaagtacaccatctatctttccatcaatgagaggagctgcatttggaagaagaagtaattgcagagggaagtacaacaaagtaaggaaagagaaggggaccaagccttgtgtttgattttcttctactcttctttattatttttctttcttctttcagctcttttctttttgcttgtacttagttattaaaaaaaaccttgttgaactgtaaaaatgggcagcaaccatggaagatagtttttttagcttggattttagtttttgaattgaatatgagctagacttttgaggcttgaatggctatgaacttctatgttgggcatgattaatttttaagcttacttt

SEQ ID NO: 148849 - DNA, 588 bp, Cannabis sativa
gattgtcaacctgaatgctaggacacatttctaggagcttgagtttgtggttttctctctgagtttgcttgaatcttcaatatttcttgtgacgaaattaaaaatgctcagaacaatttttgataaaattgattggaaacaagccaggttaataatatgtcaacctgggttcattgctttgcccctttagaaattctgtttggtccccgaaaatagttgaatctcaatattttctcataacgcagaagatgctcaaaaagaattcttgaaaaactccattgaaaatggctcaagttgacaaatgtcaacctgggcgctaggccctataattacacctaagaagtgttgtttcttcttctaaaggacctatttccttgtttttgatgaagacagagaagatacaaaagtaagatctctgatctaatacttggaaggcgcccagattgacagattatcaacctgggcgttgggtcctcgggccccaaggtgctcaaaaatgaacttgctccaattttgattatgatgcctcaaatatatccgcggtatgtctagttgattcccaaggcatgttttgacccttttgcacta

SEQ ID NO: 148850 - DNA, 570 bp, Cannabis sativa
aaacataagggggttttgccacaaaaaaaaaataagggagttaagtgtataaaaattaaaacataaaggagttttgccgtaaattactctttttttatatatataatcatttaaataatatattttcattatacattttcaataaaaaacttaaatgactatgttcactttttgagatagtttttactgtgtattggagtgtaataaaaaaattgaatttatagctcatttggtacgcaggactgaactggattagacaaactaatttgtccagtccattgtttgggcatgttggaagtctagataattaatccagctaatgtcatttgtttggaattatttatctcatccaacacggtgggataaataatcccatccaggtgatatttttttaattgtttttttaattttgattttattaatatattttaaatttaataagaatttaagttaaagaattacctcacatttatttataaatttttttataataacttattcattaaaattagttaaaatgtataattttgaattatcatacagaagctttcaaaatttatattaaattag

SEQ ID NO: 148851 - DNA, 666 bp, Cannabis sativa
ggctcacgggtgctctactgtgcaggaaagggtaaatctgtctctaatcagccatgagtgcaggagcaggataatgtatgtacatgttcgggctacactagaccaagcgggttagggtctatcattgataatttttgtaactctgctttgccgcttaggtcggctagtggaaaaaaacttgtaataatattttgtaagatatttttggggtcccgagacatgtaactttttttggtttgtaaagttaaaattactacaagtcttttttattccttttgcattgaaagtttaatttctacgcttattttattagtaatcccatttagggtattcgggtttcttaaattatcttgggtaacgtgcctaatagttagagcgttacaatttggtatcagagcgccaaggtttttaaacttcctgtagaccagacgaacatgtacattcatcgtcagagacaagctcgactcatggtgtagtaagtgctgcgagtaaatactttactgcttatgtgatcatttatttgtcgctttccattctaggcagtatgcaagcaccttgagtatttaggtgttatgtgatgccatactttaaatgctatatgattaagtgtttatttatatggagtaaataattgacttagggttaaggcaataagtgcataagtgt

SEQ ID NO: 148852 - DNA, 534 bp, Cannabis sativa
attcggtacagtaggagtagaggagcgatgtcttcatattataaaatggttgagggcatttatgtagttattttgtgatttacgtatattagtaaaaattccccttctaaattttcccttttttttttcacatatttgtagtaaatagacttgaatttgctaataggcttggatatctacgttttggacttattagcccaaattgatttatcttgggctgctgtttcattatacttctaagatataaagttgtaggctgaaagtatattatttgggccatgggcctataataccattttttgctacaattatttttagtggtatttacataaatatgaaaaaaataaaactaatttaaataaatatggtaaaaaaacttaatagaaaagaatatggtatttaaaataaaaacttaacatatgggattgaattaccataaatattaaaattcccttcatatatatatatatactaggtaggagttacgtgccgaggcacgtaaatattagttttaggtaaagtttagtttttttt

SEQ ID NO: 148853 - DNA, 725 bp, Cannabis sativa
aacctgactagaaggaattagttattcaagccatttttacaattttacaacttttatcttgcaaccaattttttttttcttagtagcagtaatttaattctaacaaaattaattcatgtcatttctaattttgaataattactcaaccatttgcatattatttctttttattttaagttgtaattagttagttttacaagatatttttgtttgcaatccctgtggagacgatcttacttatcactttattacttgtgtgactgtgtatacttgcgtatataattttcacaacagttctataatataatgaacaaaaataaaaaaaaaatacagaataactcaaacaggtcattattaaaatagaaccgattctataatataatgaatgcaaacaaataatatagaataactcaaatcggttataattaaaaaaaatcaatttcaacaacatgaggcataaattaaaaagaacaagttttacaaaaaaaaatgaataaaaacatacaacaaacaactactcataaacaaattataattttttttttaaaaaaataagtaatataaatcataccacatcacaataaatagcgcattttttaggagatagttacaaaataacaccaataaaatgttgttaacgcatattttcgttaactaaatttgagcctcacagtagtaatttcacacagaaaaataaaagctatagaaataaagatatgaacaca

SEQ ID NO: 148854 - DNA, 730 bp, Cannabis sativa
aaaactcataatctatacattaacataaagtttagatccattgtagaaaatagatattagcaacttgtgaaagttatactgtattgcaaatgtattctagaaaatgaaattgaaaatatctatttagaatctaaaatataaactcaaagacttaaatttaacgaaatatttctttagtaatgattctttcttggaccaccactacttatctaactctaagtttaagttgcctttagtaagcatatacaagtaggagattctcaaagatcgaggattcatttcattttaggatagaatattttgtatatagtcatctgcgccactcatttttatagaagaaaatagagtgatatcataagcatatgttttataatcctttttatcaaatgatatactttctaagcaattttataataacagaaaacaaaacgaaggttcaatattaattcatatactattcaaaaattattaagcatgtagcaagtaagaaagacttgggaaaataaaaaataattatatcttaaataatttctaatgtttccaaccaacagatatacagtgtctcggtaggggagagtcaaatataccatcatttgaatagagtagtcaggtcatctaaaatgaacaacttttagcaaccttttattcgatcatataagaatccaacgttgtctcggtaggcgagagtcgaggttattcttattttatgagcttctacgattatttcata

SEQ ID NO: 148855 - DNA, 877 bp, Cannabis sativa
aataaatttcattcaggaattggaatttattctttagtcctctggcttagaagtttattcttcagagtccttaaaaatagaatatcctaagcaattagccctcctattcaaacccagaaatttccaattttggtccaaattgaagataaacgatgccaaaattagagaccatttgattaagtcaaaccaggaagaagttgccagacgttataggcgatttctacaagagatttctgagggcaaacttcgttttttgcgagacgcatcttggtctgaacacacaatattatcttctattccactcgcaagaccaatatttttacctgaagttagtgttgcttttgatccaggtcaccttgagtttgacattatgtctcctaagcctcgtaaatcaaagaccgcaaaggatcctagtgtcacctttgaggctaaactcattgaatccaaagttaggtcaattggggcttacattggcggcatactaaagtcctgcgatatcaagcagagaaagggttgtatcataaggtccgtggctttggggaattcagctattttccttctgaaaggtaatttgtgaggagtacagtggacctagcacgagcaattcctcgggcattgatgcttggaggctcgagcacatcaaggctgggtagttctatcccttagggattactttaaggaaatctgcaactatctcggggttgcccccatccagctgaaccccatctcatataggatcctcgcgagcttgaaggtcctataccataatttaagatgggagtgccctactccattggagatagtctatttttactcagttaagacggttcctacaagtaatcgagctgcaggaggcttttactatctcggcactcac

SEQ ID NO: 148856 - DNA, 705 bp, Cannabis sativa
caatccgtgaaagtacaataacgctacaaaatcatatccctatatgtatatacatatgcatatacatatatatttattcattatgagtacatgaaaaaaattatattgtattgctatattgtcaattacttttttttatattatatattttgtgtttgttatttaattttttttgttaacatatttgttagttacttgtttacacatattattttttactaataaattttacatattactttatatgttgtacatatatatttatgtgtggtttatgtatatatgtagatattgtcatgtaatcttttttattatttattatttgtagataaaatggcttgtttaagtttagcaagaaagcaaaagttaattattgtggtgcagaatttaactgtaattttagatgttattttaactgtatgtactattgtgagtgcttatgtatggataaattttagaagacgcctcaatcaaccattatccataatgagagtctacaaacagttagaaaacttgcatgatttagtatttgcaagtgatctcaattgtgtttcacaattgagaatgaatagagaaacatttcaaaggctatgtaacatacttagcagtaggggaaatttaagaaaaacaagaaatgtctctgtcgaggagatggtagcaatgttcctatacattctagcacaccaccataagaatcgagttgtt

SEQ ID NO: 148857 - DNA, 591 bp, Cannabis sativa
  modified_base (493)..(521): a, c, t, g, unknown or other
cggtctcggcagtaatctgaaaaaagaaacaagaatgaaatcagatgccttagacaaaatatcaaaggagggaataaattacaagtactcaccacggccaaagcagagctgatgtcttggacctggtaaacggagttcaaggaggcacaagctgcatatctcttggctgggaactaagtcaggtgggagacaaactcgctggtcatctccgaggcgaagggagctagggtaggcccgacaaagcggttgaaccaatccgtcaaagggtccatgttcaggtcccaaggatttcggaaggcttcctcgtgcaaagtgttctcctgctcctcccgcatgatcttctttaaggcctccaccttatcgtgtccccgactatactcgtccagggcctagttgtgtttggcaactcggagcatttgcctctcctcatccgcaggaaccggggtcaacaaaatgccgtgcggcacggtgtactctgttgggttttatgccnnnnnnnnnnnnnnnnnnnnnnnnnnnnnttatcaatttagaagtgaagtatgattacatgtatgttacatgtttatggtttaatacatatacttgata

SEQ ID NO: 148858 - DNA, 505 bp, Cannabis sativa
tttttttaaaaaaaacaagtagcatttagtttttgatattaagaatattaaattttaaaataaaataaataaatataatgcatttgacccctcccacgtctccatatttatgaattaacagaagtatcgtttttagaccgacaacactttggctcacaacggatcacaaacgactttttgaactagtggcactttgggctcacgacatatcacaagtggctttgataccatattagaatttgggaataagatgaataaggttccatctcaaaactaattgacaatgggaggagtagtccattcatcttatatatcacaatttatttctacgcattaacaatgtgtgactaactctaataaatgcaatattgttaagaaaatttctaaagtagcatcttgctcttatttttttagctgtttgtctctaattgatagaataaactatttagtttacatcattagtttaagaatgaggttttgttctcaagtcgatctcattagggtc

SEQ ID NO: 148859 - DNA, 742 bp, Cannabis sativa
cggttcagaagggtatgctactgggcataccacacaaagtcacagtggtcagtcgtctaatccacggccacaggtctaactggtggaccacacggtagacgactagatcctaccggaccgtcctttgggtggagttatacacaccagcttcacccaaactgaagtctctggccaacttgccggccaaacaagttagacaccaaggccacctggtaattcagtatttgataggttgggtgtcgcaaatgaccttaggactgacctaaatcgaagaaggggcctagacgaacaatacgtcccaccaactgtgcagccatgtatccgcatccaggatccagtttgaagagatcccaatgtgacacaagccgatcaataggccgaacaagttcatccatttgtgcaagcataattggattaactttaaaacatggtacaaggcctgaccggcccaaaactcactgatcttgaactcgaccgagcacgcggatcacccttctcccctgagattgaggtcctcgaattatctccaaagttcaaaatgtcaacctggaaaatatatgcaggaaaagaagatcctttatcatatctgaagtattttgagatgcaaatggacttgcaagggataagaggtgatgtccgatgcaaaatatttcctaccacactcgcaaaggctgcccaacaatagtatttcaaattgtctccaagaaggtttaactcatggaatgccttctcctcgaagttc

SEQ ID NO: 148860 - DNA, 926 bp, Cannabis sativa
ttttgttatttaacaaaacagatggtctaattagtaacttttacaaaatacagagtccaaaataatatttaccctaataataaatgtaaaaattaatatatatttattaccgaaatgtcatgacccctattgatcaaagtagcttgagcaggtttgtattgggtttgtaaagcccctaaatttggggtaaattggagtcttgaaatgttaattggagattgacttgttccattcccacaaaggtaccaactctcattaagattaccccattgagagggtcctctcccactactttcatcataagcatatatgctatcataattatctgctcaaattaattattataccttcaaaatcataatatatatatatatatatataactattttatgtatagaattaattcatttaaatgcagttttatttcataactctaaacttattatttcattttattttgaattgattgtgtgtgtttttattttattttttttgtcagtaaatgcattatcgaataatttcaaaattgttggtgtgttttagagaaattttactaatttttttttataaaaaaaataatttaaggtataaattcttaaatttaactttcgattaaaaaaaatgcttataaatttaatttttgatagtaataatatataagttatattactaaaacttcagtgggtacctaattagtcaggtcaaataaggtcacatggcagtccttgattaggcaggtcatcacttttttattttttatgtaaaaatttatttaataccaataaaaaaaaaatgacacgtagattttaacttgagacaaatataacttaaatatttttattatcaaaaattaaatttaaatatttactctacaaattacttaaaaaaacaaaaagttataactttatatgtgtggtggacatttg

SEQ ID NO: 148861 - DNA, 901 bp, Cannabis sativa
aagggtaaatattattttaaacttgtatttgtaaaagttattgatagaatcattatttattgttaaatgataaattagactctgttttctaaacaatataaaataatagttgaaattaatttttgttaaacttggtttgttttgaatctgcatataattagattctttgactgaaaatttcttcgtaattttttgaagaaacaagcaatgtttatgcaaaattaatttttaatattacttttataattgttaggataagattcattaagttcttaactacgaaaatattataaatatatatatatatatttaaatgtgaaaatataccttattcaaatacaactttaattgaacggcaatacatgataatatagtttttgcaacatctccgtacatcacatcatctggtatttcggtctcattgacaaagagctataatttttcatttgaatgttatttattaatgcatgtgttattttattgttcactgttataattcatgtaatacaacgtcaatatatattaacaatgaaaaatataaggcttcccaccataataattacaaccttaaaatttttatattataattgttccttacattattatttaaaacaagaattttaaattattaaattaatttaaagttgaattaataataaataaaataaaataaatcatgccttcacaagggtagcaattcgatcgtttatagtacgtttgaagcacctcataattatctaaagttgttatagactattaaatttggatgagattgacagtaaatcgagatcttttagatatttttagtgtaaaatttttcatctatttataatgtattttttttatttgaaaaaatttattattcaacttttcaaatattattattaggggaattatccta

SEQ ID NO: 148862 - DNA, 652 bp, Cannabis sativa
tttgccaaattttataatcgaaagtagcagctatggagagaagtattctgatggatttgagcatggcggccggactaaaagtatcctcacaggccacaccttctatttggttataactctttgtgacaagtctagctttaaaagttttgacatctccacccgcacctcttttcttcttgaagacccatttacatctaattggatgatgatcatcgggttcatttacatattcccaaactttctttcttttcatggaatccatttctgaatccatgatggctgaccattgtttccgtttctgactttacatttcctgtttatagctaaatggatcgtcatcaataccgtcaccaatcaccatattgatttcacaatctaagccataacgagctagttttgtggaaaccctcccactacgacgaggagccgtgctcttttgaacaggaacattaataatagtttcttggttgtatcaaattacattggttcaaccgagggagacggatcatcctctatttgagtagaagatgatggaatattagttggagcaatatctaaaatcatttcctctaatactacttttctttgcggcttgaagtttttaatatagtcatcttcaaggaatgtttcatttgtagaaacaaacacttta

SEQ ID NO: 148863 - DNA, 947 bp, Cannabis sativa
cttacccaacaaagatagattatactcacgcaaactccgaaaacccatccctccagagttctcagttttgcatagtttcctccaactaaaccaacttacccttttcctgctacccaaactccaccaatacttagacataaggcttttcagatgtgaacaagtttccaaaggcaataagaacacagacatagcaaaacttggcaaagcttgtgctaccgtttttaatagaacttcacgcccaacagtagacaagaaacgaccctcccagctttcaatgcgcttctgcattttgtcttttaagaacccaaagatagcatccttatttcttcccatgacacaagggagcccaaaataagtactatgttcatctgcaagtctcattctaaggatccaacacaatcggtctcgagtagcattaggcacattattactgaagaatacagaggacatactgaaattaacctgttgaccagaagcgatctcaaatagctgaagcatatataatatattcgaagcctctctatcagttgcgcgacaatagacataactatcatcggcaaaaagcatatgagatataacaggagcaccagtagccaccttgcaacctttaagcctaccatcccgctcaaaatttcgtatcataaatgagaagccctcagcacaaataagaaataaataaggtgaaagaggatcaacttgtctaatacccctcccaggaacaatcggacccagctcatgcctgccatgaattattttataccgcacagagctaaccgtagcaataacaagatcaacgaaatgcaagtcaaatcccattttactcatcatagctcaaagaaagtctcactccacacgatcataagctttactaagatccagcttgagcgccatatagccttctttgcctttacgctttcttttgagatagtgcataacctcaaacgcta

SEQ ID NO: 148864 - DNA, 574 bp, Cannabis sativa
ttgaaatggagttttatttagggcataaaacccaacaccatccacatgtagtttccaggtcggtttgtcttcattgttacttggctaaggtactagcttaggattgttttctggtatgctttcttttttgcctgtgcattctaccacgaagttggccaaggcttggccattgattgctgttcggggttggaagtttatttcgtactgtcccaattctaccgcccacttgagtaaccgtccagaggcatctgacttttgcagtatttgtcgtagtggttggtcggtgtataccctaacaggatgagattggaaataaggccttagcttccttgttgctagaataaggcagtaggcgagcttttctatcaacggatatcggccctcggcctcgatgagtctcttactaatgtaatagactgggtcatgtacgctgttctcttctctgatcagcacggcactcacggcatgctctgtgatagctaggtatatccccatctcctcaacgtctagaggtttagaaagtacgggaggttttgcaagttgtgcctttaaatcttgaaaagctctttcacat

SEQ ID NO: 148865 - DNA, 513 bp, Cannabis sativa
attattgtcttttccttattgaattcgattgtatcttgatacaatcagaatatataatctgtttatggcaggaattaagtcttaacagaagatcggacccgattatagcaagtttcctttttttggtcagatttgctgcgacagcttccaattatgatgttccagatcatgtttattttaggaaatctttgtacagctgtagattcgatcttgtgactgtctctagggtttctatgttctataaatagagtctagagagcagccattcgaattagctcttcaattattcatttttttgcatttttctttttgtgaggagagtttctttgttatgtgagaacctagttgttcatttaggttctagtattttatatatcagttcttactctgtcttagagtttgttagaacgacttgactgaataagagagtggtcgtcgggagatgacttgttgaagccttacttcgggaggaagtaagctctttggtcttcgggagaagacttgttgaagcct

SEQ ID NO: 148866 - DNA, 545 bp, Cannabis sativa
taggatgttaatcaaacatacttggtagtaaatctagatcatggtaaaatatttccaacagtaccttggttggaagacatcctgaacaagctttccacaagaaatgatgaactttgggcggtatgggaagctgccataatttcttccagcaactatcatcttgcatatataaccaatttcctcttgaagattgaagaaacttgtaagtacttttaaccgagtaaaaccccgaagactccatgttccaacaccaaccatccatatcccgagaatgactaagttgaatacttctaatcaaattaatatccctctcctcaaacatatcatttagaagttcaacatcccaagacctttccccaaccactaaactagaaacatgttgatcaacaaggccaggattattagataaaacaaacgaattggtatcatggggcaaccaagaatcatgcaaaatactaaccgaagagccattagtgtaataccctggatttaagaaatggattagcaaaatcctaatgagataattatgaataattgaggaatta

SEQ ID NO: 148867 - DNA, 511 bp, Cannabis sativa
aatagatgccgaaaatggctcgtcagcgaatgaccttttgtcggtgacataatgacttgcgccggcaaaggtacttacaccgacgcatttatttgccgatataatggactcgtcggcaatacatccgccggctgatgtgtccttgatgacgtaatgcgccgacaaacttttgacggggattagggcatttggcgccttatttttgccgacgagtttagtcgccggcaaaacggtaataaaaaaataattaaaattaaaaatttatctatgctggcgacatatgcaccggtaaaagtgtattttttatttttttatttaattaaataatacttttaccggcgcatgttaggcgtcgacaaaagtttttttttcaaaaaaatttaatttataaattaattttgaaattacatttaaattaaaaattgaaataatactaaatataatatcaaatatattataaaaccgacatttataatgttattacaaaactatatatattaaacgtcataaa

SEQ ID NO: 148868 - DNA, 640 bp, Cannabis sativa
cttagacaagaacccgaacccacactcgaactcataccaggacccggacacatacaaagacccaaacccacactcgggaaccaaaaccgaacttgaactataaccggtcagggatcttggaacgggaccgggacctggacccaaactcgaatccgaaattggacccacccttggaccctaaccgagaccgaaactcagacatgaacctagctccagacccaaataacatcttaacccagactcggacccaaactcgagtagaacccgtacctcgtgacttgaaactggaaccgaaactagaagcggatcgggacctaggaacaagacctggacacagaccgaaaactataaccggattaggacccaaagatggcccaggacctggacctagacccagacctgggacccaaaactgaaacatgaacgagaacatgactaggaccctggaacaggactgggaacgtgaccacgacccacacctggactgggacccagaactagactagaacccagccccaaaactcgtgctcggacccagttctggaccaggtcccggacccagaataggacttagactagaacctaaacccaaactcaggactcgatcccggacccaaatcaagcccctgacctaaattgg

SEQ ID NO: 148869 - DNA, 940 bp, Cannabis sativa
gtattctttaaactaaaaaaaaaaactatttacattatttatgtggcgcttatcatttatgtttatattaatgtcctattattataataaaattatttgtattctttaactaaaaaaacagcctatttgtattcttatataagtcttatcatttatatgtatattaatattctattattatattaaaactatttgtattttctaattgaaaaaaaattattgtattcttccattataaaaaacttatatatagtgtttaaatccaaattaaactttataggatttttgttatgttaatttcttttccttctaatttttgatgttgatctatttttattacttggcaatatatatttactttttgaattttttgttatatatatatatatttttaaattcttgatgttttatatttttaaattttgggaaagattaatcattggcaaattcttctcccatggatattttgcagcaaaattattaggtagttttttctcttgctatgaaaaattatattacttttatttttatttggtttttaattacaatcttttttgtcaaggttttaattacaagttaagtattaagtttttctccaatagattttttttcgtaccaaagtccactcatagttttaaattttttgttatattaattttatttctttttaattcttgatgttgatttattttcactacttagcaatgtatgttcattttttaagttcttattatattttttctatttttttgatgtttcatatgtttagattactttgaaaagactattcattgacaaattattctccaatgaatattttgcaacaaaattattctccatggggtcattgtgcgtaacaaggctagattagtggcccaaggttacaatcaagaagaaggaattgattatgaggaaacctttgccccggtagcaagacttg

SEQ ID NO: 148870 - DNA, 867 bp, Cannabis sativa
cagaaactgaccctgatgacgcaaatatcaatatttgacacgtgtcaagaaataaaacatcctggagttgagtagtcccgagtcatggcagtcgacttgaaaggatccctagccctgcaccccaatttactccagaaactctggaatgggtgtttggatcccgctagttgtttctaattcactacctttcagtattctataccatgaaaatacgaagaatccaaatccaaggttgaaagctaaaaatacatgaaacaacaacccagaaatcaacctaggtgcccagtgcctaagttgacaactctactatggttttagtttccaaacccatcttagtgaaaataggtcaaactttgtacgagaaaatgaattagacctatctcgaacatatatgaagaaacaaaattagaatcggagcactttcaattttgagcacccggaacactaggtgcccaaggcacttagcgcccaagttgacatattgtcaacctagggcattaacaaaaaaaatgctaaagaactatcccaagcattttcttcgttgacataaattgagaaccttgaagattaccagctagacaacgatagagttaaaagaacacctaaacttaatcctaaatacaacttcaatatctggaatgaggatactgcatatgctcttctatgcatgttggatagacaaaagattgagccagagacctatgagaaagtcatcaaaggcaaggatcctaagaaattgaacaatgatatgaatgaggagatgcactttttaataaaaaacaagacttggatactattctcttgaccttaagagaagagtattgtttcatgtaagtgattgtttagacataacgaaggaagatccaa

SEQ ID NO: 148871 - DNA, 622 bp, Cannabis sativa
ctttattgatattgaataatgcggattgcattgaatttgagttttatttagggcataaaacccaacaaataagtggttaaatttccaaaaaattagttcatctgatcaataaagaaggatgaatataatctttagtgccttaaagatacctcatcactatgtatgaaaagtaaagtggacttaactttggttattctgatactacttaacgatcctaaaacaaatgcaatataaagtcttattcagattttaggcatacattaggcttctaaaaaaagcaaaggaatgttcttaatttattctcattctaaatcattttatagttgctgattaatttgagttgaatttatcacacttaaagataaaagtaatatcagatgaataatacataatttcattttagcggagatgatgtggctactctctaattaattaatatatgttatttatattctttatctcaaaataataatttgagatataaattatgttaccatatgaaacttttatcatcatttgcaagtatcatattgtctatatatataaaataaattattttactctcactgaccttctagtatataattatttccataattctcttttcaaacctaaaggaaaa

SEQ ID NO: 148872 - DNA, 518 bp, Cannabis sativa
aggattttaaatcctgatacatttgggtggttcccggatgtagtgaataaggtgtggtgtgagcttcatcaaggatctcttttttaagctcgtcaacactaggaatacaaattcgtgctttatacaacaacattccattattcgagattgaaaagtctttaggccgactagccatcacctcatctcaaaccttgattagctgaggatctcctagttgtgattttttgattctctctaatagatcagattgaagtgtcaagttatgcaactttccaaccacaaactcaatccttgcactaacaatctcagaagctagtggaggagctattaaaattgtggtgcaaacctgcacgggacctcttctacttagtgcgtcagccataacattggctttcccggggtgatacagaatctcacaatcatagtctttagcaagttctagccaccttctctacctcatgtttaagtctttctgggtgaaaaagtacttgagactttgattgttgggttttatgccc

SEQ ID NO: 148873 - DNA, 597 bp, Cannabis sativa
aaatagagaatataaaatagtaataaataataaatatgaaataaaataaaaacataaatgaataaaaaaaattaaaataaaagaaacaatgtaaaaatttttacataacctcaaacttcatcactttttgtaattaagaaacaactactaaaattctaaacctatacaacacaaaagtaaaattcatataaaaaatataggaagaatggtaaaactaagcaaacttacattaataaaaaaaaaagtaaaaaaaaatataaatagaaataaaaaaaataaataaatacatgaagaaatcccaaaaatgaagcttttaagcacctttacttttactatcatcatccatgcgactataaatttcaagatcatcaaatcttcaatatgattgtcatcttcaagttcttcataaaatttaacatattcaattttaagttctatatttctaaagataaaaatgaattgaaaagagagaaaaaaaatattagcattccttaaataattacattatattttctatagcaacattatatatagtttatattgtgtaagttatgaaaatgaagagacattatcattaatgttaataataataataat

SEQ ID NO: 148874 - DNA, 635 bp, Cannabis sativa
ggggtagaggaattattctagaaggatgtaaaaactcatctataatatttaagttccaccagtgaagcaaaataacttagttattttttgaaaagcattggaaagttattcaaactgaagaaagttcttaattaggttatctctattccatttttggatagaattagagatatgtcttctgtttattctgatgcacttaatgaacaataaaagaattcagtatccctagaggagtaatatatatagtaaaaatgatgttgtataatattttatgaacacgaaggaagtaatggtggagaaagcagttgcttaccacaaccttacagttcttgtaatttgggtttagtcaagtacactgcgcttgatctggatatcaagacaatagattaattgaaatgcactacttgttttatgttatttcaagtaggagtttgttgggattttatgccataaacaaaactcatttcaatgtaatataatttattatcaatagaaaattagaagtcatttatgtgtacatgtagttttcatgtttatggtttaatgtgtataatttttgttaagtcgagagcatatagttattcacaattacaatgatgtcaacatagtggaaggtaattgtgattatatgcttc

SEQ ID NO: 148875 - DNA, 693 bp, Cannabis sativa
  modified_base (662)..(668): a, c, t, g, unknown or other
cgtcaaccatggtgagagaaaatcagattttgaaatattaattgtcaaaacattattagccaaaaactgaagggacgcccagtcagcctcacatcgattctcggatagtcgcgcccaacacgtgtccccatccaaaggcagaagcgctcagatgaagtctacacgcaactttggaagtcccgtacagacttgggtggcaaatgttatcccaatttttgtactctgacatggcatcacataatggtgacacgtggaaccaatctgctcggaggatacagtccgaacacgatgcctcagcatgcccagagcaaagcaatcagcaatccgcgcagagcaaccaacacttagcgaattcatctatcgcattacgcgtcatcaacaaaatccctataacttggggatcaaattacaaggatatggcatacacacgatcccacgatcagtgtattctgcgttaatcccacgatctttatattcagcatttatcccacgatctttctatttatatccattgtaacgagaagggaaacacttcctctccaagttcacaaccctataaatagtgatgcacattcactgggcaaaaggtcgcaaacagtttagtcgagaatttaccctagatatattatctaagaagtcatattcagagatactgttgtaannnnnnnaagaaaaggaacctttctccttgtt

SEQ ID NO: 148876 - DNA, 536 bp, Cannabis sativa
ccaactccagccattaatttaaaataagacaagattaatattaaccaccaaaatgactaatttaccctccttataacccttaaccttaaatcaatcctaggagtattttggtcattttctagctatcccggccaaaccgataacttaaaattctaaactagtccagaataattccaatacaatacaactttaattatcgtgacatttttgaccactttgcctagtttccacgatcgtcgggcacccgaaaatattttattctagaaatggtatccacgatacccacatatttcaataaaatctccgtaattaataaattatgttttaattatcatttactaaagtcacactaatcaaccctagtaagatcatagtcttacctcattaccttaataatttacatatttaataaactatgcctaattcaatatcataatattttccaggatactacaactatcccctccttatagaaatttcgtcctcgaaatttacctgaaaagctcgagatactgctcccgcatctgcgactctaa

SEQ ID NO: 148877 - DNA, 892 bp, Cannabis sativa
tctatcagaattgacagctttaattttctttcccttttgaagcttaacatttgtcttgaaaatcttaaaagcatctaaagatttagatttttcacgaatgagcacaacatggccatacccaaaaaaaaaaatcatcaatgaatgtgataaagtatttataaccacccatagcaagtggaacaaaaggcctacaaatatcagtatgaataagctctaacacatctgcggatatgtctgacttactctttctaaccttggcagttaactttccttttatacaatcaacacaggcagtgaaatcagagaagtcaagatcctgaagcacaccatctttcaccaatctctccattctatctttagaaatatggcctaaacatttgtgccaaagcatggaagatttcaaatatgatcttgtacatttagaaccaacaacaacattaagagaagaaaagggataagagagagaagtaacaggaacaacattatgtaaatcaagcttatataagtttccacataaagttccatttccaatcaacatagagtcgcaatacaaagtcagttttctagtttcaaaatgaagactataacgtagtttatccaaaatagatatagagatcaaattcctcctaatagagggtaaataagcaacatcatgcaactccaaaaaaatacccagtattcagctgcaatttaatactcctaaaaaattcaactctgtctttagtatcgtctcccatgtatacatactcctccaacctactcgaccttctttgacttgtcactgcctgcaaagaatttgtaacatgaattgtagcactaatatctaactatcaagtatttgagggcacatcaataatattggattccaaacaaaccattataagacaattac

SEQ ID NO: 148878 - DNA, 690 bp, Cannabis sativa
aaataatcccaaaattatagtaaatcatccaaaattgtaggactatgttagtaaatattttttacttcaaaatttgtagcaaaatgtacattttaaacaaattaatattgtcttttgccacataattttttcatatatatattttttttaaaattagaagtaaatttcttaaagattatgatatatttatataattttattaaaaaaaaaattatttgaaagttatatcgattttgttattttttattttttataagttgttgtgggttattggtacttagattttgttgtacagtatatttctattttgttatagatgatatttattttttattttactatgtataatagtgatatataattttattatcataatacaaatattttaatgtatatatagaacagttcttaatgggtaatacccattgatgggcactaaaagaaattaataaggtaacaatctaataaccttttatggtaagtttccaacaattatttttttaaaaaaattatatttattttttataaaattagaaataataattacaaccaatagtttgaaaaaattataaattattattaaaaattaattgaaatgactactttattattttatgaaattgtgagttcatgaataatttattattgtaaaactaagaatcatttacatgtatattaatgcgttttttt

SEQ ID NO: 148879 - DNA, 590 bp, Cannabis sativa
  modified_base (100)..(110): a, c, t, g, unknown or other
gctgccatcaatctaaggttttcttaactttatatgtgtttatttatcattttagaaagttcatatttagggtgtgaaacaacatacttgtgagtagatnnnnnnnnnnngtaaaataaattccaacacaaacacccttacaaaaataaatagttcggctctaacttatattccatatggtagagcttgtaacaagctttcacacagtatatagaacgtccgaaacggacatctaagtgaaaagttttagccaaaatacaaaaaatgatttccttggtaaagtcccattctggaagctcctccgatcatggaagcttccccgatcatggaagctcctctgaacatggaagttcctccgatcatggaagcttctcttatcattgaagttcctccgatcatggaagcttatctgatcatggaagctcctcagatcattgaagcttctccgatcatggaagctcctccgatcatggaagctcctctaatcataaaagctcctccaatcatggaagctctcccatcccgaaagctctcccatgatggaaaatctcccatctcggaagctctcccatctcggaagctctcccatc

SEQ ID NO: 148880 - DNA, 651 bp, Cannabis sativa
cctgagttccaatttttgtttgggttggggctaggtccgatttcggtgttaagtttgggtttgggtccttgtcagggtcctagtcttgttccaaggtcctggtccggcggttcttatttatgttccagtatcgtgtctaggtctcggtccgggttcgagacctggtccaggtttgggtcctagtccgggttcaggtcctagtctaagtcttagatctaaaaactgactacgagtttgttccaagcccctttcctggatcccaattcaagatctggatccctatcagcggtctcggttttgtttggttcagttcctgggtcccgagtccgtgtttggatccggaattgagattggggtgcagttttaggtcgtggccccggttttgtgtcccaagtctggttccatgtttgggtctgagtttgggtcccgattccaggtttgggtagggaattgggtctacgacccagttcgggtctaggtctgagttggactccaagttctggtcgagttacggttccggatctatgtcctggtccacttacagttccaggtctaagtcctggttgtcgtcccgttccagggtcccggtctactcccaatttttgttccaatttcgggtcaaaaggtacgggttcgggtctaggtttgggt

SEQ ID NO: 148881 - DNA, 704 bp, Cannabis sativa
ttagggcacaaagcccaacaattacattctcccccacttcaacatttcgatgccctcatcgatagactgtaggcaaatcttcctgatcttgactcttaagcttactccaagcttcatgtgaggtatgcagttgtccctctatctccgtagaaccaccctcttggtgacaatctccctcgtccactcttggacttgatcaaagaacctgtgccactcttgctattccgaatcactcatggagtagtgtcttcgcactagaatacttcccccaacatgaacccctccgagtccatcacaatgcccttccagtcaaccaagtatcccttgccacactgacactaaagctaacacatcctttgatagtagctcactcaccaaatgtccaaagcatactccttttgataaggactaagtatggtgcacccctgggggtgaggtttgcaaaccaaccgtacccaacagcacctacagaacacgtttccactgaagccaagtccctctggacaagtccctccagaaacttcacacgccaactccatggcgcaccatcttcctgatggaaattgagcaagacactattgttgcaggataaaatttgatgcgtccctcctagatgaggctcgcaagccaactgcacctagtgcagcaccacgtgcactcttgcacactatcactttgcaaagtactcaatattggccctctag

SEQ ID NO: 148882 - DNA, 684 bp, Cannabis sativa
ttgtaatagaaagttgtaattagcttactcttaactaaaatattcacgtcaaaaaagaaaattctaatgtaaactaaactaaaaaaactcccttttttttatgtatatgtatgtatatttaatacacgttgtattttcaaaaataaataaataaataaaaccttgtaatatatacattaagctgattataagaaatgtcttaatctttaatgaaaaaaaatggcttaatcatttattatttttgtttttaaagaagatgaaatgtcttaattaattaataaattttgtggttctctctacagccatttggacaagttccagttattgaagaaggcgagtttagacttttcggtaagacactattataatgagaatgagaaatctatatctatccaaataaactttctataacttttagctagtgacatgtattgttgtagattatagaatggatttaacgtttagagggtatttttctttactaaaatgatgtttgagtttgcagaggttgcttctattgaagtagtatatgcttcgagtttttttttttttttgttctgaagaggaaacctacaatttgaacaatatttaaaaaacaaaaaattaaattgattactctaattatcatacaaccactcttacactattatgttacacctcaccaataaacataaggtattaaat

SEQ ID NO: 148883 - DNA, 605 bp, Cannabis sativa
  modified_base (529)..(573): a, c, t, g, unknown or other
tgcacaatctggtttggatctatcttattggtggtatgcctttagtgctgctgtgttctctataaacaggttacctactagagtcttacattatctatcaccctatgaaactatatttcatactaaacccgattacaatattctaaagtcctttggatgtgcatgctatcctcatctacggccttacaataatcataagatggattataggtcccagcaatgtctattcttgggatactccaatcaccataagggatatatttgtgaaagtaatgaagggcgtgtctacattgcaagaaatgttgttttcaatgaacaactttatcctgcaaaaggttctcctattgaccatcaggtacaatcttctcactccacctcttttccctttaatacatttaatactatacctttatcttcaaacactaatatacctgctacttttgaccataatatgtcctcacctttaataaattcacaccctttacccgagacaccacccctacctagacattgttgggttttatgcccnnnnnnnnnnnnnnnnnnnnnnnnnnnnnnnnnnnnnnnnnnnnnatcagaaataacattttatgtttcatggttca

SEQ ID NO: 148884 - DNA, 564 bp, Cannabis sativa
agcaagacttctcaaaaatgtatatttattcaatcaaagtgggggaatgttacattttgatataatatctttgattgattaaatatatgttacaaagttacaattttgttactagagataatatttaatcaagtgggggattgttatattatttataaataatataatgtatagaataaatatgtgtaacaaactaatatgtaacatatgacaattgtcatcattttgtaatatttgggggagttacttgatactatgagtaacctccaccattatcaccaaaattaagagtgtaaaggtgttacacatcttaatttgaaattcttaatgctataggagttatggtgtgtgaatgagttacatttgagtccataacatccatgggggattatgagtttaaattttaaatggtgatatcctaaacactatataaagaggtctaaggtgttcatattgagatgacccaagttttctataaaaagcacattgttagaaaaccctaaggcttgataattctcaaagttatttcctagagagttatcttagtacttagagataggagaa

SEQ ID NO: 148885 - DNA, 556 bp, Cannabis sativa
gttgtttcatttaaatgaaattaagtggcataaatctaactctaaagtccatatgcaattcggccctaagagatgatttagcctaattctttattttaagtccatctcatataaacctaaccctaagtgaagcctataaatagaaagagaagagagctttgtatgatgatgattttctatgctggaaaactctaaaaagctcacttcttctctttgatttttgaaaatttagaggctattttttcttggatttcttcatcaaattttgtgctccttagtgttgagaactttcccacacatttcaaaggaatacccaacatagtgaggaagactatgtagtctaattgtcataagaaggagaattcaggttcagatcttgatcatactctgcaacagaaaggatcaagggttagagatctaaatgaaaggagccatactattctgctggcaccagtgtaagattttctataacttttacgtgtttaattctttgattttaggaaattcatatttaggatgatagattatagaattataatccaacatacatgttagt

SEQ ID NO: 148886 - DNA, 565 bp, Cannabis sativa
agagcatatgtataaacatcctgagccaaagggcaggtccaaaaaaaaatatgcataaaaaaggatcatatatatataaaaatcctagttctaaaggcaggtcaaaaaaaatgtatatacaaagggcccgggataggccttaataattgtctccccttagaaaataaaacagctattaaaatatagattgtcttaaacaaaagcgaaatagctgtaaatatagaaaaaaaaaagatatgaaaaatcttggttgaaatgggctggattcaaaacggcctaatcaatgcgaggaggaaggcgaggaccaatacgcgcctcaagcatggcatcaagcttcttcttcttctcctggaatttggcaatcatcttcgcaggttttgggtagaagtcaagctggatactttggccatttgtcgaccaagccatgtagacgccgtcttcgaaacacttgatgcaacggctacaggagacaggttgaggagctcatctttcttagccttcttcaaggcttggtctttaaagtccttgagctccttcggctccacggccaagttggccctagact

SEQ ID NO: 148887 - DNA, 818 bp, Cannabis sativa
  modified_base (27)..(29): a, c, t, g, unknown or other
tcgcactcaccgaaacactaccaaaannnatccaaatcactccaaacttcatacgacgcatatataccataaatattaccatctttgcataacaaaaaataaaatcgagcctttaaatgaaaaacatcattaacgttcggactaagctttaaaaagttcaaaactcaatttctaactcaaaatcacctcaaattcaacaagtaaacatcaatactagtcccataagtaccaaaaaataattctacgaagtcaaaatctccataactattctaattcacaaaatccctatataaaatcaatcgtttttagcttaaaatataattaaaccataccttaagctttctctctttaatgatttgctatctcgctaccagagtttagatcgctaggttttgggttgaaaatcgaagaaaatgaatataagaggagaaagttttatcaaaaggagagagcgaggatttcgttcgttcgttcattctttagttaccgatatgttttaaaatatataatatatatatatatataaaaagttttaaaatatataatctataatttataacatatatataaagattggtgatacttttttggttttggttaagttattttgtctttttgtgtttaatattatttttgtttttattattcactaagttaatgcatatttaataacctataaattcaaatgcattatcatttcaaaaaaaaaaaaaatcaaatacattaatatatataatcacatgtaaattaaatatctctatttttaatataaaccatttttttcttttttttttttgttatttattttaaagggcaaa

SEQ ID NO: 148888 - DNA, 927 bp, Cannabis sativa
tatgtatttatagagttagagagtagacttacctatataactctagttggattgggtctgctcatcaaagacttcagttaattaaaaaagcctacacttctactttaactagactatgcacatactaagcccattaactattgattaataataatatgagataatacagtaaatcactatccaatcaactcatatttttattaaaaccaataaaaatgaatgtaaggccaaataaaaaaagtctagcatattactaaattaattactaccattagattaacataaaaggctacaaaaatactctcatttgtgagaacaagagggattttctcacctaaaaaattcctatataaatatatatatatatatataattactttttattatttttgttaactttttgaaaaaatatgggttcaaaacttaacttttaaaattaaaacaaattagtaatcggccaaaatgcaaggttaaaaaaaataaatgtactctttttttaacctatttataaaatatggaatccaaattttaattttaaaaaataatgagtcaacagtctattattgataatcggctaaaatatagcgtttaaaatatctaaattcatacaaatatatatatatatatataaatttctttatatataattttgactaagtttaaagtttataaattttagattttcaaaaaaaaagtttataaattttagaaataaagagtgcaaattgatagttaatcatagcaaataattcaaataatatatctatatttatttctattttaaatattttaataaaacacaaatctaaaaatagtttttcaataaaataattaatattttttcccttgaactttcggcactacttgattttgtctcttaaaatatacagcttattaaaattcctcctaaaatataacagttacata

SEQ ID NO: 148889 - DNA, 654 bp, Cannabis sativa
  modified_base (261)..(264): a, c, t, g, unknown or other
tgaggagccgtgagagcgagcaggtgaagattgtacatgttggggtggttaggcatgcagcgtacgatctttgggacatcaaggcttttgttgaacagtcgtctggcaacaaaactttaaaacatgattagcaaacttttgtaaatgtattttgtaatgggatcccgagattttataaatgtattactttatgattttaattaaagaagcaaattttaattaagcacattttttcggtaatctcgttgattagcaacgagnnnnacagtacgtttaaaatcacgctaacatgcctaagttagttagggtgttacaatttggtatcatagccgccaggttggctttccaagatcgtcacaacatgtacatcatcaccagtagtgagctcgtttcacggttcagtaagcttttattgctttactagttgattttaatagtatgatttaagaaaagcctattaggaagcatgtgagtagcctgatagatgaataggcgcatgttttaaaatttcgaaaataagcagcatttagtaagttattcatgatcgcgatctgaccaaactgactcttggttacgcgggttgttctagtagtatggatgccaggcgaaacaccaggagccagggtaattcggttggatccaatggtggtcagg

SEQ ID NO: 148890 - DNA, 675 bp, Cannabis sativa
aaaaattaattaaaaatcttaaaaaaattagaaattaaattttaatcatgttaagaaaataatcttcgaaaaatgacatcatacggtagcagacgtgcccccacgcgccgctgtgtagagttggcttcgctagggagggggtaatctcctaccatggaccaggtttgaaagaaggtcacgtgacccgactttctctagtcgggtcgaagacaaaaacgaaccaatacaacgccaaatcattgggaaaatgaggggttttgatcaggtctaaaaatctaatctacctatggatttaatttggggtaaaacgcccaaaacaacggtagatcttgtaatttaatccgaaatttcaaaacaaaaaaaaatatcattaaatctactgatttttctactaagtcagtaattgaaatatgtagccacattataaaatattggagtcatttattcataatcaattttagtcaataatgattataataaaaaaaaaaactcaaattttatttcatcattaaaagatacaaaacctaaacgtttaatcacaaaattattccaattgactcaataattttagtcatataagatatcaatagaaagaaaatttcatgatgaataaaatccctaaacttttaagataaaaaacgaaaaattcatcaaaaataataggctaattagtaa

SEQ ID NO: 148891 - DNA, 644 bp, Cannabis sativa
tgaatttccagctaggtgagggccaccaatcatgatctctatcctgcctacaattggcgcaggctggagaggtacattacctccagctggagcttcaggtcatacataccactaaagagtagcatgtttctgtctgatgagaaactctatttcgtcccaaaattgattacactcattagtgtcatgaccgtaattgttgtggtggcaataattttttcatgtccctcttcccttactctttgaagggaagaggtttgtaatacgacactattgactgtgttgccgtatagatcttctcttctagagccaagagaatagagtaagtgatacaacaaggctcataatctcataagggcttgcccccgatcctgggcttcattccaccaagggagttgactggcttaccaccattgttggctctctttcctctgttcaaacctcctttcttcccattgttctgtgcctcagtagcaggggcttctgtgtctggtgactttttcttgccaccctttgagcccttggctcgggtgatggcttttcaagtttcataaagcaatttactctatctaagaagtcattcatggtgtatactgttgggaatattttaccaggatctagagttactaacaagtatgttgattaac

SEQ ID NO: 148892 - DNA, 910 bp, Cannabis sativa
cttaatcatatccaaccaaagctccaaagcttgagcataaatcaacaaaatctcaagccaaaaccttgaacacaaagttctaactttcaagccaccactttagattagtaatcagaaatcaaatacaatttcaacacttaaaaaccaccactcccatcatataaacacccaaatcaacaacacaaaacacatgtaatttccaagtttatacaataaggaaaatcacctacaaatcatcatttactcaaacatgcaacctatcaaataacacaatttccacataaaatcagtagtaaaactctaaataaacaagatagaaagctaccttgaacttctcttaaacacaagcttcaaattcaccaccacataagattaaaccaaggctaatttcaagaatttagaatggttgaagattgaaatgagaaggaatgagaggtggtcggctagggctgaacaacatcaaaaataagcttctaatttcagtcaagtttcccttttgttgaaaattaacttaatcaagcaaaatgacaataatgcccctagggccataactcctcataagcacatatacaagggcaaataggtcaatatcacataaaacacaatttaattaattttaaaattaatcacacatcaataaaatgccaataaataatcccaaatataaatttcggccccgaacccggttcggcccgaaattcccaattgtgactataccgcgctgacttgtcagaaaacacctaaaaaaggacacaacaagtatactatataataatatagtccataagcatgtaattaaattaatgtcacagttttacccttctcatgtcaaaattacgaaaatgcccctggttcaccaacggggtcttaacatgtcatataccagattaattcgcatataataaattat

SEQ ID NO: 148893 - DNA, 780 bp, Cannabis sativa
  modified_base (726)..(732): a, c, t, g, unknown or other
ggtcgagagtaacatcttccgattcctcaatttgtttcagtaggtttctctcatcttaaactcgggggtcaagatcttcgtctttctattcattttctcttgccaagatcaccattaattgatgacctgctttcctatgctacaactcgatgtgatagaaatagcgagccagcatctggtctccatgcaccagtcccacgccttcaggtttttagaatttaaaggataggtgcttgatcgaactgactacccctagtcggatcagtgctggatgatcccacaatatgttgtaagccaatggtaggtcgacaactaagaagtcttgcataacggtggcagatagaagtgcctcacccaaggttaatgcgagctcaattatgctaagactggcaatgttgtctctggtgaatccgcaataattcaccatacaaggcctcaatttagctttttcgagccccatatttcttagagtttccttataaaggatatttatcgagctcccattgtctattacactctcttgatccttctattggagagtttaatggtaatcaccaatagatcaacgtgaggatatctcacaattttctcgtcttccttcgtgaatataattggaggttcttcggatttcactttcttggaaggttttgggcaaatgccgaccgctcgttctatagctctttcacatatcttttctgggcattattgctttcccctgcgatatgnnnnnnncccgaaataaccaggatgtcctctccttccataggaataggttgtaac

SEQ ID NO: 148894 - DNA, 718 bp, Cannabis sativa
  modified_base (649)..(670): a, c, t, g, unknown or other
ttttttttttttaattttgtctaagtagttattaatctactatgaatatgtgctagaaattatattctgtctatgctttttggtttgcgaggagttataatcttccttattatacttgagtagtttatttttatccaatattatgcaagcagtttaaatatgctatatttaatttaaaaccaaactttaacataatttgaataattcattttgtgaactaatttgtacattttttgattgcttatacgaatagttaagccttctattcatattttaggttaagtattattttttcaaggcatctccgtgcctcgtttataatacatgcatgaataatgcaagccattaaatattcaacctcgcatgtaggtttatgttgttttatgagttaatctcatttacaactgctactgagattttcctttataaagaaaaggttcaaatcttcccttgactttatattgtccatagacaattttaatcaattatcctttcgttagattttttttttttaaaatgggtgggtttgcaatataacatgtattttctagataaattctagttgattatacacatatgtacgcctctcaagtaattttaaagaataaaactttgaaattgttggatatattttacaaggatctagatnnnnnnnnnnnnnnnnnnnnnnaacatcctaatatgaattctaaatcaatgaaataaacacataagagtt

SEQ ID NO: 148895 - DNA, 617 bp, Cannabis sativa
gataaaatgctcgaaatattttcaatggagaattccaaggaggacagtaatcatccaaacatggaattactctatgtaaggatcaatgtccaaagactccttaagaggaagctccttaagaggaagaggacaaagaggaagaggacatagaggaagaggacatgaaaaagtagccttatgcatcagtagttgggagcttgatgtatgcaatgttgtctataaggcttgatatatgctacgttgtagggattgttagtcattaccaatttagttcaggtttggaacactggatagctgtaaagcacattcttaacaatctttggggaacgagatatctcatgcttgtatattcaggtggagagttgaatccttctgattctaattttaaattagacaaagatagtcaaaggttgaaatttgggttactttttactcttggtggaggatatgtagtctggagaagcatcaagcaaaccagtattacatattcaaccatgaaagtcgaatacatagcagcttgcgaagtagttaaggaagcagtttggttgaagaagttctacactactctggaagtagttcaagaagttgaaaagcctttggtgctctactgtgacaat

SEQ ID NO: 148896 - DNA, 526 bp, Cannabis sativa
cctcacactaaatgtttctcctcccccaaactaattatgtagcttatgatatcatggataacatggtgaagaaaaattaatagtgtggttgcaatttttcaaattaattatgtagatagtggcctatggaggagactatcccaccgcaatagcagggtacattcccggagcaccgccctcgggtactgtcccgaccgcggctccaccaataagcggcatacagttcactgccacccccggatatagtcagggccaagccttggcagacttcattaccgaatgcaacgaagccgaggcaactgcaaatgtgctagcaccatcgatccccacatggagagtgtttgtggacggagccttcaatgaaaatggatccggagcaggagtggcaatgatatccccgaccggactgtgactccaggcagccctacggttcgacttcccgacttcgaacaatgaggcagaatacgaggccttgatagcagggctgaggttagcaaaagctgtaggggccaagagagtggaagtc

SEQ ID NO: 148897 - DNA, 749 bp, Cannabis sativa
  modified_base (320)..(323): a, c, t, g, unknown or other
  modified_base (355)..(356): a, c, t, g, unknown or other
atgactccttattcagttcatccagggtcaacgaagatgtctcaagacctgaaagccatgttttggtggccaggcatgaagaacgacattgctgagtatatatatgttgcaaagtgccttacgtgtcagcaagttaaggctgagcatcagcgacctgtagggttgctgcaacaactaaacataccagagtggaaatgggaggacattgctatggacttcgtggtaggtatgcctagaaccacgggacagtttaactctgtgtgggtcatagtgaacaggtttacaaagtcggtgaacttcttacctgttcggacgaattnnnncattgaccagtatgctgagttatatgtcagannaattgttcgtcttcatggtgtcccaaagtccattgtttcggatagagatccaaagtttacatcgagattctgggagagtctgcatcgagctatgggtactcagtcaaagttcagaacagcttttcatcctcgaatggatggacaatccgagaggacaatatagattctagaacacatgctacgggcatgtgtgcttgactttgaaggatcatgggtaaagtaccttcccttaatcgagttctcttataacaaaagttatcaggcaacaatcgggatggtcccatatgagcttttatgtggaagaaaatgtagatcacctattcattgggatgaagtgggtgaaagaaagttttttggtcccgaagctgttcagaaaactagtgaggcagttga

SEQ ID NO: 148898 - DNA, 1200 bp, Cannabis sativa
  modified_base (900)..(903): a, c, t, g, unknown or other
gaatggttgaaatcaagagagattagtaaatgcaacaacaacataattttgttattttgatttcaaatttctcttgattttaaccattcttttgttcttgaggagtatatctcgaatgtgaagcacttttcttcttcttctccaatctcaaattcctcaactgtcactaacttgaattctgtacaaatgtttatgggattcagaggtggatcaaaagctaaagatataatattgtcatttccaagtaatcccaactcagtttggtcatttccttgtttaatggattgcaaatgtagattgttaggtcttgagtagggaagcaactcctgcaatatatgagaccctgacacgatgacaataccacaacatcctcagggagaaaatcaaagattgtctgtttgaattgaaagccttcttcatcaacaggaatgtgtgtgacattttagatatctttgttgagccatgagaacttgtcttggaagatgaattctgagataaagagttttgttctttgtaattgagattggataaaagaacgatcagatgtcaagttgttccaagatttagattcacatttcaatagaaaataatgtctttgttggtaatagggatagcagttcgaagaatacataattatttaagcaacttatctttctcatttcctgaaacacaaaatcagatttcatcgttaattatatgtataacatgtgtcactatactaaacaagtaaaatatcgtaattcaaaatctttaacaacaaaaactgctatgcaccattctcaaaaatattaattacattgcaatataacttgctatgcagtacaattaagaccaaaagaaaaattaatttatattgaactctcaagattcatccaagacaagttcccatggctcaacaannnnatcaaaactgtcacatacattctttttgttgaagaaggcttttaatacatatagacaatctttgattttttccctgaggattttgtggtattgtcatcgtgtcagggtctcatttgttgcaggaagtgcttccctactcaagactaaccaatctacatttgcaatccattaaataaggaaatgaccaaatagagttaggattcactaggaaatgacaacattaaatctttagcttttcgtccgtctcagaatcccatacacatttctaaaaatttcaagttagtgacaattgaggca

SEQ ID NO: 148899 - DNA, 504 bp, Cannabis sativa
tgaaacttgtgataggaactttagaattcaactgagaaagtaaatctaaccattcatatgaatataaataacttatcagaattttgaggataagatacgagaatttttgcagtgtctattcaaatgactttggcgaaattcctaatcctcgtgaaatgttttatggtatctctaatgattacttaatcttaagcaagtattttacattaacattaatactagattcctgtgttgatgacttagtctagaaggaacttacagtttcagactaagatagtatgtcacaacaagatatccctaagaaacaatagtaagaggttcaatatacttctatgtacgaatttaactagactcttactgctgagtgggaaccatctaagatataatcaaacaaggaacattaggagaccatcaaggaagatctatgatagtgacctatatgttagtgttggaattattttaccaggatctagatttaccaccaagtatgtttcattaacatcc

SEQ ID NO: 148900 - DNA, 1105 bp, Cannabis sativa
aggcatgttaaatgctgatccttttggttaaggagacttagtcgatttatctcaaagtcttgcttcttcagtccatgtgtcacagtcaaattggtccacgtattttggacaaaatcaggggcaacaacaggtatatgttgaattccataattaaatattatatagcaatatctctctgtaatggatctctctcctatcgagtcctaagataatctatcgcgtgaaaggtctttgacaaataattaaatgaattgtaacacttattttagtttcataaaatttttaggtttttaattttcgtcacttttttcttttatctaacaaactgattttatctttaaattttctttgaatgatatatttgaagaggagtgctaatttcaacctcctattacaacctcttagtcaaccttcacacccgaaattacatgtcggaatatttttttcataacagtatttattttaattgcagtatcatacctataaattttttaagaattttaaataatttacaatgcctaaaataaagtttttgatatttttattttcggtactgtaaaccattcaaaaatttacaggaatgcagaaatagaagccagtgacatgttattctaaattggttttgttctactctatctatctccttaattctcttattttttttttttaattttttactaaatacataaatattaattgattaattaattaaaaaagatctaaataaacaaatttcacatatattatgtgttttatgggagctaatacaataggtattgtacattttacctattgatatgtataatgattttgatttaattaaatagcttaaattaactcttagaatctacaccataattaatattattttttatttataattaattttaaatattaataattagatccaactaacaatactccaaagttaactccaaacttataatttttcttacttatttacgttataactttttataattttaatgaattatttttttaatttgaatttatatattaattttattttctactcaacaataattatagctaaaagagtacaaaatattcaagttatttaatcctaaaataatcaatacaatca

SEQ ID NO: 148901 - DNA, 564 bp, Cannabis sativa
ttgtgcgaccccatggggtgttgtgtgaacccatgggctgttgggtgagccgaggcatttgggtgagtcgtggaacctttatgcaagtggtggagcatccgttcgacccgcaggtgaaagaaggagaggctatacatgtgtggatagacgtcatgtgcgaaggagtttcggagcatgggggctcgcatgtgaacccatggggggagggtatgcgagtcgtgggagggagtgtgtgtgagtggggggctcgcatgcgagccgtgtgtgaatgtgggagagtgtgtgcgagtggggggttcacatgcgagcccatggggggctcgcatgcaagccgtgtgtgcatgtgggggagtgtgtgcaagtgagtgggctcacatgcaagccttgtgtgcatgtggggagtgtgtgtaagtgtagggggagttgagtgtatgggagaagggtgccaagtgtaaggtggcatgggtgtattttgggggtgtgaagataaggtgagaggtgaatgcatgacgacaagaatgacattaggagaggaatcaaaggacaaggcgtgcaagggaagag

SEQ ID NO: 148902 - DNA, 513 bp, Cannabis sativa
tgacctatattatagatagatatatagatataggcacttttaatatataaagatatatatatatttactcaaattttggctaatgatcattatacccatttatacgattgaattataaatgaatcaataccccttatataaaacctattgataaaataataacattaaccagcttttatatagaaaaagtgttcaataataacatatatacaatgtgcataatgcacgagaattgactgaaatggtttgttgcttttaaaataaaaggttccatgcattaatgtatatatgtgaaaatagtatattgctgtaataatactattatccaacaactataaacaaagagtttacgtaccaagttagaatgcatataaaggtcgatttccctctcccttttttttagagattagaaactatcaagggtagttttcaaaattattttatatatatatatatgttggtgcactcttaatgggtattacccataaatagataaaattagaaaattttgag

SEQ ID NO: 148903 - DNA, 768 bp, Cannabis sativa
  modified_base (350)..(354): a, c, t, g, unknown or other
atatatattgcattttgaaaattgaaatattattgcattgccaaaggaaactagccggaggaacttcctgaagttctgtggtcgtaccgaacaactgagaaaatggcaactggacagactctatttgtcatggcatatggatatgaagctattctgcccgtagaactcgaaccaccgtcccacagaaggctaacatataggcaagaagccaaccatgtactcctcgtttaatcacttgatgaaattaaagagaagcgaaccacaacaaacttaaagctgatggcctatcagcaaaaagtagctcggtatttcaagaaacaagtgaaggctcaaaaattctttgtgggagnnnnngtcctaagaagagtatttttaaacaccaacgacaatacgacaggtgtgctcggacctaactgggaaggaccatatcatgcagtcaaagttctagaatcaggggcatacaaattgggtaagtatgatgaataaatgcaactcgttctggtaccacggtattggaatggggaacatttaagaaaatataccaatagaagtaccaggtcggatgaccatatcaagtacgaaacacaagaacatttgctcttaagtgaatggccttctaggcgcaccacgcccaaaggttcggataaaatcttcaagtactcaagtcagatgaccattattgacagtacaatttttaatttctgcaatttgttttatttcatgttaagctaaagatcagattagatcaatataatagctttgatgtaa

SEQ ID NO: 148904 - DNA, 558 bp, Cannabis sativa
ttattactttctttgttgtttttgcattggcttgtaatattaaaattgtattattagttcttcaacaaattcttttctcctttcttgttcgatcaaaaatcaccatgttttcttcgttttgtcaaacgattcgctaatcgtgttgtttcaaaaatcgtgttatctaaaattagtgaatgatttggttgaattgaagttgcatatttccattaaaaaaaatcagtatattaggcttataagctacaaagtgttgataaagggataagggtaaaatagtaaatatattttatgtgaataaacactctatagtttacactttcatatagaatcataggaacttgctatgatttctaacttcataagaatgcaaaccttgctcattctttctatcaatatagacaaataatttttgatgaaataagtaaattatatgaaattcttcatatacacaattacgtatacatcctaagggcaactctaatggaggcaatttattttttaagttacctatatttattattttaattcatgttcttttaaatttttttaaaaatatat

SEQ ID NO: 148905 - DNA, 1298 bp, Cannabis sativa
cggtaggtgcactattggaaccatagcagtcggtacttactgcggaggcactataggaggaccttgctgcctcagcctctgaatctcttcatcttaagcttgtgtatctacaaatctttgctcccaatccggaggagcttaaggtacattttcatgtctaccaccttgaaaccttccacgacctctccctcgtccaagaggatttagcggattttgacctccccgaccgccttcgatcttaaccatgttatcctgactcctcatatttcatgggacgttcatttaataagtcagtctgtgtatccataagttaggtaggtcagatagcgatcacatataatctatgtatcgcactttatggatttttaggcaatgcatttaaacaattataaactattatggtccctccttttctaatcacataaattactaaacaagtaaaggcaactctgataccaaaattataacgccctgatacttaggcgcactacagtaattttctaattaacatgccacctttgctaatcaaaaggttttcctcaaaaatcatgccaaattaaatttttgattttaactattaaactttataaatatatatatatttacaaaaattgggatcccgtgtttaaacttttacaatcttcatcaaaatacttttactacaagttgcacagtgacaacaaaatacaacccaattcatcctgacaccgaacactctaggtcgcgccgtcttgacatgtacaatcatcctccgagctcggaactcactcttgttcagctttcaccttacctttacctacacacaaaaataatatctgtgagtcgacaaattcagtaagaaaagcacataacagataatataatactaacttccatgtaggcgcccatacacctatccacaaggcttatcagataagtaagaacgttctttactaaggtatgaccactataacatatgcactacgtactgttactatacgagtgttggtaggattttccccgtacctcgagtacccctaagtgttataccatatacactccgtacctatccgtactagtgttggtaacaccgtactatacttcaaacattgtacattgtgccaacgcactcagtaccactatcgtactagtgttggtcgtgtaagaatcacaaataacatgcatataccacacatacacatactcatataaaatacgttctatgctagtcttacctcgtttccaaattcaagtgcgctgaccgacttgaacagaaaatcatgtgttggatggatgccctatgtcacatttacgcaaat

SEQ ID NO: 148906 - DNA, 1201 bp, Cannabis sativa
  modified_base (1086)..(1086): a, c, t, g, unknown or other
gtatggctgctcataaatatgatggtggcatgggttttcgacacttgcatgatttcaacattgccatgctcgctaaacaaggttggcgtctactttgcaattcagatactcttgatgcaaaagtctataaagctagatactttccccactctgatttcttgttagcagagctaggaagtaacccaacctgtctagagaggtatttggactacccaatctctactccattcgggtgtcagaagaataatcggatcaggggacacagtaagcttactaaacaacccgtggctacctgtacaggataacccatatgtttcaacaatacaccctggtttaatgaaccaacatgttagctccctttttcatgtgcattgccgctcttgggactatgaccttgtacgagatatgttcaataatcgaaattttaatattattttgggcatcccactaagctcaaatatctcaattgatacatggtcttgggagggggaaagaacgggcgagttctcgatcaaaagtacttataacatgctccaataacaaaagcgtaccgaagagatggtttcaaactcagacttctggcggcaactatggcaattgaaggttcccccaaaagtcaaaaacttcttgtggagagatgttacaggtacattaccaacttgtgtccaactagtgatcaagcatgtcgatattttagtcacttgccctgtttgtaatctacaacctgaaaccatcagccatgtcctcatgtcttgcccatttgcatttgattgttggagccaatgtgcaactccaatagtttttgatcctgacggttctttcggcaattggttggagaccatctttgagcaagctgaagctgatatgatttgtcttattgccatgtatagctgggcaatctagaaggctaggaacaaggttgtttggaaaaagaaagactcctctgttaataacgtgcttacttctgcacaagtagctcttgatcactggactaaagctcagataaaattacattgtcatcaatatgtctggaaagcattggtaatggcgctgagtcatggactatgttatagtgagatttctctnacctagaaactcgagaccagactcttatttagaggacacgtatactcaaattttttaatgaaagctgagacgtctgtaagagactcctcgaagtttaaacctcgcccaagataga

SEQ ID NO: 148907 - DNA, 607 bp, Cannabis sativa
  modified_base (575)..(578): a, c, t, g, unknown or other
atgaatgtgtgtatataatacgtaaattcatcaaattataataaaataaagcaatgaataattgagactttaaataaaaaagatataagtaaaagtagtttaataaaattatatactaaatatgtacaaaaataatatatattatatataatatatatgttaggtctgttctcggtttaattggttggtttgccattgacactaaaaccgaccatgttaaggcggttttaaccaaaggcggtttttttcggttttcggttttttcggtgtcgattttttcagtgttcggacggtcggtgtactgagtttggtcggtttcttaaattttttgctcacccctactagtatccagtatatatagtaataccaatgatacatgtgtgatgacaaataattctcaattataatagtagcaataattattactacaaaaaacagctacatttagtaacaactctttagtcataatttaaattttttgtggctaaatattactttcactcacaataaaaagttacttgtgactaaaacatagtatttaggtaaaaagtgtcactaatttagttttaatcacnnnnaattgtaatttttgtgattaataccttta

SEQ ID NO: 148908 - DNA, 861 bp, Cannabis sativa
  modified_base (578)..(580): a, c, t, g, unknown or other
aaagtttagttcatggaaaaccttctcttcagaattccatgcacaattctcctcctcacgcaacctttcattgcatttgggagacttggtcgatgttaagcaatgactaggcgaaccactccgggcatacattagcagattcataacgtagccaaccaaagtttcacgggtaaccgaagatggaaagttatccgcgacactaggaggcatcgaagtcctcagtgaactctggaaggatataaggaagaacgggccagtagactcaatgagtgattttcttgaccgagtcgaaggcttcatcaagctcgaagaagccattcaacgagcggaaggtgaacaaaagcctggcaagtcaaaggctccttccactggaacatccgcccaacttccccattatccaagtaattcaagctcaagtggtaaacgttccaacaacaaccaaaagcaagggaatgggaagaaaggaaagttcactggcaagttcgaacaagctccccgggagaatcatgctaagtacattgcattcactatcttgactgaagatatagaaagagtttacatggcaactcagtcgctgnnncatataagaagcctgggcccatgatgaaagataccagcaaaagggacatgacaaagttttgtcagttccacggagactacggccacgacactaatgaatgctataacttgaagcgggaaattaaattcctgataaggaaaaataatccaaacctgcaaaagtacgttaagaccgatcaaggtcaaaggaacgataacaaccaagatttgctacctccaccggtagatggacatttgcaagtcattgttggaggcccacacattgctggagattcgggcaaa

SEQ ID NO: 148909 - DNA, 530 bp, Cannabis sativa
tgaaggttcagactctgattttgaacttgatgatgaagatttttgagatacccaaagtgctgaaggtatttatgttgtttgttttagaatttttttccttttttcttgtagatgttttggggtttttttttctcatttctatatcttctgctcattttaatttatttggtgttgttgtggtgattctgtccgtgggtgtggaagatgagggctataaattcatttcttcttcgttctctttagctatttttgtagtttttttttctggctttcctataaacacatttgacgagctcactgacaaaagagttttaaggtgtgtggttcttttatatttttttaagcggttatgtttgcttcatttgttttacatttatttttttgttgttttagtagtttctttattctgatttttatgaataaacttgcaaatatggttgattttgcatctggtgttgaggttgtgcagtagattatttgttttttttaatcatttttttcttttgttttgtttgattgttttagtgttg

SEQ ID NO: 148910 - DNA, 505 bp, Cannabis sativa
  modified_base (54)..(55): a, c, t, g, unknown or other
  modified_base (356)..(358): a, c, t, g, unknown or other
tagatcttggctttaatgattatgagtaatcattattttaacaattggtatcannagccaaagttattgattttagggctcaaattttttttcacaaaactttttttttcaaatctgaaatttgtagtgttgttttcggattaatgtgcttaaagttgtgtgaatatgagtattatcctctaaatgtgttcatatatgtcatggtaacaatcttttactttttccattgagaaatacatgagttttaacaatggagaaacccatttttagattcatcattttatgatgtattattctgtgtttgttgagtaaatggatattggaaaatgatagaggattaaaaatgggacaaaacnnntcaaacggcgtcgaatttggtggccggatgtgggagttatggccgggtcacaaaccgggtcgcgctgatccgagttgcaaacccgcggagccattggagaattttttggttgacagggacgataaaaacgacatgtcgtttgcctct

SEQ ID NO: 148911 - DNA, 558 bp, Cannabis sativa
aaataagttgaaaacacctcaattaatcggaccatcacagccacgtgcgacaaaaccagtcccgacctcattttgatgtatgattattagttcatctattttagaataatgcatactaaaacaaaatttgtacaaagtttatttagaataaaatttaatatactaataataattatttatcaataaatcatacaattttattaaaataaaatttaatatactaaaaagttcatatattttatttatcttttttaatatattatgaaattttattaatagcagtcagctaaaagaatagcttgaaatctaatcggacgtctcttttattggagacatgactaggattagtaaaaaaaaacaagtcgaaaaaaaaaaaaaaattgcaacattacaatttttcttaagcacacttatattcattttcatctacttctcaaaagacacaacaataaaaattgttacagcaggtttatttaatctcataacttagacactcaactattatacaaggtatgtaactgcattactaacaattccttcactcaactattttattat

SEQ ID NO: 148912 - DNA, 645 bp, Cannabis sativa
cacaaacatattgtggtgagatagtgatttagcaaagagccttgcgtaattaatgttgcaattcaaatggaaacacatgatccaatgggtatgagtgtgatgtgggtgtaagtaatttagtatggcggtttggaagataggggattaaattattgggtaaatattatttcggatgttttttaaaaattattaattggatcatctattttgttaaatgacgaaatgaatcctttattttttaaaatggtaaaaataggactgtaatctcaattttcaacaattttactttttaatataacaaactttaaaataatttctaacacgaacagatacagagaatgtaactagttttatcatgacatctctaaattagagtattattaagttttattttgataaaaaattaatttagatcctatttatataattttcaaaaatacgggatctaatttataatttaacaaaatagagagttcaattaataatttttgcaaaatatgatgtccaaaatatatagtatttaactttttaaaataaataaaaaaacgagaaatttaattttctatacttacatgtacctaatattttattcctaaactaatacatatcaccattgaaaataggggagttatatttgcacccaat

SEQ ID NO: 148913 - DNA, 621 bp, Cannabis sativa
gtaaaatatttccaacaattatttagttgtttttgtgttattattgcgttgagaagaaaagcctaacaggacaaagtccactacgtccaaacttgccacgtggggccactgacgagttttgatgctgtaatcctacgtgcctcagtcaactttgatgtctttacccccactcgcgtgtgagtctcacttgctcgcatatccacatgtatggctcactttcttatccgcatctgggctttatttctaccgtaattttgtaaataaaaaatttaaaaaatagtatctatctctatatataaagaaaaagtatggagcggtgacattgagctctaaaatcactccaaatagtattatctcttctctccttaattctcacatttttttaaaattttttattaagtttaaataataatttaattaaaaaaaccaaaaatacttaattattaatatttttaatttcaaattttactttcaaacagtacatattaatctattttttgtaagtatatattaactaattgattaaaaaaaagtatatataattaattaatcaatataaaatcactctaaataggtatatatattctcaaaattatctcactttctatttattttttttaa

SEQ ID NO: 148914 - DNA, 536 bp, Cannabis sativa
ataataattttaattaactaaataaaatttataaattatacaattataatagttaaaccaaaaataataatattaatttataatatacatatttttactacaaaccagaaaatacatacagaataatactaaagactacaaatcataaaataataattataataaaggcatacaatataatgataaaaagtacacacccagaaaatacatactaatcatcaagtgactacgaaccaagaaaagtataacaaaaataaaaaaaaaaattatcaaaactcaaaaattcatggccgtccatggtgatgagccaaccaatcttcgtatacagccatgcactctaaacatccacaatcgccaacctcgaacaaccaccatcgtcatcaatctgcataaaaaataagtagccaacagagaggagaaatagagaagagcgtcgacattatgcttcgatctacaataaatggagataggaagcggagattgtggtagaagacgtcggagcccatccacctgcacaaatcagagataggtagaga

SEQ ID NO: 148915 - DNA, 983 bp, Cannabis sativa
atcgtgaaattaagagaacaatcaacctttaatgaatattttataattaataccattttattcacttgtagctttataaataacgcgactcatttagttatttttgaggattcaatttcgatactttctagagagctattacgttataaaaaacaatcatttgtaatccatctgagagtattaagaaactcacttgactctgattcttgtgatcttgatattccaataagaaatattaagaaaaaggaataggttattactatataattggagtcgaaccattataaaattattgtgtcgtttatttacttatcgtaatctcgtattcaaatacttttattgtcgtatgtgtgacagtcagtagtctcatgatccgtaagttaaataccaagtaagttgtgtaatcccacatcgtcttgggaaggtcgagtgtgatgattttgaaattgtgtaggtatgagacttacacagttgaagagggcttaaataaattgattgattctacctatctcaacaaggtgcatcttgcttttggtagcccatcttgaaagaactccacagttaaacgtgcttgacctggggtaattttaggatgagtgaccacctggaaagttttcccaggaagcatgtgagtgaggacaaatttgtgttggtctgtagggccagtcgtcagttcttgacgcagccagagtgacgtacccatgtataaaagccatgagtccgtgggggaaggcccaatggaggtttgaagcggggaggttacaaatagtatcaaagccttaacccagctggaagtgtggtcgacgaagacgtcgaaccccgtaagggggggtgattgtgatagtcagtagtcccgtgattcgtaaggaaaataccggataagctgtgcaatcccacatcgcctaggaaaaatcacgtgtgatgattctgaaattgtgtaggtatgagactacacagtcgaaaagggcttaaatggattgatt

SEQ ID NO: 148916 - DNA, 733 bp, Cannabis sativa
ttattgatgttgaataaaatggatttcattgaaatggagctttatatagggcataaaacccaaaactgtacattattcaaagatccatctttcttcttgacaaacagtataggggctccccagggtgacacactaggccgtgaaaaccctatgtcaagcaacccctgaagctgaattttcaattctttaagttctgctagagccattctataaggggccttagaaatggttttgctccaagtgccaaatcaagaacaaaatcaatttctctttatggtggtaaacacggaagtttatcaggaaaaacatctaggaattcccgaaccaccttgatgtcctttggctgaattgatataggtcgtgtggtatccaataccacgaccagaaaccctagacactcgtctcgtaacaactccctggctgttaatactgaaattactgggatctgagatccctgaaccgatccaacaaaaacaaaaggttcttcaccttctggtggaagattaccatattccttttacaatcaatactgacagagtacttggatgagaaatacttggatgagaaatccatttggatgagaaatccattccaagtataatatcaaaatttgctaaacccatttccattaagtcagcactcaactccctatcctcaaatctgatcagcatagacctaatccaccttttggagatgactaattcttcgtcaggcagtagcgttccaaaccctg

SEQ ID NO: 148917 - DNA, 726 bp, Cannabis sativa
  modified_base (381)..(383): a, c, t, g, unknown or other
  modified_base (670)..(672): a, c, t, g, unknown or other
cggggattgtggtgaacatcaaggaggaagaaaattatatgaagaaattgttcgtataggatattattggccgaccatgaaagcggatgccatgaaattcgcaaaagagtgtcaaaaatgtcaaatttttggagacaaaatccatgcgccagctatccctctccaatccaccaccaccccttggccttttgacacttgggctatggacctcataggtccaatctcgccaccctctagggaagaaattggattttagccgcaacagagtcacaaaatggtcagaagcaatcccattgaaaaaggcctctacagaagctgtggccaccttcatcttagaacacatcatttgtcgttttggcattccaaaaagaatcttgtcannnaatggcacaccattcaccggcaaagcaaaaaaaaagttactagaagattatcgaattttccatgagaaatcaaccaggtactacccgcaaggaaatggcatagcagaagcatttaataaactattgctgcgggtattaagtcgaatggtacatgacaatcccacaatttggcatgaattcattcctctggctttatgggcctatcgtacctcaaaacgtgggtctacggggtttacacctgtaatgaccgctctagtaatttggattagtaagggcaattagcactnnnttttattattttattattatatgtgaattaatttaattgtggaccccaatattt

SEQ ID NO: 148918 - DNA, 627 bp, Cannabis sativa
ccaagtcattgtggtaacatcatgaatcatggacaccatgtcccaccaaaccaaagcatcttcttgaaattggaaagtggcacatgccaccctatcattactagtgacaccgataaagttcaagatcctgatgatcacagttagccattgcttgactttcatgacatcgagacctcccaggaaaactagaggtgcctgcttacggaacctttcatacaagggttccatccgattcattgcaacaacaggttcggcctgcatagcaggggcaggggctactggaatttctggagcagggtttgcaggagcaccctgctgtcttaatcgccgaatctcttcatcttctttattgattctggcttgcatttctacaaacctattttcccattcatgggcagcttgggcagcttgttgcgggttacatcaccccgaccacgtgccctacccctgggacctctacctcggcctcagatattaaggggaatctgagctccctgaccaccacttgatccaatcgaatggacctggctcctggtgtttcgcctagcatccatactaattagaacagcctacgcaaccaagagctagtctggtcagatcgttatcaaagaaaaacttactaatgcc

SEQ ID NO: 148919 - DNA, 599 bp, Cannabis sativa
agagagagagagatttgaattcaataaagagagatcaagctttttctgattcactaagaattaaggttttaatgtttttcaccacatacttgtaaatcaaagctttatcatattctgttggttttattatactaaatcaggtacgtagtggaagagtttcgtattatctaattatcattataccatagcccctcaggatctccagatgtgtgtacattaaatcaaaacaataaaagatataagtttagagtatacctcttgaagcctatcagggtatcctcgaaacttcttgtaagttgtatcccttaatctagttgatgaggaattagcaatttggactcacaccagtgtttttcaaatcgatccatcacacacaaggaatagtgtggactattaggataaagtgtataaccttattcttgttgaattctaaacagatgagcaagaacaatagagagaaaaatagagtttctttctctctagtgaatttaaaatttgtagtgtcaaaagcattgtttgatttctcaaattaggcttctatttatagtagtttatgttaattccatttttggcaaatttaattgacaaaaatattttat

SEQ ID NO: 148920 - DNA, 1022 bp, Cannabis sativa
caaacaccattatacataacacacacattaacagttgaacctgtcacatacatttaaaaaaccacagttataatttacaataaaaatctcaccgaaaaaaaatcttaattaattaataataaaataagaattattaattgataataaaataataattaataattatcactaaaaccatacaaaataaaacaataattaataaaataatatttaataaaataaaaattattaataataattaataattaataataataattcataattaataataaaataattattaataaaaaataaaaaaataaaacaataattaataattcataataaaataataattaataataaaagaataattaataattaataataaaacaataataattaataattaataaaacatttattgatgaaaaaaataaaaaaaataattaattaaacaatacttcataactcaataataaataaataattcttaaaacattaactaaaataataattattaattattaattattaataaaagaataattaataacacaaatattaacaaatcaatacaaaataaattaatcgtaaaataataaataataaataataattaattacaaaaataattaattaattaaaaaaattaaaaaatgccgtcggaccatcggacccaatggaggagcattggactccattttaaaaaattaaaaaaaaaaatccaaaaagccatcggggccgatggggtccgattggtccgaccatcggacccacatggggagcattggacctaggttcaaaaaattaaaaaaaaataaaaaatagccatcgggtctgataggggtccgaccataggacccacttggaggagcatcggaccatcggaccccatcgggcccaacgaaaaaaaatgcagaaaatcagcaaaaattcagttttcacatgcaacaaacattttaacagaaaaataacaaaataacagcaacaatccacagatcaagcaacaaacacaacattcttaattaaatataaca

SEQ ID NO: 148921 - DNA, 518 bp, Cannabis sativa
gtgtactgggtatattggggagtgtacccccttttttgtcgcttttcctccgtccgggtgctactcttggaggatcttttactccttgaaccttgggaaggaccggccaagctcgcagtcagagcggagtgcgagagagcttgtccatttatccccgagggattcccaaaatgggacgatgcgggggccaaggcctggccctggctatatccgggagttgcagagaactgtatgccgctcatcggtggagctgctgctggcacagtgcccgagggctgggctccaggcacatatcctgctatcccggtgggataatattctccataggccactatttgggcctcttcaaggttaatgtatttttggactctcttctggaaatcttgaaggtttgcggctccttcctgttgtagtgagttccagaatggagtccctgtacggatgcctgcctggagaagggcaagctgttgtctgtcatcaactttcttggtttttgaggcttcctcccggaacctctt

SEQ ID NO: 148922 - DNA, 1006 bp, Cannabis sativa
tagactttctagcatcaacgcaagtctagaaacttaatttggtgtagtctaacagtattaaaatagcaacattatcgactaacatatagttcctctttttgatcttaagattcacttgattatattccaatgtttcttttctggattaatttgatacctactcattactcccactcaataataggtgtctggtctaatgcattgcaaagcatacatgagacctctcactgttgattcttaaggaattctttccttggcctccatattttttggaatagtggaaactgttccttagataaataaaatctatgtctaggagtcaaagacatcctatagacatctgatattttttttttctatagttgatgattactcaagaaagttataggtgtttattttgaagaataagacgaaagttcttgagagatttaagcactagaagataatgattgagaaactagaaggaaagcgaaacgactaagaagagataatggtctagagtattattcagatgattttgatgtgttctgtaagaaagaatgaatagaaggcacaagaccgtgatgaagactcctcatcaaaatagactcacggagaggttcaacagaaccatcttggaaagagttaggtgcatgctattgagtgctggattgcccaaagtgttctaggtgaaagttgtgtccattgcaacttatttgattaacaaatgtccgtcaacattattggatttcaagatgtcagatgaggtgtggtcaaggaagccaataagttatgaacacttgaaggtattcagatgtgtctattatgcatacatcatgcaagacaaacttgaggcaagggccttaaagtatattttcttggagtatccagaaggagtcaaaggatatagattatgatgtctggagcctggaatgagaaaatgtataattagtatggatgtgacttttaatgaatctgctatgggatttatacaaacctgctggaagtcaagccaatactaactgag

SEQ ID NO: 148923 - DNA, 507 bp, Cannabis sativa
atcgtagtaaacaaaatgagcgacgttttttaataaaatataattttttaataaacccttataggcgacggtttaatcattgacttttatgcacgtcccacacttctaaagtccactctttgctctcaatcctacttaatatctcatagtattatatattttattaattttaaaagtttgataattttttaattaataataataaaaaagtaattagtaatcaaatgatgtaatagtatgaaatatgggcgcaacatataaattacattattagtaggttttaacaaacctattaataattttcattaaaaaaacttattaataatatatatttttgttattatatttgagtaattttcttcttcttattattattattattattattattaaaaaaataacttcagtaggtttttacaaacctactaatatttttcattcaaaaaaacttactaataatatatatttttgttattatatttgagtaattttattattattattatt

SEQ ID NO: 148924 - DNA, 1045 bp, Cannabis sativa
  modified_base (1006)..(1015): a, c, t, g, unknown or other
tgaccacccaagttatggatattacatatctgccacggcctagggctcgggtcgtgacacctaagttctttccttaaagccctagaaattacccaaaagcaaaattgaaaaaatatttaaagaaaacacagtaaaaaaagatgcaatcggaagcaaaaataaacgtatcaactcaggaaaaatggaataacagagagtatgaaataaaccacttactatatttctaaagatttttgggcagtgaataactttgtgattggaatcgtgatgaatgcgatgatgggctctgagaatttctaagattaaagagaaaatctgaggaaatatacagaaaataggtcaagggctgaagttcgtgtcctaaggtccaggttagagtcggagtccaaaatattgattaaaaaaaattatctaaaataattttgaaagtaattttttttcttcaaaattttaaaaattttaattctcaactaaaacatttaaaaataaaaatagatttatagaatgtatttatttttactgttctaatttaaaaaaagaaaaacttattaaaaaagtgtgtcaccttaatttttgaaacattgatttctttagagcattgctatcaggcatcagtggtgcataacacattctcgacatgtcgcgttgcgattgactagtggtactccctaaaaactattatattaaactatatgagacccaatacttagttggaccgataatatattgacacatagaagggtgctagccactacttgtgccctttagcatttctcttttctttattaagcaccaatggtgtctagcacccctaaacatgtcgtcttgcaataagttagcgatactccctaaagttattatattaaactatatgtaacccgacacttaattagactaataacaataataacacataaaagagtactaggcatcggtgatatttttagcgttatccttctttattagttaggggagtgttttgtttagagaaatgctaaagggcacnnnnnnnnnntagcaccttcctatgtgttaatatcgctat

SEQ ID NO: 148925 - DNA, 562 bp, Cannabis sativa
aaaatatcacttttatgtattttcttgttgaaatgattctttaacgtcaccttaaaaaatataatttgacatttttaattttctcaacaaaactaaaatatcaaactcacattactactcacaaaataatgtgattatttttacccattattttgatttatctcctcaatgagattaacccaaatattataccaaagtaacaaaattctcatcaatttttttcacgactttaattatttaagattcaaaattgcttctccaattttattttttgaatccacattgattcactttatttgagtctaaaattgctcttccaattaatttatgacttatttcacaagtttggatccactatgaccttcattgttcttgcttatgacaatgcaagtccaataaaagtgtaactctcatagtctacttttccttatctcaaatatgagattattatcttttaaaattattgcattcacttcagggaacgacattgaaaagtagaacattattataaatttcttaaaaatttattacttgttcatccataaaaatataaaaaattatt

SEQ ID NO: 148926 - DNA, 675 bp, Cannabis sativa
  modified_base (117)..(125): a, c, t, g, unknown or other
tagatttattaaactgtaggggtattatttgccttatatgtgaagtatattacttttgtaagttttgctccgcgacaacgaaaaatgcgatggaaggttagtttgatcacatgggtnnnnnnnnnaccttatttcttagtgggaaatgttttagagaaaataaattatcgagattgagctgggttatgggagttgacaagtttacccctagtctttaaaataccgtagttttgtgagtaagggcatttttgtaattgccaagagaggagataggtggctgtctagttatttgacacctagcaagccaattcttttagcaagggaaattgattttccctaacatttatctcatttagtgaagttaaaagaaaataccaaaattggaaagaaccctcttctttccttctctctctcttcgaaaccagcaagaacaagggggatagctactgttttgtggtgattttagcaagaaaaccttgggagattcaagctaaggtaagccctagaaacacccttctttagttttttaggttttacttggtttgagtttatggtttagtgttataggggtggttaggtttgggaatgcttagggttcgaattttatgtttaatttgagttgattaagggtcctaccagctggtattgttcattggtttaggttttgtgcaagtt

SEQ ID NO: 148927 - DNA, 784 bp, Cannabis sativa
  modified_base (747)..(749): a, c, t, g, unknown or other
catggtattataatgaaaaataagaaggcagagaagggaggccagtatgatggttggtatagggctttgggatttctttgggtttttactgtttagttttatgaatgttttcctgctatggtcaactctttctgtaaaagagtttcatcttcgattccaaggattttgaattggagcaacaccattgtcaccaaaaatccactcttcgagacttgaaggggaagatttttgatttgccgttgtacaaggtaaaatacagtttctttactgtttgttttcagttttattctattgttaattttttgttttcttaattgtttttttttcatttttatattctgattgattatgatgttcagttgaagatcaaaaacatgtgtcctactgatgaagagaggcagcagcttgaacttgacggtttatttcttgatgagtctattgatgaccgtggtatagcgaagcaatcattttagagtgggtcatcttcaaagaaatctgattcagaggatattgatttgatgaaatctaagttggagatgttcatttcgaatcaagcatcattggctgaagacttcatatccttgaggttttttgttcatcttaatttcaagtccgtaatgactgtaattaaggatattcaggagaaggttaatgccattcatcatcgtccttctgatgacgtattatgtttctgttttttcatactttgtttttagtttctttactgtttcatttaagttgcatttnnnttgtttgaatcagggaaagtcatctgatgaattag

SEQ ID NO: 148928 - DNA, 730 bp, Cannabis sativa
aataataatatatatctatatataaatgaataaaaaagaaagaaagtcagcaaaataaaataaaaaagaaagatgctcaaacaaacaaatataatttgatttttgtagaaattttatatttacaaaaaagaaaaaaaaaatggaataatgaagctatttgttggatgcaggtggtgcacgcgcgcctagtgaattgatttttttgacccattgacaattggtcacattctaacaggaggcggtacttatgtcacattaacgttataattatattaacgttataattgtaattaatttacttataatgtatattaatgaaaaaatcctttaaatctttagttgatcatctcaaatgaccacaacacgagacaatccaacatcaaaggaatcacattccttgaggagcaagttcacttagtcagcatgtacttcactacgcctgacacatgcatatggtggttgaagctagctgtgacgtgtccggagtgcaagtcattatttaatcaaactgagatgtgcctatgttcccattttatctcagcattttaagccactaaaccactaagtaatgtacgaaaattctaatttggagagcaaatgtacactataaataggagctaaatacagtgaaaaaaataagattttacctagagttattataccaaaattgtatcttttcttttcttcttctttattttgctttattaattttggtgtaaagacaatgcct

SEQ ID NO: 148929 - DNA, 542 bp, Cannabis sativa
aaattaacttgaagtaaattcaaagtcatgtcattaccagcatcactcggtgctaattcttgaaggagattttttgtcacagccgtggaatcaaatttatctgaaacatacacccaggctctagattcaaacttcttcttcactcgttcatcattgaaaagagtttgagcgagggtagttttccctatcccacccatccccactataggaatgacacatatcttctcactactatcttcatccgacatcaacaacttcattaaagcatcttcatcagtctttctaccataaagttcaggttcatctggcagagaagtcttcacacgtgaagtttctaatggtttcatctcgacaacattcttttcaagattcaagtttccaatctgattggctaagtactccaacctcttgagaatcccctccatatttgcattccttaggtcagttgaagtggaaggtttagagaaacaagagagaaacttactaatggccttttgtttttctttctttgactcatcagctttgttgggtttcatagcatc

SEQ ID NO: 148930 - DNA, 718 bp, Cannabis sativa
acaaattcacagactggggatcctgcatcgcaacctagggaacacaagggttccgcctgctgttaatcctggacagccggcgagcgtcgggaatggtgaaacaattcctatagatgaaattgcgcctggtgtgtaagagactgggaataactgttccgcacccaaccagggaattcataacacaactgtttcgcctggaaccaatgctaagacgactatcgaagatgccattgaattaaaaaatctccgtgacgtgctcagactcatgcagggtcataataataccctacatcataatcaagatgaactacgtgttgcagtatatctcgcgttcgacgaataaaggcgtatgttcgccaaatggagagatagagagatggaggcattaagggctcaccatgcagagatcgaagatcatagtcgccaagctaccgtgccgatacggagagcctaccgaactgtaggtcagcaatcgccgaacgtcattccccttggagaaacagacgaggatccaacgatgaacacttcccaaactgcaaatggccagccgcccaatccccgatcacaagttcgactcgtgggcccagtggtaggcgagcagaccttatcttgtaattcatcgggaggagtcatacctgatggctccaaccaaatgaatggtgccattccacccgtcaaccaagtgaatcaatcactaaggcaaccacgcgcttctgtg

SEQ ID NO: 148931 - DNA, 846 bp, Cannabis sativa
acaattcatatcaaattaatctagatcaactaagtgatatatattgactgagaatagatataacgataagattataatatatgttctatctttaatatcggctcagtccaatgtaaacatataaattcgatacaagtatactttactactaatgtcctagaaaagacataccacttgccatagtgtaagtagaccatatcgtcgattatcacgtcagtataaatttagtgcactaataaatctcaagtcttttaaatatttgattcatagaatcataattaattttcactttgatgacaccattataattatgaataattctatgttcttgatttaatagaatttatatattagatatataatcacgtaaataaacatgcgaaccaagcaattgataaattcaaaatatgatgtttgaactttattgatttaaaataatattaaattaaattcaggttttatttagggcataatactcaacatctatatggtatctgactctatttaaagtgagactttcgtgatgaaaatagtagcaatgatctttgcgtgggctttttatgggagtgttagaaaaaactcgatttgtagatggttataatcatagtacagtgaagaagagtccagaacacgagaaaaaaaataacaaaaaagaatatgatatggtacctttttattagggtttataccttaaaaaatttataaagacatttttgcttataaatataagttggacattttcatatatgatgttaaattattaataattaatattaaataattcatatataaatataaaaaattattccttattcatacataaggttgtgatttgtattgtacagg

SEQ ID NO: 148932 - DNA, 586 bp, Cannabis sativa
caacctcgaacaccacatatgcaggcactataccatctgctccgttatctaaaaggacatccaggacaaggccttctttactcaacaaaatcctccctgcatttacgtggtttttcggattctgattgggcttcatgtccaaccactcggcgttctaccactggtttttgcatctttctcggtgacagcctcatctcctggcgtaccaagaagcaacctaccatctccaaaagctccgcagaagctgaataccgtcctttggccgtgactagtagtgaaatcacatggcttcaatacctcctccgtgatttccaaattccacaagacaaaccagcttttatctactgtgataatcaatccgccatccacattgccaacaatcctactttccacgaacgtaccaaacatatcgaactcgattgtcactttatacgggataaaatacaacaatcaactatccgtctcattccagtcacaagttctctccaacttgccgatgccttcacaaagcctcttccctccactactctctctgctcatatatccaagatgtctatatatgatatatatagtccatcttgagggg

SEQ ID NO: 148933 - DNA, 770 bp, Cannabis sativa
ttatttaataataaatattaataatttaatattcatgtatatattaaaatgttcaactctttattaataataaaaaaaatttctttataggcttttcaagaaataaaccctaaaaatctcccacttaccctataagcaatctgggcatctcccttagtcccatattagttatatgacccataaaaaattttgttggtagcgtctttatgaatggatttgccaagttatgttctgatgcaatctttaagaccgtcatatcacctctttctactatatctcttagtagatggtacattctctcaatgttcttgcctcttgtgactcgttggttccttggagttggccactggtccactattgtcacaatagagcaccagtagttttctacttctggaactacttctagagcagtgtagaatttcttcaaccaaatcgcttccttagctgctttgcaagttgctctatatttgacttccatggttgaatctacaatactggtttgcttaatgcttctccaaactatagctcctccaccaagagtaaatactgacctagatgtcgtctttcgaccctctttgtatgattgaaaatcaaaattagtatatccagtaggattcaactctccactagaatatacaagtatggaatctcgaattcttcgaagatacttaagaatgtgctttacaattatccagtgttccaaacttggattagattgataatgactaataatccctacaatgtatcatatgtcaagccttttacacaac

SEQ ID NO: 148934 - DNA, 833 bp, Cannabis sativa
ccttcatggtcaaacctacatttcttgacaacaaagtcaatgactttcttgcaggttatggagaagaggggctcggcctccgtccatttagtgaagaagtcgactgctactaccgcatacttaactcctcctcgcccagtgggtaatgcctcaattagattgatcccccatatagaaaatgggtagggtgaggtaatcattctaagttctattggctgtacgcgaggtatatgtgaaacctctgacacttatcacatttcttgacaaactcgtgtgtgtccttcgatagtttgccttcgatcattgtgtagcgaggcactgaatacaatagttttcgcgcctcgtttttgtcatttggaagttgaccatcgtgtaaatagttgataataggtgtcattcatgttggagagctatctatcatctcaacgtcttcaatttcacatatacttggctcgctcagcatctctaccggaactagattcaattcatccaggtcattctataaggccagttttgctaaggcatcggcattggagctttgttctctcagaatttgttctattttaaagtaatcgaatctttccaagttctttcgaactttctctaaatacttcgccatttttaagccttttgcctagtattccccgaggacctggtttacgattaactacgaatcactatgacaaatgagatttttgactttcaatgcctctactatctttaagccagcaattaaggctttatactcagccttattattggatgcgtcaaattggaacctcagagcatagtgaaacttaaagccttttggcgatattaatattacccatgca

SEQ ID NO: 148935 - DNA, 545 bp, Cannabis sativa
catgaaccaaatgacacactaaataagtgatgaaaatacttttgtctctttattgataattgaatgataaagattacattgaaatagagttttatttaaagcacaaggtttgcctcgtgaatctctcttcctaaggtcaggttgattttgggtaccatctttttgcgctgcctttaatacagccatttcatgctccaactcatacgccagtttacttcctccaatcgtcgcctaagatgacggttttcttgttccacgattggtatgtatctggttgggtcgtaggcgccatcctcatcaacctggttagggaattgctgattgttgctcatccaaggcccgtcaagccaggtgtcccaatactgggtcttccaggggcttgcattcagttcatgcgatgactccatagatccctaaggacataatgtttcttttcagggacgatgattgattccgtcttgaggattattatctttggtgtcatccatcacttttatgtcaggaggctttttctaagcttcttcacagaggctctcaatgaaagc

SEQ ID NO: 148936 - DNA, 601 bp, Cannabis sativa
gctctaatttcaatgatgactctctttaaaattatcaaataaatttgatattatctaaatatttaatattttatatactcttgtataaatcactttggataattttctttctaaaactactttaatagtaatcattcttcaaggttgtcattatttcaattatatcaaattaatctaattcaatctaattaaaaattatatattcaaattataacttgataagttgcatgcgtaattattttttttatacacgtgataagcaattgttttttttaaccagtggtaagcacaattgtttaaaccttatttttctgtattgtaaactattcaaaaattttttaaaaatttataggtggtgctaaataactacaacatattcacgatcatgataaaaaaaattggactaaaaaactcgctttgatgttgaaatagataagtttttctttttagtgttgtactacatattttctctaagtttttcattttattatatttggaatgattattggttgaagattttatagtagaagtaagaagcttttatggtgcaccccgtactattttgacataaaaaaaaaaaagaaaattagtctgtttttat

SEQ ID NO: 148937 - DNA, 710 bp, Cannabis sativa
tattaacgcatgtcgcaaatggctcggtgtatcacagtatctcaaggggcatataaccgcgtatatgaccattagaatactgtgacacacccaccatttggaaactcggttaatgctcttgcgacttaactcacaacatataaaatcctaaaagatctagccaattatgagaagtaagtatattttgtcaatttgtgagtattcgaagtgttagtccgaatacccgcgagtattaaaagcatgaaacagggcctattcaagtatttcttatacagtatgcagttacgccaatttccaggtcattttttatgaaattacccagttttttacctaaaaaacgtagcctcatgcatattggaaacccagaaaacagtgttcccactcaaaccgaaaacgaaacacagaggagattcgaaaactgaccttttgcttctgacgaaattgttcccacgattcgcccttgacagcactgtagaatcaacggaaaatccacggagagaggcgaaaaaactgggcaatttatggaagtatttttggtggtttctctgaaagagaagaaacaaggaagtttaagaaagttaaagaaaatgagggaaaattggatttttggttcgaatcagggaatttaaatacccaaatccctcattaattgggatcacgacacgtggcaattaggaggcctaggttcgcccaatccaacggccaaagat

SEQ ID NO: 148938 - DNA, 952 bp, Cannabis sativa
tcgtttagactgagttttcttttgtacaacttacaaaaatactgatttttggtctaatctttacaaaaatactatcatatggcagaaataacttttacactgtcctggcctatttttttttccttttatacgttatattataaacaaaaaaaaaatgagatctccatcttccacattcacggatagaaccactacaggaacaccagaacaatcagaaaacaaccattaattccggtgagattgagaaaaaacagtgaaatcaacgtcaaataaataatcatggcaaaataactgtaaaacaacactaaaataaattaaacaaaagaaaggaaaaaagattaaaaaaaaaaactagtaattttctacacaacatcaatatcagatgcaataacagctatatttgcaagcccaatcttaaaaaaaagaattaaaaaactactaaacaacacaaaaataaatataaaacaataagcaaatataatcacttagaaaaacataaaagaaccacacacctcaatttttttttttctagcgagctcgtcaaatgtatttataggagaaccaaaataaaaaaactaaaaaataaacatagagaaggaagaagaaatgtattttatagcatccatcttccatactcacagatagaaccaccacagaacacgagaacacccaaaaaataatcattaattctaacgagatggagcaagaacagtgaaatcgacgtcaaaaaataaattatggaaaataacggtaaaacaacactataacaaataaaaaaacaaaggaataaaaaaatgattaaaaaaactaatcatcttctgcccagcctcaacaccagatgcaacagagtctatatttacaagctcaattctagaaatcagaataaaaaaaccacactaactcttatcttttccaaaaaacgtgactaaaaatttcaaaaactaaataaaaa

SEQ ID NO: 148939 - DNA, 695 bp, Cannabis sativa
atctgagtgcatgtaatccacaatccctttggtgttgtgttccccaactccaaacttgaccctggtagattttccaagcacacaatgttcacagaattccaagtcttggatattgtcctttccaaaatttcctttctggtgcagaattttcagacccttatgacttacatgcccaagccttttgtgccatgtcatggtggtattgcatcttatagtggcattgatctggttcttcatagtgcttccttgtaggacatagataccatttattgatgagcctctcatcacaaccttagaacccttcatcactttcatttcaccattttctatttttacagagtacccttcctgatccaacatagcaacagagatcaagtttctcttgatctctggaacatgcctcacctgatttaaattgacactcaagcctccacctagagccaatttaactatcccaattccagtaatggcacaggctctgttgtcaccaagctttacagaacctgtccttatctcttgataatcatgaaatttgctcctgtctgggcatatgaaaggaacaacctgaatctagaatccatcctagatcagattgacctttcgagacaacaagtaccccagcactctcataaccatcactatctgaacattcagacacaatgtctgcattcccatttttgttttggttatagttc

SEQ ID NO: 148940 - DNA, 682 bp, Cannabis sativa
ggatatgaccggaatgaggacccacgaccctaatggccacctctatttccctgaaactttctatttgcccatgatgctccagaagcctcagccttccgcttgtgctcggggttgccactgttggtccccttactgacattaccactagcaggagggtttgatgccatggcggcatcctttacagcctgctctttcattactttttgctcggcctcctcagcaattaaggccaagtctaccactctcttatacatagtgtcatgtgatgtggtaattttcaagtcccgactaattgtagcattcagtcctcaaacatacttttactttctggtgaaatctgtaggcactagatcaccagcaaatttagataaccgatcgaattccagagtatactcggccacatacatctttccctgagtcaacttcacaaaatcttcctggtgtgaagtcctcaatgtaacgttataaaacttttcctcaaaaagtttcttgaactcttcccatgtcatcacactgacatctcgagtctgatacactatatcccaccagacatgagcatggtcttgaaacttaaaggttgcacaattcaccctctctgttcccgtcacccccatattatcgaagatacgggtcacagtgctcatccactgatcggccttaataatatcaatacctcctagaa

SEQ ID NO: 148941 - DNA, 939 bp, Cannabis sativa
  modified_base (423)..(425): a, c, t, g, unknown or other
tatagggccttaatggataatttttccctggcgcaacgatctctagcatccaatgcgcactaaaaaattatattagaatgtatgtaagattgtacaaaaataatttcaatttataatatagaaaataattagcactaaaaaattaaatagtgtttacccaatattcataggaataaagaacatttggtggttgttattcatcgatgataaccaaagggccaattgttttgacacattctcaaaagactcattcttctcttcatcattgataccattcactgcaagaagctctgggtcgtaaaagttgaaaattcttctcaaatcatttatgctctcccacatgtacttgcattaaattgttaaatattagtattttataataatttcactagaatctgatatatataaggttaattagattannnaagagtatacatcattccaaacagtattccccagttgttgatgaagtcacacaacgccgcctgctgcaaattctctccacataatgtgatttggatacgaggtgctatgaatcttcgaggtacctgaattgtgattatatcacgtttatcttcgactcttagaaattcataaaccatccattttagtgagtcgtagattaaggccatgatctctagtgtgaataatttaccttcttgattagcaccacctttttgagaaggcataagacctttccctttcaacacatcacgtgttgatggtggttgagctagtggaccttatacaaaatactatataatatatcaagtttgatcctaatgctaccgaatttttggcagcataacgactgtaattgaatgctcccaaaaactttaaatattcctaataacaaataaaatagataaaacagttgtttattcatccatccgattgcagcacatgtattcacagaacatacttcactatggttgaata

SEQ ID NO: 148942 - DNA, 850 bp, Cannabis sativa
tttggaggattataatcatcttgggtagcgtgcctagggcattacaaagacagagtacaagtggagcacacccttgccaatagcaagacaaggtcttcttacaaggtatggcaaaaccgtcaagcaacaagcaaaaggagttaagcgagctgtcaaggagctgtaccaacatgtctggccggccaagggaagtctataggccaactaggatgagcttgtatggccagatcttggcacaagctggccacccaaaaggtgactttcagaccaagggagctttcgttcgacccaaagaacctaatctctgcaaggaaaaggtatagaaacctaacctccaattgccaaaggctggcctccatctcaaaaggctagcatcctcttagtaaagttggcaggaacatgacctacaagatcctggcaggcacatggctaactagaccctggtaggcacatagccgaccataccctagtaggagcatgaccggccagacctcaacctgtagaccttgcatggttggccagacctcattctacaggtgtatagccaactagcttctccctgacaagataatgatgcacaacttcatctgtggacaataagtcaagctgcgagttgggccttgacaatccattaagatgctatgaaaatctctagttttaaggggcaacttagtcatttgtatttattaatttaatatgtaaatatctatgattttatctggtaattagggtttatgttctcctatataaagagccttaactcaactctaaaaggctaagtcactctaagtcttatttaggccataaagctctaagtctgaaaccttaatcctctctctctctctctctc

SEQ ID NO: 148943 - DNA, 783 bp, Cannabis sativa
  modified_base (371)..(371): a, c, t, g, unknown or other
gagattgttcgccttcatggggtaccaaagtctatcgtttcagatagagaccctaaatttacctcaaagttctgggtgagtttgtagaaggttatgggaactagtctaattcagcacatcctttcatcctcaaacagatgggcaatctgagcgaactattcagatacttgaagacctgttacgggcttatgtcatggattttggagggtcatggagcaagtatttgcctctgattgagttctcctacaataatagctatcaaagtactataggaatggctccctatgagctgctctatggtaggaagtgtcgatccccaattcattgggatgaaacaagagaacgaaaatacctaggccctgagttggtcnagaaaacaaatgaggcaatagataagaatagagcacgaatgcttacttcgcaaagtaggcaaaagagttatgcagatcccaagcgtcgggatattacgtttcagccgggagatcatgtcttcctgcgtgtatcaccaatgaaaggaatcagacgctttggaaagaaaggcaaactaagtcctagatttataggaccttttgaaatacttgagaaggttggataagttgcttatcggttagccttacctccatcgctatcggtcgtacataatgtatttcatgtttcgatgttaaggaagtacgtgtctgatccagtgcatatcctgagttatgaggcattggaacggccagtgcaaattctggataggaaggaaaaggtccttcgaagcaaaaccatagcattggttaaagt

SEQ ID NO: 148944 - DNA, 861 bp, Cannabis sativa
aaataattagattaaaaaaaataaaaaatatattatttatatttcaagctaaaaaatgttataatttatattaattttaaaaactttattataagatgccctaaatataactcagcaaacataaaataattaaataaaataataaaaaaattaataatatggtatagattttaaattttaacttcaatatctaaatacaataataattattaactataaagtctaagttttaagttaaacaccaaaatatccaaactttaaatacagaatagtttaactaataaatgtaatttatgtaatataatatatacacttttattaaaaaaaatataaatcggtttaattcggtttattcaggttaattgggcggtttagaataatttgtaaaccacccaatatattcattgggcggtttagacttttattgtattatttcgggttgtatttttttgtgagtttattcggtttggtttgggtggtttgtaaattttgttgaacactcctactccaaaataccccgatattctaaaatcaacttatctcaataatctcatcaatattactaactaaaatttttgtgacatttttagcctccaatcgagtctttagaattgtcgaacttgaaaatatttttatttcataaataacttacattatatccacacattctaaataaatcttcgtaattaataaattatacttatttatccatttatagcaaaatttataatttatgctaaattaagttaacaagatcataatcatactcattactacctaactacctcctaatacagtagaacctctatataagaataccctattcaagaataacctctaatttgttataaaaaaatcaag

SEQ ID NO: 148945 - DNA, 574 bp, Cannabis sativa
ctaaaaatgaaatggagagaaccatggaggccactcttcatgaagttatcgatgatgcataagcacatcatgtgcagagcgtagagatgaaactcgtgaccacactccattatctgtggaaaaaggattccaatgttggtgaggaggatgaagcttatttggccaaggtgcacgtaatggtagctgttacataacctgaggtcgagagttccaaaccagaggtcgttcactctctaggagctagtgttgttgcctctgaggatggagctaaccaaccctaatcttgagttcctctctctttatcctttactttttttttctctttgggggccgatggccctcttttggtattcgcagagacaattattatgccttgaccgtgaggctggatgtaataactttagttttcttctcttttatgcttgaactttcgttgaatgtcattggatgtgtggctgtttttcaggttactttgaatgtctcgagtttttggttccgattgtctgaactctaagtgtaatggacctcttaggctgcgaatttaatcattccagagctacaaaatagagagaga

SEQ ID NO: 148946 - DNA, 574 bp, Cannabis sativa
gtttgttattttgtacagagtagagagattaagaaatgagcagggtctggagtagaagaagaagagtctaattaccaaaatggccttcctgctggatttatctccattgaaggaaattcctaagttgcccccatttaaatatatggttccttgttttttctcgaaagaaaggtattaattgtttctgcatgtagaaaaaaaatttaatttaattttttttaatattcgttttaattatttaggatatcttacatttgaaaaattttaaataattataatatagaaaacaatatttaaacaatctattttacacacgtgcaacattgtgaacacaattttcaacatgttaaatttttttaaattttttaaaattttgtaaaatgtcttaaataactataatttacatgactatgtgaaaaatttgactaaaaaattattttggatactaaaacatatagagatgtatcggtgcatttcttttagggataattacactatacacctacttttacatcttaatgttaaaaataacttaatttaaattaatcactataccgtattaacatttatacta

SEQ ID NO: 148947 - DNA, 551 bp, Cannabis sativa
cagacttgggacagaaaattggggtcgcgacctagaaccgcaccctagtctcgatcccgaacccaaactcgaaccttggacccaagacctaaaccagaaccagaccgagacacgtgacagggatccaaatttgggacttaaaccaggacccaaacaggcccgcgagaataggacccttaaacaagagtacaatcgtgaccaggaccctgacgcaaacttagaaccaaactcagacctagatccagacccaaaccgagactggaactcgggcccaaacatggtcgtgtaccccgactgggatctagacccggaccggacctagacctaggacttgatccccgacatagactcggacctagatagggatccatatacgaacctggagtcgaaccaagacctagacccagactaggatcaaaactcgggacctagatctagaccgagaccttgaccaagacccagacctggacccgcaaccaggacctgtacacagacctggacccaaacctagacccaaaccgggatccagaccatgaccctgacccagaccc

SEQ ID NO: 148948 - DNA, 615 bp, Cannabis sativa
tttaggctcaacagggttcactaaggatattcattttatggtaggcttgaaaggctcaaactatccaaacaactgcctaaatcatgttcctattgaatgccgtcaaggatttttccttgagagaataaggcatgcaagttctaaggtatccaacaagtcttaccacaaaccacagtaaaacaattataacatatttcacggatatcaaattgcatccatacacaggtttcacaagcatccaaactaatccaaagagttaacagaattaagcacacagtttttttacaacttcaggacactttacaatcaacagcaacatacaataatccttagcttattgccaactcttaaaaaaaactaaaacaggaaattaaaacagaaaaattaaaaaatttatgtccctccccccaaactaaagatcacattgtccccaatgtgtaaataaaatgcaaaagaaagagactaacctgagacccttatcagagagggtttggtggcggcggctaggggtgagcatttagcccgatgggccaaccaaaccggccaacccaacccgaaaaatgggtcgagcatgctctcttttagtgggccgaatatgtgttgggttgaaaagct

SEQ ID NO: 148949 - DNA, 739 bp, Cannabis sativa
  modified_base (713)..(713): a, c, t, g, unknown or other
tgggtgatttttggtatggtttttgatggtaggtgtagattgatgagtgaaattgggtttttgaatggattgagtttgagaaattaaagaaaagatgagaagcttgaagattggtgatgaaaattttgaattttgagagaaaaagggttagggtcggctgagaggaatttgaaaaaatttgaattgggtttagggttgaatgagggggaaaataggatatttatagaatttttcgttagctagtcgtgactagcttacaatcgtattttaggcttctctggaaaatagggaagttgcgactggggtcgcgacttggaaaataagtcgcgacttccagttgtgctagtcgcgacttctggaaccaaaaattttgtcgaggctctgttaaaacccaggtcgcgaccagggtcgcgactaccaaaaagggtcgcgatccaggaacctggtggtcgcgagcactgggctcctggcccaaaaaataaactttttttttcacgtttttcacgattcaactgaaaaaaataatgtctggtactaagctaaaaattgaaaatactaaaaacactaaagcatagattaaaaacataatcaaaaagtctgaaaaattaaagaaaacacttgggttgcctcccaagagcgctgtctttatcgtcgtatagctagacgctgagctgtgttcttcatagtggcaccagaatcatggcggacttggnttggtcaaattgacctcccaagtaga

SEQ ID NO: 148950 - DNA, 590 bp, Cannabis sativa
ctgactgaaccactatactcctttgtcttcttgatatttctagtttttactaagcatttacgttcccagttcgagtactcgccgtcttaggttgaatactcgcaatcggtcatcatattgtttctccatattattattattcatttttggtgttgcaaaattcgttcaacaatatttggcgccgtctgtggaaacgaagaagtacattcttgctaatacagaaagaaaatcatcatggctggaaaccaagcaaacagaggttttaacaatgaatccatcaacatcggagtgatgaacgttccgttgtctgggggtagagcaccacctgtggatgtcatcaatggcggagtaggtcgaggtaatgtcagacctcttaacttattccctgaaactactggccctcaagccgggaaacatctacaccagcagccacagcggggcactttccacccttcactccggcgacggtgttcgagggtatcgtccagctaactaccgatcagtataccacaatccaggaccaactgcgcgccctgcaagccgaggtggatggacagaacagggcccgacgtcctcctcgagcacccact

SEQ ID NO: 148951 - DNA, 832 bp, Cannabis sativa
gttccagcggtgttcggtaggtcggtttgaacggttttttcggttctctggattttatgctcagccctacttaccatctttgttttattataataatatcacttactcatcattctcatacacagacacgtgtgtcatccccatcacacatcaatcaactcccactctcttccctctcttttttccttttcttttaatttgattttcgattttcctttactttttttttgtttggaagatcaataacctccattgttaagcataaccacccattattcatcacggttttttccctctcattttttgttcttccaaaaaatttcaactcccactcaacccacgattcctcaagattttttcccactcagtttcttcttgtttcaaatttctttataaaatggccatcactcgttcatccttatctccttccccagttcagaaacaaaaatcgaaaatgggcttgaaatctttggctaacaaatcaaagggtaaacgtccgatcgttgaagaggatgattctgattttgatcctcctttgaccaagcgtgagaggccacatactacgaagaaatcgaagctgaatgtggaggagcaaatggttcaagaaatttctgggaaaaaacctagtgcttctgctgaagttcgaacagaggttggttttcagtttcattttcgtttccccctttttcaacatttagtgttttcctagatttttgcgttttttttgttcattctgctctgtgtaattttagggtttccttttgaaaattttgttttatcttgtttaattttttaggtctttattgttggttttgagcaatttattttgttc

SEQ ID NO: 148952 - DNA, 508 bp, Cannabis sativa
gagagtttgcaatttctaacccttaaactctttactttacaagtttgaatatttgttataatatatcgcttgccatattacttgcatttatttgattaagtgtctaattacttaatttggtgttaaaagttttaatttaccaaaattagtttaaatttccaattcacccccttgtaaacatatcttgggctaacaaaatatgttgacgaacaaatggatgagtttaacaaattgatcattgatctcaaaaacattggtgtcatcaagaccttgttgttgctaagctctctaccaatatcttcaggtatttcaaggacacaatgttgtatgaaagagaatccatctccctcgatgaagtttaatcaaccttgaatgcaaaggaattgtatcaaagaagtttaatcaacattggtgtcattgaaatatcatttataggtggctaagtgttttaaggataaaagacaatgaagggtgtaacggtaaatttatccctatacaatgtaaatca

SEQ ID NO: 148953 - DNA, 718 bp, Cannabis sativa
atcacatattaaaatttcaaatcaaacataaagaaaaaaacttatcttgtcaattgaaatgcttaatcggtcacttctcttctccatcttattccctatttctctctaattcgtagcaatgactctctgaacggaaatgcagagggggcgggcttggccttcgacagcgatttggtggcggcaccgatcaaacagagagatggagaaaggactttatttttacgggcgtcgagcttgactttgtggtcagattcgaccaccattactgagatttggtcgcgcatctgggcagagagataggcgacgcgtaggtcgcgcatctgggcagagagagaggggaggcgctccatatgtgtaggtcgtcataacttagatattattatagcaaaaaaatcaaatttaaatttttatttgcaattaaaagttaaacataaatatttttactataaattactcaccaaaaaaatataataaaagtttagtgaaaatgattgtacttttaaccggaaaagctaactaattatatcctatacacaacttataaaagctaacgaattactttccttactttagacataatgcctctaaattgtaattgctcatagtcatttggaaatttaaatcaaaaatctcttttcccttctaatatatattactaaggtgttcataaaatagccgatccaattcaattcgcacgatccaaagatcggaagagcgg

SEQ ID NO: 148954 - DNA, 926 bp, Cannabis sativa
ataataaagtttttattattatattattaatattatattattatattattattttattatataaaacttatcagtaaaactgataagtatatatatatatatatattatatgttatacatttctaacgaaaacaaaaccctcctccttcgtcaacaaattctctctccttttatatctattttcttcgattttcaatccaaaagttagggatctaagctccggtagtggcaggatagaaaatcctcctggcagaaaagcttaaggtaagatttaattccattttaagtgtaaaacaattagtttcgtataggggttttgcgaattagaatagttatgaagcatctgaccttataggattgttctcgggtagtcatgagactagttctgatattttcttgctaaaattgaggcgattttgagttagaaattgagtttagaactttttataacttaagtccgaacactagtggcgtttgctaattacgggctcgattttagatttgattacgtaagtttggtagtatatatggtatatatgtgccctataaattttggggtggtttagacaggtttcggaagcatttcgatgagtgcgtaaacttgaaaaaaaaaatcctatttttgcccctgataaacctgtcaactggttctggccaaccggcttaccatttcgggcagcctcgagaactcgagaatcgtattttggtcataacttttcactcggtggtctgttttggacgtcctatataccatttcgaagcttacgacgagctctatcatatggtgtatattttgggcgaaataatgggcgtaagtacgggcttcaatgacatatgagaagtcctaggcataggtacgagctcgtctaattagatgatgcgatatattcgtgccagattgtgccacgggctcacctgattaggtg

SEQ ID NO: 148955 - DNA, 808 bp, Cannabis sativa
ttcataaatataaagacttgaaattctattactctgttttttaattcaacctatttctgaattagatttagttatgataattcctagggttgaagaacaagaaggatttgtatacaggagtggatttagtggaagcattgaagtcatattagtgtgggtggtcattgaaatctaactatacattatttttttctttttttcttaatagtttatcaagccattcatttacaattttataaattagtaaatattccgcgtttcgtggcgaatatataaaatattttaaattatatataaaaaaaattgtgtattttaattaataagaattacttaataatattatattaaaatttttatttttattattaaaatatttgtgacataaatacttaaaatattaaatttgttgctaataaataccgaaattctaaaaatagtaacataaattctcatttatggtttaattcttattctggtgtgtgtgttaagttttgggttcgaattttattatgtgtgtttttaatatttgagttttagtattttactggagttctaatgcttgagtttgtgtttatgagatctgtctttatttaattatttatttatttttatagattttgataacttgaaatttgatgttgtttctattaattattgggattgaaagtttgatttttcatacgagaattaaagtttttcttttcatttcattgattgaaaagtattagtagaaagtttatggaatgagaattttgaatatatgaaaatagaattaaaaaatagcatttgaatcgagaatcaaagttta

SEQ ID NO: 148956 - DNA, 792 bp, Cannabis sativa
actaagcgggctttacacatatgagcttgagcaagaagtgtcaagcccatctcgacaatatgcctatgtttcctctcagctctaccattttgagaagaggtgtgaggacaagagtgttgaaactcaatgccattttcaatgacacatttggagaatgcttgaaattcacctccccaatctgtttttaagactttaatcttcctatcaaattgattttctgccaaagttttgaattgaataaaggctgaaagtgcttcatcttttgttttgagtggataaatccaagtgtatctactataatcatccacaaagtgaatgtagaatttatagttgtaactagatgtgataggggcaggcccccaaacatctgtgtgtattaattctagcatatgttaggcacgatttgaattggtattgaagggcaaggcatgggatttaccgaattgacatgcttcacagaaactactcttttcattcatattaacttttacatcagcaaggtttaaaaccttatttaaaacacgattagaagggtgaccaagacgcttgtgccacctatcttttagggaaagaaaactaggactaacacttttgtggctggaaacagtgaccacaccagtaaacggtttgacagagttcaacttagacattagacttggttggttggaaagaccttcttggtaatttgtgagttggtataggccatctttaagtgtcccttgtagtaagacctgttggaagttatttttaccaggaacttagatctactcacaagtatagatcggaagagcg

SEQ ID NO: 148957 - DNA, 502 bp, Cannabis sativa
  modified_base (396)..(428): a, c, t, g, unknown or other
ttaaaataaatctttttttttttttttttttttttttttctgaaagtatataaaatataatatttttgaaaaataaattgggtttttttaaaagagaaaaaaaacgtaaaaattatattgtatacccacttttagttttaattttaatttttatttctatattctttaagatatgtccacttttatagatgatgtctctattatactccttaagttaatgtaaattatgtgttaaacttaagtgaagggtaagtgtatattagacaacccactcacaaagtagatacattttaatgaaatataatataagagtacttttgattaatgaatacaaaaaaaaatattcctaaacttatcaatatgacagttttgtataggtgtcgtttggtaacactnnnnnnnnnnnnnnnnnnnnnnnnnnnnnnnnngtaaaatttttgtttttaaaaaaattattttgaaaaacaaaaatgagttctataaccacttttgtttttcaatt

SEQ ID NO: 148958 - DNA, 529 bp, Cannabis sativa
  modified_base (294)..(295): a, c, t, g, unknown or other
ctatgtcttgtcttcactactccaaatttccttcaattttggaatgacatactgacgcaagttggatagctaaccttggggataatttgtccacaactggttgggtatttaccctaggtggaggggcagtttcttgggggtctaagaaacaaacttgcatttctcattctacaatggaagcgaagtttatagctctaaagcatatagtggagtatacaatgggaagtctagacatggatatgtaagtgagttgattcaaagaggagtcatctcaatatcctatgtgagatcaanngaaaacttggtggatccgtttacgcagccactaaatagagatttagtggaaaagacttctaaagggatgggactaaaactccctaaattggtcacaattgagggtaacctatcttaatactagtaactgtactagtgttacgttcaatagttaagaaaaaatcaatgtgtgaacaaatgtgataagtactatatgtcccatcttacaaagttgtgaagtacttagtgagttacc

SEQ ID NO: 148959 - DNA, 728 bp, Cannabis sativa
agggcacaaaacccaacaatatgcgagtatccccgagatcctcctacgaatcatagagattgattctttgctatgcgagttggtccagttgaccttacagccttgataaaccggtacaaactcgcatgtcttagtttatcagctcgttacaagatgtccatataagagacttcaattggacgcaaacatcctagactcgactagtctcgaatgcatcttaagcctgcgaacttatgcaagaatgtggacagccaactcgcactatagaagtcgcatatgttaatgtatttagtgaattaagctggaaactgttcttcatttattatgtttacattttttagtttaattattgtaattcaatgtacaaacggattgataatgaattcaatctctgtgtaaattaaaggacacttgctttgtatataaaggagtgatccagcgtataatgggaacgagacagaaatccttgcagcagtggactaagcagaccgtgatctgactgaaccactatactctcttgtgttatttatatttccaatttttattaagtattttctgtccttaatttgaatactcgcccttctaggttgagtactcacataaactcccctttatattattatattttgattttggtgcactactacaatattagcctttagaggcagttttttcaaccccatttataaaaagggaagctaaagggtgtgaaaatacccgctatgttc

SEQ ID NO: 148960 - DNA, 801 bp, Cannabis sativa
  modified_base (774)..(776): a, c, t, g, unknown or other
ataataattttaaaatatcactacactcatcactaatttttagatattgaagtttaaactatatgtacaaattatacaagaaaaatatataaattatttcattcaattaattaatttattttttgaaaaaaaacgcatatagttaaagagctttcattatatattgaactccaccaacattttccctaataaaaaaaaattttaattttaaatgttaaagattaaactatatgtatatattgttgtaagaaaaaaagcatagaatcaaaatttgaaaataataattcaatgataccaaaattatttatcataataaatgattttttcttttctcaaaaaaaaaaaaaagtagtttggaaaccacctaataaacatacaaggtatttttttttaaataactaaatatacaaggtattgaatttacacatttacttttaaatgggagatatttttttttttttgtaatttcataattaattaaaggttattttggtaattcaataataaaagccataaacattctcatttttattaacgttatagataataaacaaaaaattaggcacctctttttcacaaggtcccttaactagtgcagggtttacaaccttttgcgagcggtgcaagcactgggagttttgtttgttaggaagacgtgaaactaatggaaaataaaaatacatagtacctaaacatatcatatgtatatatatatatggaacacttcttaatgagtattagtcatgaatggttactaaacaaatttaactatannnattaattttaaaaatatcaaaccat

SEQ ID NO: 148961 - DNA, 763 bp, Cannabis sativa
  modified_base (335)..(336): a, c, t, g, unknown or other
ccgtctggccttgcttcaaagcaacttgttccctctcaacacgctccaatcttgccaatatggcagaagatattggttcttgaggctgtgaagtgctgggaatagatgttgacgagccaacaggaggatcctctgatctaggagatggtgcaggtggtgtagtctctctaaatacccgagcttcatctgcatgctcttccaatgttagtcgcccaacactagttcttccaagtcaacaaatatcggcccctcaccgccggtgatagtcctcacaaactcctcttcactttgccagggacataacatagagtacactgtcaactgaaaataaaaannaatgtcttattagatagaatttaaaataaagtatatatgactgcaaagcgtaaaaaaaacttacatttttcgaaaataatcatataacttcatctttcccgagtgcggtcttctccttactctcccaattaaccattcttggaaagcgatgcgatttcctcactgcatattcattgcccaactccaagatggcctcataggcccaatactgcaacgctgcagtatagtcgtatgatgagtattttgcctccttctgagaaactcccttctcaatcttcttgtgcattcgagtcttcacctctaaaaaatctttgtagcaagtttccatcaacttgttgaaggagatcttttcccacggatactcatagaagaaatccaggttatcaaccatccttatcacaactggaggaacatcagtcttctcctc

SEQ ID NO: 148962 - DNA, 1065 bp, Cannabis sativa
actcagaccaggactcgaactacgacccgaactcaaacccaaactcaaactcagtatcgcaaatggaactagaaccgaactaggactacgacaaggaaaaggaccgaaacccaaaatcgaatccagatcaaaacctagacagacacctaaacaagaactgagactaggacttgaacctgaacttagagcgggacccacacccatacaataaccgggacttggacccagaattagtatagggacctttgaaacagaactaggacttggacctagtacccgaccaagaccttaacatgaacttaggaccagctcgtgactcggcacaagaaatcaaaccagactgggacccgagattgggatccagatctggacgcagggcttggacaaaactcgtagtcggtttctgggtttgggactagccctggactcgtaccctgacaaggacccgaacccacacccggaccttaacccagtcccaaacccaagaatggacccgaacccgtaccctatgacccaaaattggaacaaaaactggaagttgaacgacactggaactaggacttggacttggaatcataattgaaattggacctagatttagaactgtaaccggactaggacccagactccaaatcagacctggacccgaattgggtcccggactcgaatcccaacccaatcctggactcgggacacgaacaagggtcgggacctaaaacctcaccccagtgtcgatcctgaaccaaaacttagaaatgggacttgggacctgaactagaacaagaccgagactcgtgacagtgatccaaatcttgactcgggattcgggtaacagggcttggaacagacaagtagtcggtgtctagatttgggactcagactaggactagaaccagagtatgaaccaaacccaaacacaaacctagacctaggacgaaaaattagaagatgaacaagaattgccaaactaggccctagaacaagactaggaccgtgaccaggacccggacccagagcaagaaccgaacacagacctagcctcaacccctgttgggttttatgccc

SEQ ID NO: 148963 - DNA, 927 bp, Cannabis sativa
gagccaatttataaactccaactccaactactacttcaatgacatatggaccctcccaattctggttgatcactcctgcagatgcatctctcgaatttgcaaatacttgtcttaacaccaagtctccgacattgaatagtcttttcttgacttttttgttgaagtatcttgtaactcggtgttggtatgctgcgtttgtgattcgcgactcagtttgtttttcctcaagtagatcctaggataatttcgaaagttcttggttttcttcttgattataaaactctcttttgtgagtcgatatgttcacttcaacaggcagcattattttcgagccaaatgccaacgagaaaggagtgtgtcccgtagctatcttctcggtagttctgtgggcccagagtacctgaggtagcttgtcaacccatttgcctttggcagcgtctaacttctgataatatcctttaaggttttattaacagcttctacttgtccaattgcccgaggcctggatactgacaagaagcttttgataattttgttcctctcgcagaatttagtgaacaagtcgccatcaaattgggttccattatcgaatactaccttcatgggaattccaaacctacagataatgtttctgacgacaaagtcaagaactatcttgcaggttatagaaatgaggggctcgacctccttccatttagtgaagaagtccatcgctactaccgcatacttagctcctccttgcccagtgggtaatgccccaattaggtcaattctccatatagcaaatgggtagggcgaggtcatcattctaagttctgttggtggtacgcgaggtatattgtaatacccctgaattaagaaatggattagcaaaaccctaattagataattatgaataattgaggaattatattactatatagttca

SEQ ID NO: 148964 - DNA, 714 bp, Cannabis sativa
aacatacttgtgagcagatctaagatcctggtaaaataatttctaacatgttccagggagattttgggctgaaggtatgaagacagtcgctcatgaaatgaataggcttccccaggctaagttagggttcatttcagtcttcgaaaaactatggggttgtaaacctacagtaagtaactttcgagtatttggctgtgtgtgctacgtattcatgcaaatccacctacatagcaaatttgataagaaggcgatatgatgtatctttgtgggatatgatagccaacggaaagggtggagatgttacgaccctacaattggaaagttttgtacatcaaggaatgtggtcttcaatgaggcaccatcatggtggtcatcgcaaaaggaagcattaccagattttaaaaaaaatggaagacaaattgcagaaaaaaaaaatgggagagcaaattgttgagttacctccaactcaagatatagatgaagaagaaaacaccgaggacgaggcaccttagaatccatggcaaataagagtgcatcaaagagaaggacatgatgatagccaaccagaacttgagagatcaaaaagagcgcaaaagccaaatccaaaatatgttaatgctgctatagctgaagaagaaaagttaagagaaccagagtcatatgaagaggcataccaaaactccaagtggctaggagttatgaaagaagaaataa

SEQ ID NO: 148965 - DNA, 519 bp, Cannabis sativa
  modified_base (42)..(49): a, c, t, g, unknown or other
  modified_base (367)..(370): a, c, t, g, unknown or other
tttaattattatataatttttttataatttttattaactaannnnnnnntttttttttaaaaaaaaaagtaacatttacttacttaatttttaaatttaaaattattttgtatatcaacccaatttttttagggctaagatgtaaaatggccttaattttgaaagttaagtgagtatatgtttccttcttaaaaaaattaaaaaaatagccaaatataataaattagctaaaaaacttataaaaatgtatttattacatattattttttttaagaaaaatataataattaaatgaagttatataattttttttagtatttcatattattatattgtaacaaaaatgaataaatatattagatcattnnnnatatacaacagtatttgatatatcgtaacacttaaaattattataccataataataaaattatataccacaaagaaattataaaaatactaaattaatactcaaacaataaatatatcatgctagcaaaattatatataccactattaa

SEQ ID NO: 148966 - DNA, 998 bp, Cannabis sativa
  modified_base (932)..(957): a, c, t, g, unknown or other
aaaaaataagctagggaagaaaaattcttaggcctttcagcatcatttgttaaagtcttcgtgaatcatcgccatcaatcgttctatccactatcgttgtaatgataataattcagtttttggattgtatgcctgtttttctctaaactgtaaaaaaaaaaaaaaattatattagtctatatatatattaatatttgttattacaataaatactataatgaataattaaaatttacagatttttgatcttgtatataacggttggagtttgcacgtacaacgatgtcagtcatgtatttcaaaatataaaaaccacattcttagtttttaggttgtcttggacaatttgctagtgaaaatcccggcaacaacccaagatacacatttgatgttcccataagctggtatgctctgtttgaaaaattatatcaatattttaattcattagttaattaaataatttgttacataaatagtaattatattattacatttccaatattttagtaatttgttggggaactttgtcgctagggtctaaatggataatttttcctagcacacgacctctagcatctaatgcgcacgagaaaattatatggggatgtaagtaaaatagtataaaaataatttcaagttataatatagaaataaacaattagcactaaaaaattaaatagtgtttacccgatattccagggaataaagaacatttgatggttgttattcatcgatgataaccaaacatccaatcgttttgctgtattctcaaaagactgacacttctcttcatcatgatggaaacatttcgtaaatcggatacattcaaagtcacacataaaccaacatgaacacatcaaaatcaacaatattcatcgttttaaattcatattactaaaagtaaattattacaatggctctgaggccagttnnnnnnnnnnnnnnnnnnnnnnnnnnatttactaacaagtatattgaattaacatcctaaatatgaa

SEQ ID NO: 148967 - DNA, 817 bp, Cannabis sativa
aatggaggaaatggaagctcgggtgtaggtgagattttgggttcggtttcaggtgaaatggaggttgggtcgactggtgcttggctgcgggcagtgcgatggtgcggtttgaagattgggttggctttgtgttcagctgctgggtccgacgtggttgaacgaaggtggatgaatggctggtggagagaggagtgatggttgaaccttgaaatgatgaaggttcgagcttggaggtggagtcgatggttgggcaggctggtgaaggggacggctgaaggtggaagatgatgatgagtgtgaatggggtagggttgggagctattgggctgatattgaaaagatgggctagtcaataacatcagggggcccagttgactcaaaccaaaagagaaaacccaataattaatctttatatgctttatttggcatttttgaatggaagggtcaactgaagtacataaatccaaatcattgggctgagtaaaaagagttgtgcccaatgattgcatcattaacataattgtcacatgttcctcttgattcagaccatgtacttttttttcttctgtttgtttgttttttttctttttcaaaaccccaatcctttgatcagcccaaacctaaaactccccttgctaagcctttgctatagcaactgaacagcatcctgccaccccaaacttaatgcttttgcccaattcaaaacttcttcactgccacagccttttgcacttgattctctgcacaaagaaaagaacacaatctcaatttcaccatgacaattatttagagctaattataatatatatatataatt

SEQ ID NO: 148968 - DNA, 612 bp, Cannabis sativa
atggctagttctgctgcaataatctctgcttcctctactttaaaatcttcaaaatcctttgtcttgttagtgacagatatgagcaaatgatctatagctgccaaattatctttatcacgacgaaggacatccatgataagagattcatcaagactaagggcattctcaacaacttgagcagaagcgagagacttttcttgagttttgagcaaatcattaacatagtcagtgaactatgcaacctctgctatgccacatttataatgatcgcaaagggtactcaacacgtcaagttgcacatccacatccgcacgatgttttgagatgtttgttgttgtcaaaggagaagataacaaacgaagaatgtctttcatgcattcaatcacaaacctcttgatgtgttcattcgaattggagttggtgattgttgaagctgacattgccaacattggatcttgtaaaggaacaggtagatcagaggaaacaacaactaatgatgaaataaagggttttggtgaatcaattgcctcttcaggtaatgcctcactgtcaaatctattatcggcagaatcatcagacccatcaaagtcaacaagttcttcatccctagag

SEQ ID NO: 148969 - DNA, 601 bp, Cannabis sativa
tactcattaaaaataaaatcaataaaaagctacatttctccactaagtcatctcttccatttcattgtccaatctgtcatttggcaaagcaaaaaaaaaaaaattaccatttccatctaataaaacgttttctaatattgttttttatcttattcacatagacatatatggaccatatcccataccttcaattgaaggatacaggtacttcctaactgtcatagtgaggtttttctcacttagaaactcgagaccagactcttattcagaggacacgtgtactcagatttttctatgaaagctaagacgtctgtaagagacccctcgaagtttcaacctcgcccaagataaagtcagcgagatattgcgagtatgacccaagtctgatcgcataaccataactcgtatgttgcagggtaggagaatggatctaagtcgcagatatcaggatatgtgtgagtatcctctccatgttcttccgtaagcgtaaagatcgattctttacaatgcgagttggtcccgatgacccaacacccttgataagccaatatagactcgcatgtctaggttctgtcagctcgtcatgcgatgtccacaaagg

SEQ ID NO: 148970 - DNA, 652 bp, Cannabis sativa
  modified_base (519)..(532): a, c, t, g, unknown or other
  modified_base (592)..(611): a, c, t, g, unknown or other
gtcgaccagtcagctttttgtaggtgcctggccgactaggattttgatgcacagccttacacgtcgactacaagctagactgtgaattgggccttaacaacccaagaaagtaaatgaaaagagctatgtttaaagggcattttaatcttttgtatttaattaatttaatatgtaaatgtctacttattttatttataaattagtgtttaagctctcctatataaagagccttaagtactcaagcttaaaaaccctaagtctaagcctcattctatgtctaataattcactccactgtctctctcacgcccactatagcatctctcaacacttgagatttgccatctttgagtcctacttgtaaccttaagagaggtatattagatcccacctatagtgatctgaatattgttatctctcaatatcaataaaactaaaagagagtaggttattactcgctaactaagggggacgaacatcgataaaatccttgtgttcatttttggcaccattccaaatnnnnnnnnnnnnnngtgttatttcctgattaaccaaagtagtttccaaagatatagaatccagtatcccaaaannnnnnnnnnnnnnnnnnnnaatttcacattatcaatgattttgagattaaggaagagtaa

SEQ ID NO: 148971 - DNA, 1078 bp, Cannabis sativa
  modified_base (26)..(53): a, c, t, g, unknown or other
tggcgcaaggaggaattaataagttnnnnnnnnnnnnnnnnnnnnnnnnnnnntacttattggaagcttgattatacaggcccatggtcccaactagtataatactggttgtagactcagttaattggttttaattaatcaattatgttatcccaagatatagcaaaacggtcaagcagcaaccgaatggagtgaaatgagccctcaaggagttgtaccaacatccttggtcggccaagagaagcctataggccgaccagggtgagcctataggtcgaccaggatctatgcacaagctggccagccaagaagtaactttcgaaccaagggagctttcgctcgaccaagggaatctaacctttagaaggaaacgatatacaaagttatcctcaacttgtaaaaggttggcgtccacatccaaaggctggcctcttcttggtaaagctatagtgacctgccatatccttacagggacatgaccttctagatcctggcaagaagatgacctgccagatcctggcaagaacatgacctgttagatccttgccagaccttggcaggagcatggctgactaggattgacctggcaggagcatggctggccaggattgacctggcaagaccatggccggctaggattgacctgataggaatttctggacaactctacacgtggactgctaattgggttgcgaattgggccctaaaagcccaataaaacaactagataatatctactttcaagggcactttagtcttttgtaattatctaacaacctatacaaatatccaaggatttaaactgtaatctagggtttaggcctcctatatagaggccttaaccctagcctagaaacctaagttacttagcctccaaattactttatgtctgaaagccctattctctcttctatcttctctctctctctctctcttgctcacgcccaatagggctctctcttctctcttttttcacacacctctaaggcaatctcactctctcattaaagatctgcctactgattcatgtttgtatccatatagagagctatattagatcccacctatagtgatctaa

SEQ ID NO: 148972 - DNA, 825 bp, Cannabis sativa
  modified_base (170)..(177): a, c, t, g, unknown or other
  modified_base (218)..(218): a, c, t, g, unknown or other
ttaatgaaaaatttacttgatttaagttgatctaaaattaattaaaatcaattttcaactttaatctatttttcaaaaaaaaaattaaaaaatatcgacattaaacaatgcatttcaaaatttagtgggaaatgattaataaaataaaagaaaatatattttgaaaattnnnnnnnnttaagttgttctaaaattaaaatttccaacttaaatataantttctatctaattaaatatctttgaaaataactaatatttaattgtctagaatataatcaacttaaatatttaattttctatttaattaaatatatattaaatataagaaacaaataattaagtatctagaatagaattaacttaattattaattctaatttaatacaagaaaaaaatattctaatttaagttgatataaagttaattaaaataattaatttccaacttaaatatatttttctaattagttaaatattagaaaatataattagttactagaaataactatctagaatatatctcattaaactagtatttttctaaaataatttttaaaataatctaataaaatctaacttttagtgtttacaatatgaaacaataaataagttcataaaataataataactttgattctcgcctaaagggacatcgttggattcttattttaatcgaaattattctttatttttcctcttagctttttcatttagaatttgcttagaaagtatatcattggatagatagtttattaatcatatgcttatgatgtcattctattttctattatgaaattaatggcgcagatgactatattcctgacat

SEQ ID NO: 148973 - DNA, 536 bp, Cannabis sativa
aggaagggagttatcaattgatctaatagaattaaaattggaggactttgatgttattttgggtatggattggcttgcaaaatacaacgccactattgattgcaagtgaaaaattgtaacttttcagccttagggcgaggacccctttgtctttgttggaaagatgcatggatctcggattcccttaatttcagcacttaaggcaagagatttgttgtgtgaggggtgcattggtttcttagcaaatgttgtggatattaccagggaaccactagcgggaccggagcatatcccagtggttcgagaatttttggatgtgtttcaagaggagttaacggggttgggttaccaccaaccaccaaaacccaaaacgtaaaacgtaaaattgattttgagattgatctaataccaggagcagagtctgtatcaatagctcgctataagatggcgcctgcagagttgaaagaattaaaagtgcaattacaggggatgatggatttaaaattcactagacctagtacttcaccttggggtgc

SEQ ID NO: 148974 - DNA, 637 bp, Cannabis sativa
  modified_base (478)..(479): a, c, t, g, unknown or other
gtacggggatacaactcattccaagtccttttgcaacccatataggcgcacttgagggaaccccttgttgggctttgtaccctaaataaaactctattttttgtaatcttttctattcatttatcaataaaaaaagatatttatttttattacttatttaatgtgttaattggttcatgtgatcatttagttagttatttgaattagaaattcatccaaatctttatcacattgatattcttatttattgtgttgtcaacacagtgaaaagtaatcaagcttgtgtgattaaatgtattgttatgatttatcaatacacaaagtttaactgataggataatctacaatgttgtttacttgccccttggataagggctatgccctttccagggcatgttggaaatattttactaggatctagattaacaagtatgttgaattaacattctaagtatgaatatctctaaaacaatgaaannaaacacataagagtttaagaaaatcttacataggtcgatcgtagtggaatataacaactcattccgctcagatctctaacccttattttttttgtcgcagagtattatcaagatttgaccctggatctctttcgctccttcgggtttggttaccaccg

SEQ ID NO: 148975 - DNA, 563 bp, Cannabis sativa
  modified_base (70)..(73): a, c, t, g, unknown or other
cattgtaatcacctaaaatcacatcaaatcaacttaaccattcggcattgaaaaaattcagatttcaaannnncatttcatgcttcttgcatgttacacaataaagtacattataatgatgtgaaactcttttcgactaaatgatttccaatacttaaaaattataagaccacacttgcacaaccaaaacaatgaacaaaacaaaacttaaccaataactgccatacacaataacacaacacttgaaacacaccaatcctgttaccttgtacctgttcatttcaattgcacaaatgcacttcaagtagctaaaggttttaataaaacaattaacaaaacaacacttaactactaactcccataagcaaaaagtggtgcaaacgagttggtacaatccgtgagaaccaagaacataaaacacacacatgaatagacaaaattaccccaaagcttaaccaatctgggtaccttgtacctcttaattcataatgaacagagtacaaaaccagttggaaaacatttaatatcagaattaacaaaacaatgcttcactactaactgtc

SEQ ID NO: 148976 - DNA, 686 bp, Cannabis sativa
tatatttaaataaaaaaaattaaaaaataatccattacccttaatgacattccttacaaaatttgtgggggatgttctcccttcttttctcccttatttaaccaagttttctctttcttaattttaataatgtaagtaaacaaatgtaagggaatgattaccataccattgattcccattacttattagtaaacatgccataagtgttataattttttctctacaaattttgactattagttaagctatatctaataatttagtgttagcttaagattatcagtttcctaatctaattgggagtctattaaatgtaaaacttcaaagaaaaagatcaaaatatcttttctcttttccttatggcttagtaattttaaaatttctatgagaataggaataagaattcttaatttagaaggtaaaagcaattcttaatgctattaagattcaaataaatctagagtttaaaaaaataataagcaaaagatcaaagatcttatcttttcttctattttttttagggtgcgtttggaaagccacaatgtaattggatttatctggacttggaggtaattaaaaaatgtggcatgtttgtctaaccatgtaattacactgtaactgtgtaattggaagtagttgaggagttccaatttatactctcaaattctcatgccccccgtgagaat

SEQ ID NO: 148977 - DNA, 665 bp, Cannabis sativa
aatatactatttaatcaaactaatgtagtataaaaaaataaatatactattttataaaacttatataccataaataatttttttatttatctagaattatattttgtctctaattttatcaatacaaagttgtatatttttcaataaaaagaataaattaatcaccatgaaaaaaataattatgtaatataattttataattgttgtatacctatttagctagagcttattgcttaaagtaaaagatactatataaatttaaaattatggtatattttttttttttgtattatggtgtatattaatgttggatatagttcaggtagaacgaaaaatataatatattttactcaatgaaaaagaaatatagagttgttggaaaaataaaactgaagaaaaattaataaagaataatgagagataaaaaaaataatagcacgcaaaagtaaggacacttaagtaattttaatgcctaaagatgtgatatttggctatttacttaatattttcaaaaggaaattttatttacaccccaaaattttctaaaggcacccatttgaataattttaatttaatataaaatttatatctttagttatactaaattttttcaacttttttcttccaattcataaacttagaaaatatacctatcaaataaaatt

SEQ ID NO: 148978 - DNA, 507 bp, Cannabis sativa
ttttgctctacacacttccatccaaaattttcagttaagtgtcatattggactatccatgtgtacacaaatgtacacatgacaaatttttagtggtccacgtaatattacttattaaaatattataaaattaaataaattataaaaaagtattttatttttttttcttttcttttctttttcttattcattttttttttatctttttctgttgaaattcattcatcctccacataccacacccatcgaaaccctaaccctcatctttgtgcagcatcctttcccatgaggagctatcgtcggaaatccattattccccaacctcaagaaacccaaacccccaatgacactccctctcgtgtccccgatcccctatttcttttgacatttctctctttctcatcgatagaaagggtggacaaaggtcaatgcaggtcgacataggttggagctttagtcgggcttcgatcgacgatggtgagggcttcgcttggtgctctccatctat

SEQ ID NO: 148979 - DNA, 612 bp, Cannabis sativa
gctctagagtctcaatggccagaaacaactcatcgtttatgcatttacaatatctatcagaataatgcaaaaaaatcttagtggggtttttgaaaaattttgcaagaatgaaaattaattctcatcaaaatagcagatattgtgtggttgattttgttatggaacatacacatgttacatcaagtcctagcaaaagtaatttacatagatctcaaagaagattgactctagcacaagcaactgaaattgatttggctgacatctcaggaattaaacctaaggcaagttatgatttaatgcctaggcgagttggtgggcgcgagaaccttggatatactattgttgattgtcgaaattatttgcagagcaaacgaataattcaaatgagattgggagataccagtggtattctagaatatcttcagaagatgcaattagaagaccccgcttttgttagtgcctacaagctgatgaagatgacatgataaccaatatcttttgggcagatggaagaattatggcggactatttctattttggtgatgttgtttcctttgacacaacttacaagaaaaataaagagtgtcaaccgtttgcaatatttgttggtgt

SEQ ID NO: 148980 - DNA, 542 bp, Cannabis sativa
gagtctggttcctggtctggttacaattctaggtctaggtctggttacgattccaggtccatgtcctagtttcggtcccattcaggtcccggtctactaccagtttcggttctaattttgggtcataaggtacgagttcgggtctaggtttgggtctgggactgggttcaggtctgggtctgggttcgtgtcctggttttggtttaggtccagggttggtcaccaaatgcagacagcggctatgggttcggtccaagcactgggtccagatctgaatcacgatcttgggtcccaatttggttccatttcgggtgccgagtcacgagctgggtcctaggttcaagtcaaagttgggggtcgggtactaggtcttggtccttgttccggttcctaggtccctatcccaaatctgtatcacagtcccagttctggtttgggtttttgtcctactctaggttcgggtttgagtcctgttcttggttcaagtttgggtctcggtctggatttttatctgggttcgggtttgggtttaggtcctggtc

SEQ ID NO: 148981 - DNA, 1352 bp, Cannabis sativa
agcaaagactaatataaataacaataaaataattataataataattacactttatacagtatgccactgcatatatactatgctactacactttgtatcacattattccatattaatgatgccagtataatgaatgtctatattgcatagacccacgtgttacgctcacacgtctattaatgtctacatagcatagacccacatgttacgctcacacatctattctatatttaaggtcttactagagtttgtctcggttatagttaccgagtttaatttgattataccttacccatataaccctactcatagatacataatcaatacaatatggtcttacaatggtttatcctgatgatgcttattaggtctaaatcagttatgtcttatacacataactcttgacatatatgcatacattgaacaccttcaaaatatactcctatatatatgaagttttagggtaataagcctaacttgcataaccaatcatttactcatacaacacttcatagcatgcttaaaataacacatatttagggtaataactctaattcactgtacatatatatctttagggtggaaaccctaatttacaacaacataactactaaggacaatatccctaattcacaatataaacgcttaaggtaatgaccctaattcacgacacatattattttagagtaataaccctaattcatgctttcatttgattaaccatattatatattgttgcacattattgctttcatattctcatatatcctagggtaataaccctagaccacattattactaaacatagagaaacaaccctaatctcgatttctcacttaaacacagtatactatccaacatgagcgccacagtgcttgactctacatgctaactactgtcttacctagtaatccaagtattttgagattccaaatccgtaggtgttcctaagcaagcgtaggtaatcctagtattacaaatagggttaattcctgcattcactttcacatatacacataatttgaactccatttacatattaatatatatagcccgagtcaaaaatataaagaacgtccaaaacggagccccgagtcaaaagttatggccaaaataaaatcgagaaaatgggatggctctctgctaggttttggccgcggcgaccaaaaatccggccgcgggcactgagttcaaaaaaccccaaaaaccaatttttaagatctaaaaatgccaaatttttcatgtcttcgaaccttaaggaaaacatacccaaaactcaaacgaaatcatacataaactcaaattttatatctcacaaaccttacacaacaattctaagccaaaacaaagct

SEQ ID NO: 148982 - DNA, 1195 bp, Cannabis sativa
  modified_base (627)..(632): a, c, t, g, unknown or other
ttgataactaatttgattgtaaagggttttatttacggcacaaaacccaacaggtgcttccttttgatagtgcatagatccttgataattttggcataagccggtacttacttgattacatgaagtaattgcaagttaaccttaacttgtgtcaaaaagtcaaggatctcactatgactttccagtaccttcccagtggatttcaaagcctgaggaaagggcacctttactggaaggttttgtggcacatcagcatctgggcgggcattggtacagtagtgatttttggtaatggtgataccgtactttgaccacttcgagtagtaatgacattagaggttgagcgggaagcttaccacgcccttgaatgactgaagaatcatttaactttgttaattgaatctttatgtctttcaattcctccatcacatgagtgaaataagtcctgaactctagttgagagtctacgagacttttcatggaattctcaagagacttattttgttgatcaggcctccattggctcccagatgcttgattttaacttgtatcctcccaactgaaactgggatggttacaccaaccaggattgtatgtgttggagtaggcattataaggcttcttgtnnnnnnctaaggcattacattgttcctcatctgctcccctcaacatactaagagtagggcactcttgtggttgatggtcaatccctccacaaatgaagcatggttcctgcttttctactgttgcagccatctggagtgttgtaccttcttgagttttgaatgcctcaaattgttttttcaaagcttcaagttgagctttcacactgtcctccaccttcaattggtagactccggctcttcgtggcttgtccgtaggacttggcgcactccatgtgtaggatttcaaaacttgctccaaagctaaccaattgttcccaaactttacagatcagtataagaaccataacacaacatattccaagcttcaaaacacaacaattcaatctctaactcaaaatcacatgttcaagtgaagaaaacttaatttttagcttcgtgcaatggaattcaaatcaaccagccatggaaaccccccaaataaattttcagcatactcaaaaatctaaactaaacataaccctaacttactttaactcctacagctactgaaacacaaaaccttactccaa

SEQ ID NO: 148983 - DNA, 861 bp, Cannabis sativa
caaggaaatccttgaatactctattcatgaaatccataaaggccgctagagaatttgtcaatccgaatgacattaccaagaactcatagtgcccaaatgttgtttgaaatacagtctttggtatatcttcttcccaaattctgaactgatgataaccggatcgcaggttaattcaggtaaacacagtctttccctgaagttgatcgaacaaatcatcaattctgggcaacgggtacttgttcttaattgtcaacttgtttaattctcaataatcaatatacattctaagggaaccatctttctttttcacagacagaaccggagctccttagggcgatacacttggtcggataaaccctagatcaagcatcccctgaagttgtacttttagctccttgagttctgctggagccattctatactccaggttccaagtcaatcacaaaatctatttctcgttgtggtggtaatcccagcaactcctcaagaaatacgtcgagaaattctttaacaaccctaactactttagacccaaatgtttcaggtctgctggagtcaatcaaaaccgctaaaaatcctatacatctactgtgtagtaaatctctagcccttaaaactgaaataatcgggatccaagacccctgaaaagatcaaccatagacaaatggatcttcaccctctggctaaaaagttaccatttttcgcttacaatcaatgctggctgaatacttgggcaggaaatctattccaagtacaatatcaaattctgctaattccagctctactaggtcagcactcaactccctatcctcgatccgaactggcatagacctaatttgcctattggagataaccaactcc

SEQ ID NO: 148984 - DNA, 704 bp, Cannabis sativa
atttgtaagaactaaataaaaaaaaaatcagatatatttatatatatgtatttttagagagaaaaaaagtaattaagtaaatatgttttaagatatatatctgtatagatacatatatttgtaagtctaaaaaaacataaggtaattattttaagattctattttttctttcttttccatgttctttttattcattctcttttatgtgaagtgagatatactgacaaaaaatattatttaccacaataaaatataaataatgatagagtatattctaaatgaaattaaattatagaataggtagctaatttctttatggtaattgataataatatctaataataattaaaagaaacaataagaaaaattaaagtgatagaataggaattaaaagttattcaatcgtcattaaaaaataattgcaaaattacaaatgtgatcataatttatatgttacttatttaataaaaatttaactgaaatatgaaattttatattaaaaatgtacatgtaaaattaaattttatttttcaattattataacaactgcgtgaggcgcacttatattacgtagttccataagagagactcatttctaatatgttagaaatttgattgaatgtgattgcatcgtaaatacgtaagtttatcttctaattgcagattaatacctaagtaatttttttggcggtaaaaatacgttc

SEQ ID NO: 148985 - DNA, 825 bp, Cannabis sativa
  modified_base (410)..(410): a, c, t, g, unknown or other
ttatttcttttccattccatttcattacctctaaccaaatgccacctaagggtctctgtttagggcttagggttcagggttcagggtgttgggtgttggggttagggtttgaggtttgaagtttgcgttttggcgtttaggatttagggtttagggttttacagtttgacggtttacgggtttaggggttttgggtttagggttcaaggttcaggggaatgagaataggaatgaaaataatataaaatttaaaatgcataaaaaattgataaaaatcattaaagttttttgttatagtgagatttttctcacatagaaactcgagaccagactcctggttggaggacacgtgtactcaatttccccaaggaaagatgagatgtcgatgagagactcctcgagtttaaacntcgcctgagctaaactcagtgagacgatgtgaacatgaccaaatctaatcgcattcgcgaggctcgcattatgtaggaccaaggaacggacttaactcgcatataccatgatatatgcgagtatcctctcaatcctcctgcgaaatcatagagatcgattctctataaagtgatttggtcccaatgacctaacagcctcgataaaccaatatagactcgcatgtctaggttctatcagctcgttacacgatgttcgaaagtgcgactgtacgagaacgcagacatcttagactcaactaagtgttaggagtattctaatcccacgagcttacacaagaatatgaacagccaactcgcacattagaagtcgcatacgttgatgtatttagtaaaatagaaactgttcttcatttat

SEQ ID NO: 148986 - DNA, 787 bp, Cannabis sativa
  modified_base (27)..(34): a, c, t, g, unknown or other
  modified_base (436)..(438): a, c, t, g, unknown or other
tctggattacattgaaatagagttttnnnnnnnncataaaacccaacactaagatcctggtaaaataatttccaacattctgaactacttatcaggacttaattacttcagaataatctcgtgaagtccaagcacgaagacaatccccacaattgtgggattgagtcagaggaatatggcaacctgttccgatttcttattttgtgtatcataattatgtaatgaatattcttccctattttatacatggtaagcaaaagggaaaccttccctcttgcattaaggccctataaatattgacttagcttcactgtgaaagggatcgaaagaattgcttcagacagagatctaagagaattactcagaaatttcattgtaagaactttgagagagaaaaagactttgttatttatctcaagttaatacaatctaaggnnngtaggctattaccacactaacggggccgaacctctttaaaatctggtgttctttattacttacttttttttttgctttattttaattatatttctaatcgcttaataattgactaactgtcgttggctaaaagcgaggtcaatattttggtgctctcattgagagaaaaattttgttgtttgtcttaagtcttaacaggcatatagaatggtagacccaagtcatagcagtcaacctgggaggggtcccaagccctacgcctagtttgactctaggatctctggcatagaaatttggacttcaataacttgaatccaacccactatctttcagtattctataccatgaa

SEQ ID NO: 148987 - DNA, 654 bp, Cannabis sativa
aagcttctccagctgttcattctcaggggattgtgtctagctcctctgctgatgggtctgaccagcataaggcctctcctggtctctctccatctcatgttgcagtagttccatctgctaaacaaagtcagccacaaatgtctgcaactcttccagtacctttatctactgatgttcaaggtgctcaagttatttctccatcagctggtcttgacaaagagattgattcctggtttcagcaaggagaggatattggggctggtattcagggggagacttcacacactgctgtagtccagggggagccttcaaatgtggcagctgttcagggggagatttccactgtggctccgtcctctgctcctgatggtggtgactcaaggattcttggtgctcctctggtctcttattccaacagtgattgattatgatcatcgagggggagttattttaccttttgatataaactttgtacacaatttttttttgggtttgtgttaatattttggatagtgcctgtgtttttttttgtttttggtttgtctaaacttttggttggtttaatatggattttcgttgatcataatttgccaggggggagattgtaagtgtcatgttttgtgtggcaaattagatattgcttttgttcagtat

SEQ ID NO: 148988 - DNA, 626 bp, Cannabis sativa
  modified_base (585)..(592): a, c, t, g, unknown or other
acaatgctcaaatctaatccaaacaacctcaaaccttccagacctattctatatgacccaaataacatttctaaagcaataaaatcacccagaatgcacggatacaaaaagtgccattaaaccccaagctttgagttccaaaactcaaacttggttaattccaactaacatgcatccaaatcagatcaaacctacttaatcatgcatataaaagcttctgaaaactactacaaacatcaacaaaatcacagcaacagattttaattatttctctttgaaaaccatagttttgagctaaaaacttccaagcttgaaatcaaagcaattaatatgcattatactagctctaatctacctaaaatagcaagattaattctttgaaacatcacaataaatcacagcaacaagaaccacaaaaacaagcatgcaacaacacttctttttcatcaattttcaagaaaactaaaagaagagctagagagaacataccacaacaagagttcacaaaatttgactagagagagcttgaaaaatcgagggaaacttagccctagaatccccatgcagccgagagagagagagagnnnnnnnnaaagagagagccttttttgaaaattttctatttt

SEQ ID NO: 148989 - DNA, 1190 bp, Cannabis sativa
  modified_base (358)..(358): a, c, t, g, unknown or other
ggttcgtgagccacgaggtctaccccgtggtcttctctccaagttcaggttgattttgagcatccgtcccttgtgccgccctggctgaggctgcctcacgttctaactcagcgtttcgacgttgggcttcttccaaacggcgtctcagattccgtttcataagttctttctccaacagatttgggcacctccacaattgtgtacttcatccctcgatccgaggttttgaccattcccacgccgagttctcctcaagcgtgttgtccgtgtactaggaccaacgttgggtcgagttctccgggaacgcgtggtccgtgcattggggccaccctcaggttgagccctcctggaacgggtngtccttctggactgcgggttggtagatcttttgaagcccataggctctttcccagaacgatgattggttttctcatgtggggtgttaacattttatgaattttaagccatgaaggagatgatttttcttcgaaagaagggaaggtttatctgagcttttttacagagactctcaatgaaagcaccaaactgttaacgcagatttttgttaactaaatttaagcctcacagtgatgatttcacacagaacaaataaaagctatagaaaagtaaagaatatgaacacagagttttttttacgtggttttgtagttaaaattctacatagtccacgagtcaatcttattcagatttctgagtatgtttcagggcttctttcatatgagtttttttcgtcccttttttgatcttctttgtcactatttataattacatagtggacattgaattacaaagttgaccaaaataattttacagcaatcatccctaaaattttgggatttgattacatatcacgtagtgtaaatgcgattcataatttgaaaatcgtatagctgtgattttcccgcttttattgggtcaaaactatcgtgtattaaacacgtctttaactgttgaatctggagatgtctcgatagaaactttgattatagtgatcccaatagcgagctggggccattcttccttccgaggtcgacaatttatgtcttgtgtcgatcgtggttatttgcagagaagtcttctaactcgctagggttgtaaaccttgctcctgttagctggatgaagctatatgaagtcttcccatagcgagatggtcacctcacttacttg

SEQ ID NO: 148990 - DNA, 1602 bp, Cannabis sativa
gcaaagtacgcagtagtggcagtcaacttcttcacaaagtggatagaggttgaacctctagtttccataactggcaacaaagttcttgattttgtcgttaagaacataatttggagatttggaataccaattaaaatagtgtctgataatggaactcaggttgatggtgaatttgtcactgagttctgtgagaggaacaacattatcaagagcttctcgtctatttcaagacctcaagcaaatgggcaagtagaagttgttaataaaaccttgaatgacactattaaaaagaagttggctgctgcaaaaggtagatgggtagatgaactatcacaagtactttgggctcacaaaacaactaagaaaacaacaacgtggcatactccattcttgttggcatttggctcagaagcaatgctgccagtaaaagtcaatgttgcgacccacagatgagatttctataatcaagaagaaaacacagaactcctaaagctgtccttggatctacttgaagaaaaacgtattgagccgaaaattactaatgctgcatatcgacattgaattacgagatattttaataagagagtgaagaaaaggctctttaacgtcgaagatttggtgctaagacgagtatttgcaaacatgagagacgcgtctgcaggagtatttaacccaaacatggaagctccctacattatcgaggcaatagttggaacttgattttataaattggctcggcttaacggcttgctaataaagaaccattagaatgttgaacagttgggaccttattagcaataaatttagtgttgtattttctctttgcaatataaaatttttattatcaataaagttgaagtattattcaagtaattacaaagttttctctttaaaattacttgaggggcatatatatgtgtatgattaactggaatttatctagaaatacatgatatattgctaacccactccactttaaaatttttactgaatttttctatggacaatataaaattaaaacttgaacctttctcaccagaaaggaaaatcaaagcagcagttttaaatgggatttaactcataaaaaaacattaagctacatgcgaggctgaatacctaacgactcgcattgtgtaggcatgtattataaacgaggcagcaagatgccttgaaaaaatgatacttaacctaaaataggaatagaaagcctaactattcatataggcaatcaaaaaatgtggaatgtaattcgtaaaacgaattattcaaagtatgtttaaatttgcttactaagttataaatggcagattataactgcacgcataaagtagaattgataaatactgctcgcgaataaaaagcatagcagaatatatctatgcgcacatacatagtagattaataaccacttaagcaatctcaaaggaaaagacgagatcaatggaaaggcttgcttaaaatatcttaagtttggtatacatataattgtttaacttgtgaataaaacgcaaataagcaaatatattaagttcaaatgtgagacattaaataaaaagaaataaaatgaaagcaaagttggccatccaacaatgcaaatttatc

SEQ ID NO: 148991 - DNA, 1199 bp, Cannabis sativa
ttatacacgagtacatcactttggctgcttcatggaatgatgattgaccctacaaaccaacacgagtgtttccatcgtgctttgtcctcactctcactcacacgagtgtttcaaaatttctttttatttttagaaccctagaaccaactaagcaccaacatcataaggccagagcaagtagaacacattgttaggcacattaaagcttttaaagagagttcccaagaccccacccatgcgagaagaaaacaaagtctttgatagaattaacaaaatacagaggggatggataagataataaatcgttggaattgtttactgaagtcacatgagaagtacatagccctgatgcacgctctcaatgtgccacatgtccaatgtagtctaagagcaaactgggaacatctatggcatgtcggggtagataaggccgaaagatatgacctactcatgatcaacctagtggatcagtacaaaattattgacaccatatatcaccgtgatggcactaaagaagaaatatattatcgacccaataatgttgttaggtctgaattccttcaaaagttaccaatctcgtcaaacttgatgtatttagaactcgactatgtagatatgacagaggatatgttagaggaagggtcagacatagaagagtagaatagtcaagttgcattttttttttgtaataagggattttagtacggctccactttagttaggagttttagtgtaactcctttagcttgttgaaattcataaataaataaagaagttttattctattgggtaaatatttatttgaatcttctaatgttaagtcttactgaatagttaagggataattgttgcagatataggagatatgtctcttagaattaaggcgtcaaacgaaacaatacttgcaaaattaaaaagtattctatcacttaagatcgaaaataatcgccacgaagaggataagattcatagagctctatgagaggtcatcgcaattaatgaagaaatcaaaagagtagtagaggtgaggggagccttaataaaaacacgagaaaagtttctagtgttaagggctgcattgtcaaatgttcttgaacttctctactatatcaatgacgtctagcaccgtgtctcaaatcttggtgacgcaattagatacgcaacattcatatgtgaactaacgcttgacttccacaact

SEQ ID NO: 148992 - DNA, 875 bp, Cannabis sativa
ctgatagtgactcatctctagatgtgttggtgggcggagtcctgaaggagctcaccagggtaagtcttttttgatacttccctttaactttccacacttagctccatatgctcgattttttcctttgtgcatgccggttttaagtgggattacacttactcccaggctaaatctgtaacttccaagaatgcagctctgtccgacaccttgaaggcggaggcggacttggccaaaaaggaagctgaggaggcgagggcagaagttggagctattcggctggagttgggcgaagcccacaagaagctgtttgctgccgagcagaatatctctgtgctaacaaaggacctcaaagctgctgatggctttgaggagaccatcaagatcttatctgctgaagttaacagtcttcaggatgagaggacttctctgcggcgatcttcggatgaaggaggagaagaacgccaaggtggccgaggtggaaaggttcaaggagaaaggtcaatgccttggagacagctggcctcaagctattctttgatttctagaaggctaatccccgggccaattttgactacttgggtgaggcaaaggacatgtaccttgagtactgcgcagcccaagttgcttatggtgggaacgaggcggctgcttcaacctctggccaagctgcttcaacctctggccaggctgctgatgcttctcctgttcgaacaacagatcctcctactccagttggcccagaagaaccgaacaaacagcctgggactccatctatttaaacaattctcttattatctcctttatatatatatatatatcttattcggcctcaaggcctttttttaagacatcatgaccgaccaagcggtctttaa

SEQ ID NO: 148993 - DNA, 565 bp, Cannabis sativa
  modified_base (289)..(289): a, c, t, g, unknown or other
atttctttaatttgcaaaccatattctttgggtcaccaaccacaaagttttctggttgctccatataaattttctcatcaatgtcgccattgtaaaatgtatttttaacatccatctgatgtaaactcaaggtccaaaatgagcaacaagtgccaatattatcctaaaagagtctttcgatgaaactagagagaaagtctctatataatcaatgtcttgtttctatgtatagccttttgctacaagacgttcgttaaatctcaccacattaccatattcatccttcttngttttaagtatccatttacaaccaattggttttacaccttttggtattgggacaacttccaaaaacttattgtcttgcatagacttattgatctcttcattcgtggcatcattccacttttgagagttagaacttttcatggcctgatccaagttgaatggatcatcttccatcattccgacttcatcctcatgttcttgaagaaatacaaaatagtcatctaaaatagcatttcttctctctcttgtggacctccttaatggctcttgttcttga

SEQ ID NO: 148994 - DNA, 785 bp, Cannabis sativa
aaagcctgctccaaatccatctggtctcgggctcttagtgttttgaatgctgaaaacaactgacttgatctccttttgtgtgaatggtctcaaaagttgcagttattaagctaaagaaagcttagttccagtctcaacataatgagtgttgatcctggttgtagttgaactttgactccccataaaactgtggaagtgattgacaaagtgcccaaccacttcaccatagtcatccaccgtttctcccaagtcatttacaaagctgacaattctgttgtcttctcttctcttttttatgcaagcatagaaataagcattattctcatctcccttgctcaatcaatcaactttgctttgttggactaggaaactatgtagcatacttgctttagcattgtagtcttgagcagcttctacttcaacaagttggaaatcttcattcttcgggtgttgttgggcagcagttcttgcttcaaggtacttgtctttggctctataaaaattaacctccacatctcttatagagttcttattgaactttgtaagagcatcctgaggtgacaaatttgaatatatatttattaaattttattaaagcacaaaaataatgcaaagagcatcctaaggtgacaaatggcataaatgagaaatacttataattttatactatattgtatacagtataaatgtaaaggtaagtgaataacaatataaacaaataatttaaaaacagtatatcatgtaaattatcctaaaaaaattatagcaaatgaccccaaatcata

SEQ ID NO: 148995 - DNA, 539 bp, Cannabis sativa
aaacggagtcccgagtcaaaagttatggccaaaataaaatcgagaaaaagatggctctctgctaggttttatggccgcggcgaccataaatctggccgcgtccacttggttcgaaaaacccaaaaaacaagattttaaggtctaaaaatgcccacttttccataatttctaacctcaaccaaaacagagggtaaaaacacaaaattcatgcattaatccacaacaaaaatcagatttaaacaatatacaatataggctccaaacttgacgtaaaaattccatacaacatctattcaagctcttgaatctcacaaccaaattctcaagcttgaactaacttaaaacagaaccaataatccaaaatcaagcatacatacaacctaagaatcacatccacaacatatcaagagtaatccagaccatttgacaacaaaatcaagcatacacaatcactaatcatcaactctttactaacatgcatccaagagcaattcatcaacacattatgcttttctttcaatttcaaaattagtgaaata

SEQ ID NO: 148996 - DNA, 742 bp, Cannabis sativa
aacaatctcaatagtttggggagaatttttaacggccaaaaaagttcagagggcatgatttagtacatgtcaaagttcaagggaaaaaattactaattagcctaaaaatataacatttacaaatttaatatatctattagttctcttcaatataaatatgtaggaagaatatatttgaggtgtaatgtggaagtgtactattattaaaattttgtaagaatagtttctttacaacttagagaattcttggaagaattctaaaattatttttgaagaccatataaaaaaaaaagttagatctatcatatccatggagaagttgaatacttcttattcagagtaagtttatttcattttgataactaaaaggtaaatatctttaatatactattttatatgtttaatgaatttttggttttgtaagaacgaagttcttttgtagcttcttttttggtccaaatatagaaaatgacaaacacaaatatgataccaggaaatgagcattcttcacattgaggaggaggtcggcggtgtaataaaaatattaataaatactagtaaaaatacatattcatttttttcgtgtatataaagttaatgtatattttaatcactatcatatatatcattttaaatttgtgacaaaaaaatatagaaatttttacatgaaaaatcctttttacacactttattacaaaattaccctcacacgcctatgactacatttctacttacaaagtta

SEQ ID NO: 148997 - DNA, 808 bp, Cannabis sativa
ccctcctgggcaacgggacccaccataacctcttctaaggtggccaagcgttttcctcccttcttggaagatttggaaccggatgtagacatgttagttatgaaaaagagttaaaattccagcagtcaggccccatagcaaaccctaaatcaaaaaagggaatgggggtcccctaaccgcttgaagaggcccccttcggacggttgtcaacaagaaagccttagaaggatttcctagacaaaagtcgggtgcaagaatctcacagataatgacattacacataagcagagaaagggtaaaaatcgagaaagacaaagtcttctctatacccttgaaggccgtcacgtaaagaacagatgggcctttgaaaaatataatgtgcaaaataagagtgacccaaacaccagagaagagaaatctaagcgagttacgcaaaaaatcaaggcaaaaaactcccagaaacttcgaacattaaacccagaaaaatagatgaacagtaaagcatgccatgaacacaaacagtaaagtgagggatgcgaaaaaattacataaagtgtaagaactgggagttgctgttgatcgacgaagaaatgtagactgacagtaacgaatgagggttaataagaaacctatagtgtttgaaggttttctagtttgagggttttctttctctctggaaaactcgagaaaatttggtgaaaggatgaaagtaaccaaatgaaggaaagatggtggcttttataggccaaaccgcatgtggaacaggcgcaattacctaccaatcgaacggctggggaggcgcacgatt

SEQ ID NO: 148998 - DNA, 501 bp, Cannabis sativa
ctgattcgtggagacagcattaaacagagcatgaagggccttcgagttgaaattagctccttccatttcaattgtggtccattggctcataggtttgggaataatgatttcgttctccatcatcgtaggtttccaccacccttcttctgtggacatccatactctttcatcaacagctctcaagaaagcacgcatcttggttttccagtatggatagttggctccttccagcatcggaggtctcgaggtagatcctccttctctaaacatttccatcctgcacagagaagtagagaacagacacacaattgttctgtagttctttgagagagaactcagaggtggttagtgacgacagaatcaatcctcaaatatgaatcaagaatccaggattaagaatcagacaagagtaggatctaacacaaatttttagaaaatttcaagctctgataccaattgaaagtacaacttgttgattttaatgatccaaattaccaagtt

SEQ ID NO: 148999 - DNA, 606 bp, Cannabis sativa
tacaatgcaaacccatagtttcaaattttgaaaactttataaaagggcctcgaccaacccttttttacggaagaggggtcgaactgttataactcctgacaaaaccttttcgacaaaaaaggggtcgaatcgttttaacaccttgatcaaacctttttggacgagaaagggatcaaaccattgtaatttttgatttataacctatctgacgagaaaggaaaatcaaaagttacgaatagcgcataaaattgaatactaacggtttgcgctaggggaaagtattaaacgacacatccaaatgtcttgaaaaaatacttaaacccaacacgtgggtaggaattttaactactcacgtaagcaataaaaatgtacataaaatgacaagttcattataaagtgcttaaaatgggatcgtttccaatgattgcgagatgaaattaatgatggttcgcagattccggaatgagcaaatctgctcgcaagtaaagtacgaaattaactacttaacgtcgagagaaaggacaatcaatggaaacccctaataaactttatgcctatgatagtttatattgtgaataaaatgcaagtaaacatccgcataataaa

SEQ ID NO: 149000 - DNA, 828 bp, Cannabis sativa
catacaattctccgctaccccaagatataatcagagtcaggcattggcccctgtatcttctcattatgggaatccttctgggataagtggacctgtcctgtctcactccgctcctactgtaagcctagtgggaccttctcaaggctctcggagtaagaggtccttgaaaggtagcaaccggacggaggacaagcgacagaaaagggggtacactccccaatacacccaatacacggaactgacggactctcaggaacgtgtgtatttcgccacccaccaggcaggcaggcaaaatacgcgctacctaccggagactgcctcctctgtatagagatagctcccgaagggatccctacaaaagatgcgaataccataaagacattggacacaacaccaatgaatgcaaaaaccttaaagatgaggtcgaaaacttgattcgattgggtcatctctacgagtggattaagaactggctacctcatctcaacccagttccggcagcaggacctttgccccaaggagcgacagggggtacgtctggagcgttggcatcgctcccccgggggaacctcagcagattcttggcctaccaccgagactcaatggaagagtagctatgatctctggaggaccccatatcggagggactagtcaaaagggattgaagcgctacgccggggccgtaaaacatagtgaggtttgggaagttactcagctcccagctcaaaggccctgactcatggatcaactgattacgttcacaaaagaagatgcaaagacggtgtgttttcctcaccatgaccatctggtcatagagactcccatcgc

SEQ ID NO: 149001 - DNA, 576 bp, Cannabis sativa
aattaaataaattcataaataattataaaaataccgataattagtgctaattgccttttctaatccatattttgaaatgcagtcattacagatgcctttagtacatgtagttttgtttgttatattgtgtaattatatttggggtgaaatgtaaatcttattagtgtatatataattttcattggtctttcttgacgataaaaaatggccaacgccaactcgctagattggcaagatgaataatgagttaagtaaatattaaaataatatatagtagttaattccccatgtcacgatggtagtggagctacgtctaatttgagtttttgtttctcacaaaaattacaatagaattgactaaggaaagagatcagatttctagagagagatgctctgaccttatggcgacttcgtagaatgtgaaaaatgatctagtggagttctccttttatagggaaggaggtccattaaaataataataaaataatacaaaacatatgaaaaattcattttgggctgatcttggccataaatgatgatttaatggtgaaaatttgatgaaaattgtcaattttt

SEQ ID NO: 149002 - DNA, 708 bp, Cannabis sativa
  modified_base (32)..(34): a, c, t, g, unknown or other
taatccgttgaaaagttcttggtggattcaannnatcatgtatatatgtacataattacatattgtgtttgatgataacatttgatcaagtataaaaactattttatagcttttacaattaaaaaagtcattctaagagtgtttggataaaaaattaaaagtctcaaaaaaatttttgagaagctatttttataactaaaataatttatataattcttaatttacttataattttttttaataatattcaaacacttcaaaaaaaacattttttattaaaaaaaataagtcaaagcttatacttatcttatacttctatttattatatattttcttcttcaattaatcactttatattaaaaaaattctaattaaacaatattaaattatatatgattatttgttgtatcattaaaaaaataatttataacatctaaaataaacaaaaaatacgtgcattcgcacgtaactttaatctagtagataaaatatatatatatatatttatatatatatatatatcaaaagtagtgaagaagtggcacatttgttcttggggtgttgtcttgctcaaagactttggataaagctgctgaacgcctttgagatacaatggctattacccggatcagtaccattaatgatggtgagcaaggtggggggtagaaagggtagatcatacctatggaggacagctgttctagcaat

SEQ ID NO: 149003 - DNA, 853 bp, Cannabis sativa
tcttgcctaagagtttttctgtccctttttttagattgtttgccactatttataattgcatagtggcagttaattacaaggctgaccaaaatgtaattacagtcatcattccttaaatcatgggatctgattacatatcatgaaatgtaaatgtggtgcatgattttgaaaatcatttagctgtgattttcccacttttaatggtcaagaatatcgcgtattaaacacgtctttaattgttgaatatggagatgtctcgacagaaacttgattgtagtgatcctaatggcgagtttgaaccattattctttccgaggtcaacatgatatgttttacgtcgattgtgggtatattgaaatattttgacttgccaaggttatgagtctcgcttccgttagttggatgaaactataggaagtttcctcgtagcgagatggtcatcttgcattcttgttcttcgagccgatccgagttttacacttagtttggttattgtaagctaaggtgtgtattactcttctcctgtgcctcgctattctcctttagcgacatatggcttctcgttaatacaataagtgccaatttaagtgccaattcgtacattgaccaattcgtacattgattccttcgtacattgattcctcgcctaagaccttacagtcagtgggttgcaaatatactcttgtacttatgcaattaatgagttattccataaaaagatatggcaccaattcacattccctttaccttgacacgtgtcctccggctgaattttgggtataacaccgatctaaatgtgttatgacaaaataatttaaatgttagtatctcttcgtgttgggaattattttta

SEQ ID NO: 149004 - DNA, 630 bp, Cannabis sativa
caacctttactcattttaacagcaggaaggcatcgggccactatcggaccaccatcgggcctgacaaaaaaaatcaatttattgcccaaaactcagatctggctattttcgacccttcaacatttcagaggtagtcgggtctcacgttggtcgtctgtgtaggcggtgaggggtaggttcggttttggtgagggtgagatgttgagagagaaccgagagagatataggaagagagagagttgaggtttgaaaatgagaggggtatttttgggtttattataaagtggtcatatttttaaaaaattttgaaataaatgaatgtattattagtttatttaggcataaaattttaaggtattttatgcatattttttcaaatttcccttatgttttaagtgttattgcgccatctaaatttttagattcataaaaatggttatcgaattacttacagtgttgtcggtatatatgttaaaatagtgttgttaaaccaatttaaatttgatcacgtcaattaatttaagggtaaatatcattttagatcatgtgttttgcaaaagttactaattggatcatgtattttctaaaattatacaaataggatcctactgatttttttgtcaaaataaa

SEQ ID NO: 149005 - DNA, 757 bp, Cannabis sativa
  modified_base (65)..(66): a, c, t, g, unknown or other
  modified_base (724)..(724): a, c, t, g, unknown or other
gcttcaaaacacaacaattcaatatctaactcaaaatcacatgttcaagtgaagaaaacttaatnnttagcttcatccaatgcaactcaagtcaaccagccccggaaaccacccaaatcaatttttagcatactcaaaaatcttaactaaacataaccctaatttactttaagtcctacagctactaaaacacaaaaccttactccaaaaccaattaaattcttagaacaaagcatagaacttaccttgattgcttctataggttaggcttaggttctacaagctacttcaattcaagagaaatggtgaagtttgctcctttgctggctggtttttgttcacacgaaggggagaagaaggagaagaagaaaaagtttggtttcttgccttggaatcttttcccttaaatagggtttctttttcttatctaatttattttcctattttttttaaaagtcagcccttaacaattaaaatataaaatccctattctaaagaatgactaaattaccctccaagaaacttaaattttaaaataacttaggggcattatggtaattttactaatccaacaaaccgacattctaaaattctaaactagtttggaatatcctcaaaataattctcccattaatgtcgtgacacttctgatcacatggctaaatttccatagtcgtcgggcccgataaaatatttttatttcaaaaatagtatcctcgatacncacatatctcaatataatctccgtaattaataa

SEQ ID NO: 149006 - DNA, 555 bp, Cannabis sativa
  modified_base (122)..(126): a, c, t, g, unknown or other
aagaaagactcaccctggtaaattccctcaagactcctcccatcaacagctccagggaagattcggtgtcaacactggataacggattactcacctaaggaaccaaccggttcatgtagtgnnnnngcatctccttgcctctcttggcctctggatgcactggcaaaggtggggtaggagcccgcatctgctcagatccactcttggccagctcggatacgcccttcgacagtttaggcttgtgcgagcttcctcctcgagaatctttggacttagcagctatcggagtagaagggtccgccatagttagctcctcaaattgatcaataacatcgctggccggtgccttttccttggatggggtcacctcaccgcgcttagaattcttggtcagaggagatgagcttgagcttcctccaactctcttcttcaaaacatcgagcatcttccgagacatatctgcacggaataaaagcaacatggtcagaagaaaaaaggcatcagaagtataaaagcatgataatcaagaagtttaaaaacaagacggagtatcct

SEQ ID NO: 149007 - DNA, 861 bp, Cannabis sativa
aaaagtcatcagaattagcattgtcactgataaaattaccagaaaaatcaccaagaaaccgatttcatcacgaaaccggtttcttcatcaagaaaccagtttcttacttggtgatttttcattaagaaaccactttcttggtgatttttccgttgacaatgccaattcggatgatttttctgacgctagcagctactccggtgacttttccggtaccgacatcaaactctagaatagtcgttggaattggcattgtcactggtccatttactaaaaaaatcaccaagaaatcggtttcttcatcaagaaaccagtttcttggtgatttttcttgtgatttttccggcgacaatgctaattctaacgactttttcgatgccggcagcaactccggtgaattttccagcaccaaaagctacttcgtctacttttctggtgccggcagcaaactagtgctccggtgacttttccggcacgagtgacaactccggcgatcactatagttttacttgttttacttttttaaaaaaaataaatatgaaggaaaatttaatattttttatggtaatttaattaagtttttattttttatgaatcttaaattcatatttagtggcatttactttttatgccatatttatcataactttaataattttttctatatttttgaaaataacccaagaaaatatatattgggccttttattttttttttagccctgtgcaatagtccatcttgcacaccattatggtccgccatgcttacatgtaggtgccgtttggtaacacttttgttttttaaagttttaatcacaaaatgaaagtaaaatttttgtttttaaaaaatttgtttttgaaa

SEQ ID NO: 149008 - DNA, 546 bp, Cannabis sativa
ttgggctaagcttccctttcttccaaaagcgtttaatgcctttcatcggtgatattcagagaaacaccttgtccccgatttgaaagataatatcctgacgctttggatcagcataacttttttgtctactctgagtcgcgagcattcgcactctaatcttgtcaaccgcctcacttgttctctgaacagcctcggtactcaagaactttctttcacccacttcatcccagtgaatgggcgatctacactttcttccatatcaaagctcataaggggccatcccgattgttgtctgatagcttttattataagagaactcgatcaggggaaggtactttacccatgatacctcatccctcaaagtcaagcacacatgcccgtagcatgtcttctaatatctgtatagtcctctcggattgcccatccatctgaggatgaaattccatgttgaactttaactgagtacccatagctcgatggagactttcccagaatctagatgtaaacttcggatctctatccgaaacaatgggctttggaacacca

SEQ ID NO: 149009 - DNA, 702 bp, Cannabis sativa
tctttgcagagaatgatcttgtcaaaaccactatgaataagatacaaatgccattgatactaaaatgcggttgcgtcttttgatgacttaggtttagttacaataaagagttcttagaatactctaagtggatcctggtcacagaatactaaactcaaattccatacattaacatattgttagatccattgacaggaaatggatattaataacttgtgaaagttgaactgcattatattctggaaacaaaaatataaaatttctatttaaaatctaaaatttaaagtcaaagatttaaatttacaccaaatattaaatgagtaataattccagcttggaccaccactactaatctaactctaagtctaattttcctaaagtaaacatatacaagtaggagtactgagggtgcagaagatgagatacgaaagaaaaatattgccagaagagattcgtggaagaaaacatcaggtgttggttttgttaggggtactgatctcggtgaccgtaagaaaaggcctagtgaatcatcagttgcaggcccaaacaaaaggttccagggtaaccaaggctttcgtcgtggtgggaacgaaaattggtggactttccctaaatgcccgagatgtaaaaggcgccatcagtgcgagtgtcaggccagggcctatttccactgtgggatagtgggtcatatgaagaggaatt

SEQ ID NO: 149010 - DNA, 542 bp, Cannabis sativa
gcgtataaaatcattgactaacaacttgtcaacttcttattttagtgccccttgtttgtcggaatccaagggcctccttttctgtctctttgctaggtagtttggatcaacatttagatgatgaaagataatattagggccaatccctatcatatctccatgactccaggctaactgactttggtttgccttcataaaacttattagttgctatttacgatgctcgtccaggttcttcccaatgtatacacactctgtgggacttcctgggtcgagaataacctcttccaattcttaattggtttcaataggtttttctcatcttgaactcgggggtcgagatctttgtttttcttttcagtttcttctgccaagattgccatcaactgatgaccgactttccaatgatgcaactctatgcgataacaatcgcgagccaacatctggtcgccacgcaccactcccacaccttctggtgtttcgaatttcactggacaattgtttgatcgaactgactgcccctagcctgatcagtgctggac

SEQ ID NO: 149011 - DNA, 752 bp, Cannabis sativa
gaacaaaagaaagttgaagaaaactgactggacaaaatgctgctgtgaagcaagcaaaatgctatagcattctgggcagtttggacagtgacgtggaaaaagtctaagaaacgactttcacttatccacatcagcaaatcagtcccaatcactcaaaatgcactagctggctgttgtggaaggaaaaagactaagcctagtggaccaaagtggaaaagattgggcttctatttttagggtatgaattttgtaccctagaaacccaacaactaaaagaggagaaaaagccaagtacaccaccatcatcctccataacgtaagcagctgccattttttgaaggggagtaattgcagaaagtacatagcagaagaaagaagagagggggaccaagattttgtgtttgaacttttcttttaccctctcttaatattgttctttttctttgtcgtttcttcgtgcttgtacttagaaattaaaagaaacttgttgaactaaaaaagaggcagcatccatggttaaaccattttaaatttggatgttatttttttatttgaatatgagctaaactattaaggcttgagtgactatgaactcctatgttggttatggttaattttaaagcttactttagtatttttgcctttgttcattcaagtgagttctaatttctctttgattgttgtttcttggccattaataacaattttctaagctagatcttgttccagaagggctagatctagtagttcaa

SEQ ID NO: 149012 - DNA, 719 bp, Cannabis sativa
  modified_base (44)..(50): a, c, t, g, unknown or other
ataaaattttttgcgatgcggtcgcaatttgaatttttcttaannnnnnnggtgcggtttgcaattttgaattgttaatatgcagttcaaatggcactgcaccgtacattatattattttttttaatatttatttgggtctaatatatgaatgtccaactcaaaacccactaattattgtattattgaaacttaatttttttttatatttcgtttcaagccttatagtatttttgacaagtgcttatcaagttttgttgtatttgtgatagtttaattattggtgatagtccaaatcccagaaatcgcaaaaaccacattgcaccgcactattatttgcgatgcagtttctccagttttctagtttcgtggtgcgtgtgtagtttgagaaattgaaaaaactacatgtacgggttagtttgaaaaaatggtcaaaaatcgcactaaccgcaccgtgaacacccctagaaattatgtcttagtaatttatgtgagtgtgtgaggataatttaggtacaatactcataaaaaaaagtatatttaaattaaattttatttaaaagtaaatttaattattatatatataaaaaaaattattcttcaacttctctctctttagtacaataagttaaatcatttttaaatcgtaatttttaacttaaccataatataaacatgattgaacaaaaaaaaatgaaactgatttggttttctcctatt

SEQ ID NO: 149013 - DNA, 547 bp, Cannabis sativa
tttaaattggattagataatttatttaaaatattatttaattaaattataaaaataagactatggatcattgactactaagatgaatatgtaaatatgacaattctatattttcaactcaaagcttcgacaattggaatagcccgtagtgttcttttttttaaatattaaaataaattcttattaataatttttttagagtaatagaaaaacaatgtgtaaatatataaattaataaattattattatagattttttaagagaaatttgttataatagatttatttaaataatagacttagataaagaatttaacgatttgaaaaaaaaaaattaggaatcatttttttttaattctacataaatatcttccccaattaattaattaattaattattaaaatattaaaaaaaaaattaagtgaaatataaataaacatactaactaaaataaacaaaaaaatataaaaaaaatattacacactataataataattagaaactaaaattttgaattttaaatgtttatcaaatataataaaatcaact

SEQ ID NO: 149014 - DNA, 713 bp, Cannabis sativa
atagcttaattgttaaaataattatagtaggaatttatataaaaaaatatttataattattaattgctaaaatgagtcttattatagtagggattcattgtaaatattattaattatttatagttaattgattctaaaaaggaagttttacctattggtaacttactattataggtaaaaaaaatgtaactatgatgattacaataaaaatgtaaccattgagtagtcgcctttcattaggggtgccaaaatgtattttcaccttgtatttgtattatattttatttgacttgacttatgcgcttcaatatttcctgccaggaatgttaatttatttatgattcacgtccaattttctcaattctaacacaatttataaaaaatatcgtactcgtattgactactttaacccattttattattactgaaaaaaaattgtagaaaaaaaaataaatttaagattctattgaaaaaaacttatatatatatatatctatgtatatactagacaaacgttacgtgcaaggcacgtatacttagttatatatttagattttttttttaagttatttgttttgatttttgaaagctagaataaaagtataatattattttaatagaaaaatatttattttaaagctttataaaagaaaatataatattatacttttgaaaaagataaataaatacacatgctcaaagtttttagaaca

SEQ ID NO: 149015 - DNA, 514 bp, Cannabis sativa
gcgacctagagtgttcggtctcgggacatctgggagttataatttgtagtcgctgagcgacctataaattatgtattttgggatataaagtttaaaaagtttgaaaaccggatcccagcgcttgtaaatattttattatattataaagtttattaattaatacaaaagttttaatttgacacgtttttcgaaaaaattctttgattagcaaagattgcaacgtaattgaaaaagcactgtagcgtgccttagcattagggcattacataaggcttacggtatggcaccaccgagtgagtcgcattgtagatgttttctcttgtgtccaagagaatgttgtaggtagtgaaccttgggttggatctcgcctggctggctcaggggtattctttggttgcttgttatcattgttgttactaccataactgttattccccctcttgccattgttggatccattcataccattactgttgggttttgtgccttaaataaaaccctttacaatctgatt

SEQ ID NO: 149016 - DNA, 1150 bp, Cannabis sativa
  modified_base (28)..(40): a, c, t, g, unknown or other
ttagcatttaagtggttaaattggaaannnnnnnnnnnnnagaaaataagatggaaaaatgacaaaatggcaaaattgcaaagtgggacccattatccaactcatggccaaccacttatatagcaatttaccatttatttttttcattattttaatgctaaataaatctaacgtaaccctaggcggtttcctataaataggtagtgatggctttagggaaaatatgatgcatccctttccttcagataaaatttgagccttcttcctataccctcgccaaaacctctcttctaaactgagcctatagtgaaagggtgattgcccacacacatcaagcagtatctcaatcatagtgtgtaaggctgtgaagaatccagattcaagagaaggacattcaggctcaaatcttggtgatactctactacaaaaaggatacaagggttagagatctgagcgaaagaagacattatattctgttgctaccactgtaaggttagttatactttatatgtgtttatttcatatcattttagaagttcatatttaggatgttaaataacatacgtattagtaaatctaagatcctggtaaaataattccaacaaaagtttctttaaaattcaatgggtgaagatcaactttaatcgtatagcaccatcgttcaatcgccaaggctcaaaacctacaataggtgattcatgattgatatcacaggagtctgggtacatacggcttaaggatttagtttacatatattttaaagttaaggggaggatcaatttctgttaagtttaatagaataaaaaaattaaaacaccgttaaaccaagaattgacgttacatcgtcatttttaatgtataaagatataataataatactatatatattttagaattatatatttagatgtcacatatatatcccaagtgtttttttaacactatatatatactgagtatttaagaattaagtgtaaatattttttaattaattaatatttattaataatactaataaaaaataaaatactcaataatactaattaaatacttatttttaaatagatattttagagttattatttattaaagtaataaaaaattgataaaaaaaaagagaatcaaggagagaacaaataatgctaattag

SEQ ID NO: 149017 - DNA, 501 bp, Cannabis sativa
  modified_base (61)..(62): a, c, t, g, unknown or other
cagtaaaataaaactaaacatttctttatacatataattttttcccttgtgtttgttattnnttgttttatttattttaattttttgttgggaatatacaataacaataatttatttttattttgttgttagttttgtgaaaaaaataagaaacattaagtaattcaatattaaaaattaaccaatccaatccgcacttttgcggattggatttgagttattatgtggattggattgaatccaaaatataaaattctcacttggtacaaatcgaatgcactcaaaatagtacagaatggattgtatgattaccgttattgagaatgataaagaggagaaaaaaaacttttcaaaaagaacgaaataaatgaaatatgcaaaaaaataaattgtataaattattaaatgaaggtgtcaaggcttgaactcatgtcacttaacaagagataggataatgtgcattaactctttccaactatatgtgtatactactagctaact

SEQ ID NO: 149018 - DNA, 799 bp, Cannabis sativa
ttttactctctttagacaatattactattgtccctaaaatatatactttattaaaaaaaattcttcaacttttatatttatagaaatttggtcattccactattgacatatttattaatgagtaataagaatcaataataaggtaattattcatttactggcatgtttagttaaaaagaatgtaaatgaatagtatgatattgattcacatacaattgtttactaaattttggaaaggaatggttctccccccatttttatagggaatacattttcctttcctaactttaaattattttattttaattttattaaggggcttttttatttttacacttcaaagtaatttttttttttgcatttttacggaattctacaaaaaaacccctattgcaactagcgttgcaacctaaattgcaacaaaaaatcgtacagaaacccttattacaactagcgctgcaaccactttacaaacccaaaccgtaaatttgaaaaaaaccaaagttaagaaatagtatatggcgtaatttccttttattaattaaaaataaaaaagacaaatatgcccattaaaaatctataaacagaaaataattacatattcttgttagacattaatatgtataaaatgaaatatatgaatgtgtatataacatacagaatgaatgaatacatacactatataactataggatcgaaatacctcctgcaatttaatttttgagcttcaaacccacacaagctttgatctgcaaaggaaactggttgatgtggataatcgggcttcctcgctctctca

SEQ ID NO: 149019 - DNA, 525 bp, Cannabis sativa
atataataacttcataaaacaacaacaagcatcaacaatctcaacagcaactaattcacaatttcactttgaaaaaccatagaaatcatagttttgagttacaatctctacacaagattaaatcccatcaaccaacaaccaatctagcatgaattcatacaattaaacacctattaatctctgaaagcaaccataattaaccacagccctaaaaactacaaaaacaccaagcatgcaaaaccataactttcttaaaacacaagaaactaaagagagggtgcaaagctataccaagaacttggattcccttcaaaatcagcttgaaaacacagagaaaacttcaaattcttgctgcttcaaaggggccgaaagagagagatagagaaaagcttgaaaaataacttggtttttcttttctttaaattttttgataatatgacacaatgaataaatcaccaactataatcagcctattatcacataaaaatcaatttattaatttaaaactaagtccactaaaggaca

SEQ ID NO: 149020 - DNA, 918 bp, Cannabis sativa
aagcttgttatctactgataaaatatttccaacaataagtacatggttatccaaaatataagtaattggttacttaagttagtataattatccaaaatataagtattttattatccaaactataagtacctagttacctaaaataaaagtacttagttgcccaaaatataagtacctagttacccaaagtataaatacccagttactcaaaatataagtaattggttatcctaaatagtacctagttatttttttaaaaaaaatgtacctagttacccaaaaatataagtacatgttagaattctttatcactcataaaatatgcaataacaagaattatttccatagataaacatattatatattattataagtgtataaatataatctatagaatatctttgttgattcaaagagaagaacgcaaatagtgaaagcgtaccttaatccataaatactgatgatctaatccatcttgtagaaataatttttgttgtgattttgggtaatgatctttcaagaatacaagacttagttaagttctttagttttcactcttgatgggggaaaatgagagtagagtggctcttgtttcttggagaccactaccaatatataacaccataggttataattttaagtatttctaatttagcccctcaataaattaaaaatatctcttaaggtatctacacatttagcccataacactttaatacccaataacccacaattactaaaatgatcactttattttgggtcgaatttcaaatatcaatacactaatatacatgtgagctcatattgaggattttaatccaacaatctcccacttgggctacatatgtttttcagatagtatgaaccttataagcgcctaacttttgctatcataattataggtatttcaaaacaatc

SEQ ID NO: 149021 - DNA, 584 bp, Cannabis sativa
tgagacagaactttttgaagttctcactcagaaggaggtgttttggcgtcaacgatcgaaacaattgtggcttcaggagggggataagaatagcaaattttttcatgcaacagcttcttctcggtgccgtatgaattctattgataaactccaatgcgaagatggaagttgggttgactgggaatcgggtctatcagatgtcatgtgttcttacttccagaagaatctgtttactagttccaactgtactatggatgatgttcttgatgggatttctgctactgtgacttcaactccgaatgactctcttgcaacccttgactgatgaggaagtgaaaaaggctctattttagatgcacctagataaatcccctgggcccgatggcatgactccgggtttttatcaaaagtgttgggcaattgtgggtaatgatgtcatcaaacaggcccgctcttttttttttatttggtcagttgcctactggacttaatcatactaatttagtgttgattcctaagaagaaaaatgccactactatgggtgacatgcgcttgattgctctttgtaatgtcctctacaaggt

SEQ ID NO: 149022 - DNA, 846 bp, Cannabis sativa
  modified_base (800)..(815): a, c, t, g, unknown or other
gtgcctcccagcattgtcctgatccctgtgcctactgatgaagagagacaacagcttcagattgccaagcgtaactatgctatggctgaatacacaaaggggaacgctgaggttgaggccttgaaaaaggtcttaagggaggccgaggagaattcctcacgtaatgagtactttgggaacgcctgggatctaaacatggaccccctgacaaactggttcaatcgcttcatcgggcctatcctcgctccttttgcctcagagttgacaagccactttgtctctaatttgacccaacttcggccaagagatatacagtctgtgcttccacgaactcaatctaccaaattcaagatattagcgctgccatgaccgcggtaagtctatctgttagtgttctcgggtcttgttttatggcgcctgacctcttgtacttacacatttttcttgtattgctagatttctgcagagactggtcgcctctcaaaggctttaattgaccatgggtacatcatgtccgaatttgggggcatggatgaggccatgaagagtctaagagactggacagcaaagaggaaagctatcccggaggaggcccagcagagggaggctcagatggagcggagtcaccaggaagcgttaaaggccaagactgaggagttaaaggcaaaggacgatgccctgaagaccagggatgaggctgtgaccaaggctaggcgtgagcttagggtggccaaggaggcggttgaagaactgactgccaagctgaagtccctagaggagctgttggaaattattttacnnnnnnnnnnnnnnnnctcacaagtatgttgattaacgccctaaata

SEQ ID NO: 149023 - DNA, 578 bp, Cannabis sativa
tagaaataaaaaaatacaactaaaaacaagtacaaatataagagataaaaactaagtacagcctaattattcttttaatattcagcccatttctttttaatttcctactaaattctcagcccaagtccaagcccaaaattcatagggcaaagagagtctcatgtcactgtgccgcccttctacttctccttcgtcttcttctaatttttttttagttcaaagcaatgagttcctgaagttcatcttcaacacagtaccatatatgatatatgtatatcatattcacagaaaataacccataaggacatatatatatatatttcttctacaaattaatgaatagagagcaagggatcctcgtttactccactacttcgatatatttctgcaatccggcgcgaccaagcttccgatcgtcctccagtgaccacttcgtgccgcccctcgctgttaaatatccacagtcgtctccgatcaaatatccaccgtcgtccacgatcgaaaatcctcctccgatcttgtgcgcgaagatccaatgccatctctgtcttctccgacattggagttcttcgagctgc

SEQ ID NO: 149024 - DNA, 1455 bp, Cannabis sativa
gtcaactggataatattcttgtcttcccccggcagccgggcaagtttttgagctctatccctaagagctagagtgacgggaggacggtcatatgtaagaatctgctggaaccgagtccgggtcatgctcgagtccttcaccatgaagtactcattagcaaaacgccctatcttgctgctggccttgtcgtccgtgccggtcaaccacttgaagtctggtcgagagaaatagaagtaccccgacctgccctgtttggcggtggacttcaaatcaaagaaccaggaaacttcgtgaggagaaggagtaccccacccttgggaagcgtagaggacaaagagggcaaataaatacttaatgcccttaggagtgaaatgggccaggcagagaccgaagaagtctgctacatccttaaagttcttatgcaagggcatcaacgctccttgctgaccatgggctccccaccagatgcacatccccttgtcagggtttgtggcacgattattgtgggcgggaatgtagcagtccagttcgcccaagtatccaccctggtcaagaattcgaaggagcgcctccataatcttggacagagcacttacccacctagcacccaaggcacgctgccttttatgaggaaccaccgcggcaaactcttcactgacgtagtccacgccctcaaccaggacgtctctgtcaacatcgactggctccccagcctcgttgtactccccgtaatttgggggtttaacctcttcctcttcctccgcctcggggggactgccaggacgtacattgtctagctcctcgatctcttggacctcagtgtccccttcacgatcctcctccatctggacggccgaatcctgttcggcgctgggcaaagtggcgagccgagccacttaaggatcagttgcgtcagccatatgtgttgttttctttatacgagccatcattctatggctgggtacagggctagaagaatgtccttcactagaggaagaaggactagaacgaagacgaggatgatcctcgtgcaaaagttgaagcaaatcctggtcgatccgatgtctgagttcccaagactcacctgagttcatctacaaaagacaacacatacgatgagtgtttggtcggaatatcgaacaataaacaagcaaatatgccaaccaggagtactcaatagattaaagaacggttatgttcaaagaaaagtcagaactcaagaaatcaaaaaaaattcttgaagcttagaataagcaagatgaaagacggacgttatgcagttcaaaaacaagcattatggctgtaaacccgcatgaagacatgataaagaagaatcgaagaggtttctaagcctagggcttcctaaacatttttctacagcacagtagaaggagcattcaaaatgtaaacatgcaaagataagcataaaggaaatcaaaaacttactcaagattc

SEQ ID NO: 149025 - DNA, 1121 bp, Cannabis sativa
ataaaacgtaatttattaattacagagattatattgggatatgtgtgtatcgaagataccatttttgaaataaaaatattttatcgggcccaggtgctgtggacatttaccattacggtaaaaaatatcacgacattgatggaagaattattttgagggtattctgtactaggttagaatatttagaatgtcgttttaatggattagtaaaattaccaaaatgccactaggatatttttagaatttaagtttcttggagggtaagttggtcattatttaggataggtattttatattattatgggctgacttttataaaaataaaataaacataagaaaaagaaaaacctatttaagggaatagcttccaaggcaagaaaccaaacttcctcttctcttcttcttcttcgtgcaagccaaaacatgcccaccttgaggattttttcttcagcttctacgctcattttagagctaaatcttgtcccaagtcaacctagaagagcttgaaggtaggctcttaacctttttggattgaaaatattagtttttgagttggttttcatgtagggttttataattctgtggctgtgtgagttaaaccaggtgtggggtgtatttagggtaggtttttgagcatgttaggaattgttttaagtggtctctatggctgcttggattggattttgtttgttgaagccaaagttaagttttcttcactttaaattgtgattttgagcaaattgataaattgtgatgaattagttgtttggttatgttatatttgctatattaaactgatctgaaaggtttgagcaggttttgtggaggttggataggtttttggggtgaaaactagaaatcaccttggctgcccagggaaaactggtcgaccggtttttcaggcacctagcaaaccggtcgattggtttggcaagcaagggggattttgggtttttctcctcaagtccgatctgattcggggtgtctttcggagtgaaattcagggtgtatttgagatgtttaagctactttgatatgagggaaagtagggtgtgtccgattatgagaattcgagtctattatcagaaatttgattaaggtttttattgagttttggttgt

SEQ ID NO: 149026 - DNA, 598 bp, Cannabis sativa
gttccaattgtctctagaagtctggtgggacatctttcttcctaatgtcccttcttatcacaatatgaacatagaagagtacaattgtccattgttgaagtccttgaacttgaagaggcagcattgttagaagcatcatattcaattgcccgcttcctttttcacatgtctgcaaaattggagggaggcctccttgtaggcaaagtctacttgtaagcacgcaattctacttctagcttgtctacgtcggatgactttaaatttttgatcatgtaagattcaaaaaatctattatactcaggtggaagactattgagaatgaattgaacccattgttctcttgataaatcaattcccagcatatttgctttccagaattttagattcatcagcattaagtgtgaattaatgctcttaccagaagacattttcacactatagagttcatttgcaaaggcatgtaaaaggtgaggttcggggtgtgggttatacattttcacactataaatatcaataaatagaaataaatcacttggttcacttaaattcatacacaagttcagaaaataacaagtaaacatgtttgcaaaaataccaa

SEQ ID NO: 149027 - DNA, 607 bp, Cannabis sativa
gctcacctacaagcatcaaaacctaaataaaactacataatcatgcaaaataacactgcagaaaccattctcaaactcatgcaacaaacacagcaaccaatttcaaaatttctctttgaaaactataattttgagccaaaacttccaagcttgaatcaaagcaactaacatacattaaactagctctattctactcaatcaatcaagaataaacttctgcatacaacatataaacacaacagcaacaagcaacacaaaactagcatgcaacactcatctttttcatcaaaatttcaagaaactaaaagagcaagatcaagaaactttaccaacaattagagatcacaaaacttgctaaagtgagcttgaatcactaagaaaaggtccacttccttgctgctcaaggagggccgaacaagagagaaagagagagctttgagaaaattttggtttttcttttaacttttctaattttgaaataaaggaaatcatgccaactcaaccctatattcagctaacaattatcaattaaaaccatataatttcaccacataaagtccactaaaggacaaactatcattggggtcattttgcccctccacactaa

SEQ ID NO: 149028 - DNA, 807 bp, Cannabis sativa
cacaagatcaaatgacttcttcatactgcaatgaccatgggagatcttcaaaagggctgctccaaacttgttctgtcaatgtccgggagcaagtgaaggtgttggccggtcgatttcaaaagccaaggtgcgatacaatattttttttttgtttaaaactaaaaaaacatttttggtgctttttggttggctgtgttgttatcatcattgatttcactattggtagttttgaaactggtatctctaaggacaaacagacttgtgagcatgctcttcttggttttaggcagatgatatgttgttgtaacaaggtgataaaatcaattcaattcaactctatttacatttgtcttttgtgagttgtttgaatgtgtagtgtacgtttatgatatttgttgttgagtttagaaacttgctatcaattagcttgagtggtttatatttatattttttatattgtgttttggttgggatggactggttggtgtgcgtaataatgcgtgtacttgggcttcctggcttcattttctgggttggatttgtatggcaaatggatcaataggttgcactaacaataattatgcatcaagagaaaagtgcaaaaagtgcagacaataccaaaagaggtaacgacaatgccagtgattaccatgcctggagcttctctcccaacttaatcatactattttgccagggtccaagcagatcaaagaatgaatgttggattaataaaaaaatcattcggattcccaatgattaattttctattatgatattccaactagttacttctcaccttttataata

SEQ ID NO: 149029 - DNA, 523 bp, Cannabis sativa
ttcaattataaaattgatgttgcgcagcttttctacttcttcctttagggctactactcgttctttgtccagtaaccttcgtttttgttggactggccgaaaattgtgatcaatattcaggatgtgcgaaataatagaaggatcaatcccaaccatatccgcatgtgaccaggaaaaaacgtctaggtttgctcttagaaattttatcaattttgattttacttcaagcaacaaaccctttccgatctttagctttctggtcgggaaatctagatcaatctcgatctcttctaactcttccacaggtcaaacattgctgcttgggtccccaagttgaggatccacatcttcatccccgccttgggaaattccctatttgggaatgcttttccccttgcctttgcactgcaaggttataacattcccgcgcagactgctggtttcctctcagacaccctactccattctttgctggaaacttcaggcatgagtgcaatattgatgtgacaactttcaagtcata

SEQ ID NO: 149030 - DNA, 583 bp, Cannabis sativa
acacccatttaatgcgccatatcattaaatggataggaaacgaatcgttgcctgcaaaaagcaaataactgcagtgatgacggtcataaatgcatccccatgcgcctaaaagcacatgtcaagaagttaataaggcaaccggaggcacctaagcaagcctcgtttgcttcccacccaacaaggcttggggggtaaatgttgcccttaattttgtccaaaatacgtggaccaacccgactgtgactcgtggattgaaggagtaaggctttgagataatttgactaagtcttcttaatcaaaaggatcatcaaggagcatgcctcccggagaaggtatgagagattcacatactcccgaagagcaaggctataacaaagcaccttcgggaggtatcaaatcctacttgaacagtcacctcgcatttaatgttgcatgggaagaggcgtatgggaactgccataagtattaaactctgatggtgtaacccccctttctgcagctattacgctatgattaatgagcctagtgacgactactttatgaggaatcacaccagtcaagagaggataatggattacatcca

SEQ ID NO: 149031 - DNA, 793 bp, Cannabis sativa
  modified_base (135)..(139): a, c, t, g, unknown or other
gctctcagtaaaaagacgatcagaccaaaaataagcaccgcaagcaacacaatgtgcggtcttgttagcagatcgtttaacatgacaaacagaaacaatatgtaaaatagaaataagtgattgacattcttgaannnnnaaaccaaaaacagatggaagtgcaatcgagctattaatagcttgaacaacagcaatgcagtctgtctcgattagcacattcgacaagttcctcctcttcaaccaactgagagcctccttgacactcaaatctttagcaacagctggctgacaaaccctaggatacagagaagagctagcttcgattagcttcccatgagaatctctaatgaccatacccgtaccatattgagtcgttgcagcaaaaatcgccccattagtattgattttcaacatcccagcaggcggcttctcccaacacacactgctactagcaacaacaacatcaaataacagcggttcaaacctactttcctgagccaacaaccaattataaagtgtagacctagccattcgaaccacattcacagcctgagaagaacgaccctgccaaagaagctcatttcgggctttccaaataccccatgccaccatcaatagctcatccaccaaggccactctacccctaccaaaaatgccttaaaccaatcagcaaaggtaacttctgcagaaaactgcaaccccacaccagacctattccaacaagattgtgcaaaatgacatccaaccaaaacatggacaatggtttcttcatcagagttgcagaacacacagc

SEQ ID NO: 149032 - DNA, 665 bp, Cannabis sativa
gggggtttttgtagtagtgattaactaataattatttatttaataatataattaaaaaaattattaaaaatgagagaattaatgatagaacaaataatactattttgagaaattttagagtgtcatgttaccgcttcatatctctcatttatatatatatttaaagagtcaattaagtttcacagttaaatgtcaattgtgattgtcacgacccgagctctaagccgtaacatatatataatatccataactttagtggtcaaatgtcacactttaaccattgtataaaaatattacttataaatgatcatttaaatgatattacgaaatacatatttataaaagtaatagaataacttctatatctataaagtaaatattagtaacaaaattaagatcactcattaatataaaagaacaataatattcctacagttatgataagggtgctattttaagactcttcgactacaccaaatcaagtttctagacttgccttaatgatagaaagtctactgatgagatggtgattactctgagggtggagcagtgattttggagaagtgcaaaaaccaatatggagtctctaatctaccagtgagactgaatgttaaagctacaggaaagatacttatttagtctatagaaagttctatacagttttt

SEQ ID NO: 149033 - DNA, 879 bp, Cannabis sativa
  modified_base (133)..(144): a, c, t, g, unknown or other
  modified_base (738)..(744): a, c, t, g, unknown or other
aaatcaagataaaatcaatctaaatatgaaaaacataggttagacaagaacttgggcttacaacatacatggtagtaaatttagatcatgataaataatccccaacaattagcctcagagccatggtaatgannnnnnnnnnnnaaatatggatttaaaatgatgtctgtgttgatttggatggttttatgttggttattgttcatatttgatgattgtacgaaaatcgcaaagtatgttgtaaaatatttttgttttcattctgaaaatatttttactagaaagtacagaaaaatttaataaatttaggcttttacaaaacctaatttggattttttatgaattagttattatttttttgaatttggatgaatatatttcatttcgggttacacacgtgcgcgcgcgcggggatcagatgtcacttggacagaacgcatcttcagacaagtgctgactgaggttcctcagacaaggccctatctaaagagctgctcatgccgagctccctcagccaacaaagactgcacgcagcctgttttgtcgccgatcccccttcatacgcgtgcgcagcatacccatgtgcccaattttatttttatcatatcttttgattcaaaaattatgtttcattgaaataaaattcaaattttggtagaattttgtgcagaatttgaattttcaattaaaaatctaattatcagaataaaattagtttttattaattttttaattaannnnnnntagttttagatattagtagcctttaaatttgaaaatttgattttctacaaactagccttatgcttaattttaaaatttttgattatttttgtttattttatttattttaagtataagatcagatattacttattt

SEQ ID NO: 149034 - DNA, 649 bp, Cannabis sativa
aaaaatttctataatttaatttttatatcttaattacaatgcatattaaaaaatatattttattattaaagatacaagagtaaggacaaagtctaagagtgggcattatagattgtttaaacaccactttttatactgttaattattctaaatttatcaaaattttgtaaaatgttttaaataactacaacatacgcaccataaaaaaatagactaaaaagttcttctaatttcaaaatagtagaaggtgcatcggtgcaccctttttagaggtgcactataaaattttcctacgatatatgctactatcaaattttcaacctgtaatcacttcaaaaaaaaaaacaatattaagcaaaattcaaaacttagagaaaatttttagtacatctcttgaaagagtgtcacagtaaatcttcttatatattttagcatccatgaattttttagtccaataatagtgagcactccttatagatgagctaaaatagctcaatcttcaaattataaagattactattcattgagccaaaaaatattttattattatttaacatttttatatatgtgtgtgttatactattgtatttttcttttataaaaataaatgaaatatattaaaaattaatatttaaatgatgtaaagaaa

SEQ ID NO: 149035 - DNA, 1139 bp, Cannabis sativa
aaaaataaaagataacaagcgtgaaaatgctccaaacacgattaaaactaaattaaaaatatactaaactaaatctaaaattaatacgaaaattaacctaacatatgggaactagtaaatttgcgagccactcaaagacaaagtctatgagtaggatgcaatctatgagtaagaagagatctgccaacaattactcccaacaagatctgcgagagcacttgaatcgaaagaaacctgaccttcaccaacagcttcgtccaaagcaagaggatccaatccaattcaggataaacgagctagaggacaagtttaggagatatcaagtgggggaattagggaaattatctggatacgactctgacgaggagcttaagtcgtatcacccatatattatgaataccccttttccttcgggattcaaaaatttgcatgtctcgtcctatgacagaaccacggatctggtctcgcatttgaataactttaacacaataatgcgagcgagtaacatgacaaacaagctgtattttgttccccacctcgcttgttggagcagcgagtagctggtttaacaagtttactcgtcattcaataacttcctgggagcagttgtccaaggattttaagaagcaatttcaggccactagggataggcaccccgaagtggcctcgctaaccaatataaagcagcagcctagcgaaacgcttaaggcatacttaagtggttttagcacggctactactagggttagaaatttggatgacagcacgcaacttacagcccttcaggcggggatctccactgatccattaacaaccgggggcaaattgtgggatgatttacaaggacgtctggtaagaagcatcactaagttcaacaagagggctcaggtgtttgtctggaaggaagaagcccgaaaggaaatgaacttgttgaaaacaagctcaggaggtaaacccagcaatgtttctacaaggactccttccacgagaattaataactcggggacttctggtccaaaaataaaggacagaattagggagccgtcaaaggatagaaagaaacaaaagaaacatgacaaatacatgccagtgtatactacttacactgagcttaatgaaactcgggaaaatatttacct

SEQ ID NO: 149036 - DNA, 591 bp, Cannabis sativa
aaaacactaagggcctagggacggccttaaaattgttccccctgaaagaaaaagattaaaattgtctgaaaaaagggaaaaaagactgtaaatgtaaaaagaaaaaaaagagatagtgatagtagtagtggattggcttaatcaatgcgaggtggaagacgaggccccctgctctcctcaagcaaggcgtcaagtctcttcttcttctcccagaaacgagcaaggacttcttctggcttggggtaaaaatcgagcttgatgttttggccattggtttgccaagccatgaaaacgccgtcatcgaagcgcttagtgtaatgcttgcaaacgactggggccaggtgctcatctcttttagccttcttcaaggcctgatctttaaaatccctgagctccttcacctcaatggtcaaattggccgtcgactgcaagtctgcctgatgcaactcctccattgacttcaacttgaaagtcagctcctcggcagcctccttggcctccctcagctcacgccttgctttggccacggcctcgtcccgggccttcagctcctctgcgttggcttgtaatgcctcctagtgcctcctctcc

SEQ ID NO: 149037 - DNA, 690 bp, Cannabis sativa
aaataaaaataagaattaaatttaaaatacataaaaaattgataaaattattaaaaattttctcatcttgcattaaatggtcattcttttctttcatttcaaaataaaataatcatttcactaaaatgatagaaaagttattccattataatgagatttcaatatttcaaaatgcaaccaaacaaaaaaataaaataaaaattattttctttctattttattccatttcattacctctaatcaaacgtcatgtaagtttcatatggtttctaacttttaaataattattttatatagcatatgacttaataaataaaaaataaacaaaatccacataatttaaaatattaagtggaaggaaataatgaatttaagttgttgtagatatttttaacatgcaagcatatgtatttattgcaagtatttactcacacaggtaaagtcgaactcacaaaaattatagttaaatacgttaaatgtaattttttattattatttggcaatatcaaatttttaaaagaaaattaaaactaaaagcaataaaaacagagaacaagtaaattaatatgtgaattaacaatgattagagttagggttattgattccaattgtatctatgcaataacatttattcgggtaatttatagttggctaagatatataaatcttaattacatgcaaattttctac

SEQ ID NO: 149038 - DNA, 660 bp, Cannabis sativa
  modified_base (31)..(37): a, c, t, g, unknown or other
  modified_base (283)..(284): a, c, t, g, unknown or other
taatccaatggcttaaaaaaatgtaaccatnnnnnnnacaataaaaatgtaaccattgaaacctcttccttatactaaattagtaataaaaaaaaaaaagtgcaacagccagcagcagccttcaatttttcttttagttgagaaattagccttcatctatttaagccacgataatttaacaagagcttagatgtaaaattgtcttaaatttaaaaatgaagttagtaaatatcttatttttaaaaaaattaaaaaactagccaaatataataaattagctaannaaaattataaaaatacatttattatatattattttttaaaaaatataataatattaaattgagttatataatttttttaatattgcacatattattatattataacaaaaataaataaatattaaattattaaatatatacggtaatatttgatctatcgtatcactgaaaagtaatatatcgtaataataaaattatatgacaagactatgatagggtactttttttaactcttgattttagatcatgcagttattatgatataagatatatacttgttataatttttttgtagtatataattttaaggattatctatgggggggggcttgtttttactctattgtataaggaattttttttaaccaattatgaa

SEQ ID NO: 149039 - DNA, 582 bp, Cannabis sativa
  modified_base (311)..(315): a, c, t, g, unknown or other
attcttttggccaacactttttaaggatgctagtacttttgtgaaggcatgtgatcgttgtcagcgtacaggtaatatctcaaggagaaacgaaatgcctttaacaggaatcctagaactggaattgtttgatgtgtgggggatagacttcatgggtccttttccttcatcttttagcaatctgtacattttactggctgtggactatgtgtcgaaatgaacaacacctgccaatgacggtaagacagttctccgcttccttccaaagaacatattcactcggtttggtactccccgagaaatcataagcnnnnnagggagtcacttctgcaacaaacagtttgaagcactccttttgagatatggtgtctgtcacagaactgctctaccgtatcatccacaaagtaatggccaagctaaaatttctaaccgggagataaagatgattctggagaaaacagtacagagatcaaggaaagactgatcacgaaagttaaatgatgcactatgggcttatagaacaacatttaaaacaccgatcgggatgtcaccgtatcggttggtgtttggaaaggcttgtca

SEQ ID NO: 149040 - DNA, 648 bp, Cannabis sativa
accttcacctttgacattctcgccggtgatggagtaaaagttggtggctccaatcctttgttcgtcggtcggtcctctcagttgttggggcagtttagtgtgggcagttatggtgtgggtggttatggtggggcggccaagagagatgcgagagggaaggagagagggctgattttgaatgaggagggtaatttagggataagtgatttgttgacatatgctaccaataccccctattttaggttgaggaaaaaaattatcccctaatgtatgcataaaaattcaaattttcctattgagaatgtgtagtatggacacaatatgagttcgtaatcgatgtatattattattggtatgatttgtatatgttgtatgttgaatgcttacatctcaggtacaaatgaggggccatggtggggtatgatacggggtaaggtcgttgaatgtagaaataccctacccaaaatttatctgatttgtgtatgacattattatggtgaggtatgatacaacaacgttattgttagaatttggaataaggtgaatggggttccatctcaaaatcaattggcaatgggaggagtagctcattcttcttatatattctattatcttttcacacatttagcaatatgagactctctaaca

SEQ ID NO: 149041 - DNA, 800 bp, Cannabis sativa
atgtaaaatacatgttaacataataacttaaaaactcttaaattgataactatcatattgtaatgggttttatttagggcacaaaatccaacagattcctcaaatgacgatgctccttatctacttatttgggagaatgctcttgcctatgtgtagggtaccttaacttttatttaattttcataagcattggcttatattggattcgcttttaaccttttcattttatttatatgcaaatatgtctcagaaggtgtttcaagccttaaagaataggtcttgtgatagctcttgccaggtacctttggccaaacgacccaaggtggatgaggtaccaccctaggagaagagttcgatcgagtcagtcatcgacctttcaaagtaggtagtgttggaggtggagccacgggtcaagaagagctccaagtcctcaaatacttctatcgtggtgaaccctgagactaagtagggtaaagagatgattcaacattagcaagaccgattactccccgaggtacatgatcagctgtccagaggagacgagatgtctgtggagctactgatgggcgggcttctgaaggaggcaacttgagtaagtatttttcctttggtttttatgtcgttcttttatccgtgcatgttttaacctttctctatgcaactcaacttgaagatggtctacacttactctggagccaagtccacagacttgagaaccataactgttagtgttattattttgtgacagtgtttgttctgttcaatgtctagtcgtatctggatttttagtctgttatatc

SEQ ID NO: 149042 - DNA, 596 bp, Cannabis sativa
ttgatgtcttctggccgaacagggtcaggccgagtggtatccaatacacccgtctcgtaacaattccctagctgttagtactgaaattactgggatccgagatccctgaacggattcgacaaagacaaacggttcttcaccttctggttggaagattaccatcttcctcgtacaatcaatactggctaaatacttagacaagaaatttattcccagtataatatcaaaatccactaaattcatctctatcaaatcagcactcaattctctatcccctattctgatcggcatagacctaatccaccttatggagataactaagtctcctccaggcagtagggttccaaaccctatttcataactatcatgtggtctatccaatttactaaaaattctggccgccacataagaatgagtggccccagagtcaaacaacacattgaaataagagttgttgaccgagagctgacttgttaccactgaggggctggcttctccatcagcctgacttatcttgaataccctggcttgagtgggtttcgctgtagtctttggtgtttcggtcctgagctggggacaatccctcttgtaatgcc

SEQ ID NO: 149043 - DNA, 1320 bp, Cannabis sativa
ctgggcgtggccccgtggactagtaacaatctgaaaagattgttgaaacgacgtacaaaaaccttgcgtgtttttacttttctacactggttgtttgtttcttctagagttacagagttattttcggtaactgttttcagtattagttttattattcggcatttaattaaacacttaattaaataattaaattgggaatattgaaataaggaatttcaagtataatggttgtaattgagtgttgtcaaaaattttaaacatgcctaaaataacaaataaaacaatgcaaaccaaataaaataacatgaataatataaaatttatccaccatcgaaccgcagtacatgtattcgcagaacctacttcactatggttgaatatataagatattcgcactcaactaacatgcatattattacactcatccgaccgcagtccaatatatcacaaaacctacttcactacagatgaatatttaagaaattcaaactccactaaattaataacaaaaagttagtgaatgtatatacctatggcaagctaaaattcgatcaacactaaattattcggaaccttaaaaattaactcacaaccaacaatatattaaaatatgataagattataattttaattatttaattacttactagttataaaaaaaagtaactagttaattcgtaaattatacacataaatttttaaaaaatttacatatacatacatatataataaattgtatctcacataaacaaaattttaaaaactttatttctaagctaattaaatctctcctatctctatctcattcacaatacatatatatatatatagacataattattacttagaatatatacaatacaattataatatttatataaataaaatgtacaatatatatacacaaaatacaaaatatatacacacacatattcaataaaacacaaagtacatacatatatactatatattaaggattaaacttttaccttataagtgcaatccgacgaccaattttacaaaaagtctggccaccatgcacacacacaacaacaatattaataatataaaaaaattctaaaaaaatttacaaaaacaaaaaaaataaagcaatgtacattactaaaatgaatagaaatcatatttataccttaatggacattgagattcaatattttctccactaaaatttgtggctagagttataaccatcactttgtttctatgggttcggtttaaagtgaaaaagggggaaaatcgtaactttttggtgtttgtgtttaggtatcgaaaatagaagatttaaaaaaaatgggctca

SEQ ID NO: 149044 - DNA, 532 bp, Cannabis sativa
ctggtaaaataatttcaaacaattccaaccaacaaaatgattgttggatcctgatgtagcaactaccataacaaatactcacagaaactacacttcccaagcaccaaaagggatctgtaatagtcaccatggctaacaacaaccagctctcccaatgcacagagcacccgacaaaatatatcattttaacccgaaaatacaaactagtatagtgccaaatcaactcccaaagcacgatatgtatggcatgtagacatgagtgtgaacttttggaaaggtgagaccgggccatgaaggatactgcacatactggaatggagcttgaatggtgttcaactgagagatggtgaacgaatatgggtgttcaggcgacttggtgagcttgggcggctatggagggttttgagatggggaagaagatgggtgagaaagaaaaaaatatgaggggaaataaggttaggaattctaagcatttcattttttttcatttaatttattttgagaaaaaaactaattaagcatttgccttttt

SEQ ID NO: 149045 - DNA, 1173 bp, Cannabis sativa
tagggcataaaacccaacatgggctgggccggaagtttctgcctccttttaagcggagtcacctgctcctcatcagcttcattttcatgattcaagggctcttgagcatatttcttggcccttgcacctcccttcaacttagctttgcgcttaagttgaatgagttcattctcttgatgagcttgttcagcccgtccagcaccagatttcctcttcctctccctcactggcttaggaatgaaatcctttgaataaaactcgtacctcacaaagttatcctcgaaggtcaacgggatgatattttagtcttcccccgccagtcgggcaagcttttgagctctatccctaagagcaagagtgaggggaggacgatgatatgtttgaatctattgaaaccgagtacgggtgatgctcgcgccatccaccaagaagtactcatcaacaaaacgcccaattttgctgatggccgactcattggtgcccgtcaaccacttgaagtatggttgagagaaatagaagtaccccgacctgcgttgcttgggggtggacttcaaatcaaagaactagctgacctcgtgcgaagaaggcatatcccacctctgggaggcgtaaaaggacgaaaagggcgaaaagggcagacatatacttaatgcccttaggagggaactgggtcgggcagaggccgatgaagtccgtcacattcttgaagtattgatgcaaaggcatatatgccccttgctgggcatgggcgcccgaccaagcgcacatcccccttttagggtttgtggcacgattattgtgggcgagaatgtagcaatccaattcgcccaggtagccatcctagtcgagagtccgcaggcgcgcctcagtaaccctggacggaggactcacccacctggcgcccaaggcactttgccttctttgaggaaccgcagcagtaagatcctcactgacgtagtccacgccttcaaccagggcgtctccttcagtattgactggctccccagcctcattgtactccccatagtgtgggggttaaacctcctcctctttctccgcctcggaggtactgctaggaagaatgtcgcccggcccctcaatctcttggacctcaacgtccccttcatgatccccctcctcctggacggctggatcctgttcggtgctaggcaa

SEQ ID NO: 149046 - DNA, 1546 bp, Cannabis sativa
  modified_base (1506)..(1510): a, c, t, g, unknown or other
gtgtttttccaacctcaagacatataaaaccaatgaaaagagccactcaaatgtggaatgatatgctacgctagctagcagtgttaactttttagctaaaaatatggtattgttcctgataaatagagggaagaagcttgtcaaatatattttttgaacaataagacactgctcccaaatgagaaacaccaccaaacggtgatggactactttgggcaagcagtgccatatttttggccaaaaagatagtatattttccaaaataagaaaaagaaggaagaagttggtcaatgtatatttctaacatcaaaacacatgaattaagtgagagaaactaacaattagtggtaagagtccatctttttggcttaaaagatggtgttgctcccatatcctttcacaagtttttgaggcccaaacgaataaaatattgttcacaaaaaaaaaaaaaaatcaaaacacaacccaatgagtttaagaacaagtaaaggcaagcaacaccatctttttgtccaaaaaagatggcactgctcgaaaggagcgggaattctcttactacactcgtatccttttagtaaaatagtcataactcatttaattcttatccaaatgatgtagttcaagttgcattggaaagctctttccaaccggaactaagtttgtatcgttgttcatatcacaattttgacattttcagcctcaaaattagattacaagacggattgcttgtccgactcgtgaaatgaaaggtttcctcgaagtttcaccaaaggcgagccacatggagttgacacatgaattgtgctactatcctagtggacaaaatcccccaaatacatcatgagtaagcagtaccacttcccatggttttttgctcgcccaaatccttatcctcgaaaaggagaagctcaccgacacatattagacatatattttaagatacacttccaaaagatatttattaagtaatttattaccttgattcaaggagagaatcaaggtacgaagtaaatgctcaaattgtcattaaaaaaactgtaatatcccaataagcttaatatttaataattagggtttatatttatattatgagttaaccaagtaataagtgggattatgatccgactaatctagttcaacataaaattttaaattttctataagtggataaataagcgtaatttttaaattacggagatctatatagcatatgtgaatgtaatatgaactatatgtggaataaaaatattttcatgtttggcgaccttggagacttgatcggaggccaaaaatgtcacaatggatttagttagtagttttaattggattgttacagtaagttagctttagaaattattggggtattttgagatacttggagtgactaaataccttaagattagagatttctagtgactaagaaatggcaaaataaccaattattaactaattttactattattgttgttgtcactgttgtagttattcttattattattattattnnnnntattattattattattatcttattattattattatt

SEQ ID NO: 149047 - DNA, 685 bp, Cannabis sativa
aaaaaatatattttagttgtaagaagaaaaatattacacaagatagaaatacaattttaacccacacacaaaattaaattacactaaaattagaatatataccaaggcgtatgataccaatcctagacttcacacaccaaatccttacccaaacccccaaatcttaccatcaccatcaccgtcaccattctcgtaacctcaaaaataaacataaatatatacatataaacataaatacgtatatattattaaaattatatataaatataaaatacatatacattaacctaaaatacatatacatatacatatacatccggtctgatttggatgggatatgaatatggttgatttgaggatttgatatatattagagattagtgggtttaaatttaaggataatgtttacaatttgagagatgatgaaatacaaatttaatctttatatatatcaatatatatacctgaagaaaaattttattggagctttggctggtatgggggagcttggacagagcttggacggtacttccacaccagtaaaaattttagatctgatgaagtggcagaaaccacttcagctattgaagactgtttgttctttgccaaccatatccactctccaagaacttgcttttgctcaccatcccaaaggtctcttctttcactgtttcacacacacaca

SEQ ID NO: 149048 - DNA, 619 bp, Cannabis sativa
gtatccatgttctgttctttctcagagattccatctctgtatccattgccttggaccatttcttggcatctttatcagtcatagcttcctcataagtcttaggttctgtgatttccactcccatagcataaaagaatgcataggctagcacttcttcccaagcagtgaaagtaaacctctgtgtaggtttaggaacccttctatggtcaattggtaatcttgtattgcctcagtttcttgcctttcttctagaataggttccacttgaatgttgtcatcctgaacttggtcatttctttccaagttttcatctccttgagtgttttccacctgttctggttccacctgaacagtattaggttgagtgttccttgtttgtatgtctacagatgtgcctgcagggttagtgtctaaagtaggactagatacagagttattattagtaatgcaaggaaatgagtcttccttaaaaataacatccctactatttataattttaaacccttgtttttctcttacccataacctgtagcctttggtgccttcaggatagcctaggaatacacatttgagagctctaggctccaattttcccacactctgatgtgcataggctgca

SEQ ID NO: 149049 - DNA, 642 bp, Cannabis sativa
aacagcagtgattttcttcatctacttttctcccgccatgatgatgctcaattagagactatcctcactctcatgtggtttatttggtatgatcggaataagacactacatcaatcctatactcttccacaatctgtccttttagacaaagcaatggcctatctttatgaatttcgtcaagctaacactactgctcaaacccagcggacctcttcactcagagatcaaccttggcagcctccccctcacggtttgtacaagctcaatgttgatgctgctttagatgttgataatcaaaagatgggaataggtggtattattcgcaactccaatggtcatgtcattgctgcaatttcttcgccaattaaagggaatttcactgtcaaagagatagaagcaaaaaccatctcctactgccttaattggctgcatcacattggttgcccgatccacttcattgaaactgatgcgctcacagtctctcagcatgttaatactcctcaacaacattatgggcgattcaacgacttaattaatgatattatttatcagatgtcctctttccccggtatctctattagttatgccccacgaagcgctaactttgctgctcatggtctagctagatatgccttaagggtg

SEQ ID NO: 149050 - DNA, 596 bp, Cannabis sativa
cacactttttctacctcttccattatttcaatgattttctccacccccatgtgttgatctagtacatctccttcccaaactacccccagtgctagctaagcgggtgctttgggttcaactggattctcttctcagactacgagaacagttttggttaagacattatagcagtttctcacacttttctaattacccttgattattgtgatgcttccagtctcacttgggaacttcatacacaaatagcgaataaaagttacacttccaaagtctactaagacagtcctaggataacattgtaggtagtgggacattccactaccacaaaggtgtagtatttgaaggttgatactatgttacttccaaaaatttctccatttagtgtaattggaagttgtatttttcctattggaatcaatgtatcttcgttgaagccttgaagttgaactggacatgatgttaattttgtctccaccagacctatggcttcaaaagaagctttgaagagaatgttgacagaactcctattatctacgagaattctggacactctcttatttgcaatttgagcttctatcaccaatgggtcattatgt

SEQ ID NO: 149051 - DNA, 654 bp, Cannabis sativa
  modified_base (39)..(41): a, c, t, g, unknown or other
  modified_base (110)..(118): a, c, t, g, unknown or other
  modified_base (434)..(437): a, c, t, g, unknown or other
  modified_base (596)..(606): a, c, t, g, unknown or other
gttaaagtaagcttcggttggatgtatggagtatgcatnnnaagggactgatattgaacttggattagatataataaacttaccatactatctattcaattcaatatcannnnnnnnntcttagatcaaatgatctcaatctgagatgcataggttctagttcaattgtattatttgtgttcttcaatctgttcgttaaagtaaactaatggatcttctcttgacgtatagatcaaggacattgtagttcaattgagtgggagcactaatcatagatacaaaatctatagcttctatctagacgtagaagtgaaacaatgatttcctttgagcttggctaaatagagataaatggctgagtactcatttcagtgattatattagttcactgaaatatcatttataggttgttaattattttaaggataaaatannnngaagggtgtaacggtaaattttttgctactcaatgtagatcatctatagaggataattgattattaagattataacaaatggataatttatagcgtatctatatcatgaaacatatagagtgctctacataattgagagtgtaattctaaatctatagnnnnnnnnnnnggaattaataagttagagaattttcttggtaaattctagatctactta

SEQ ID NO: 149052 - DNA, 644 bp, Cannabis sativa
aatgtcatctcccactatctcccaacaatcttgaaaaaaagaaactcgaataaccatccgggcctagagctttgttcccaggaatgtcaaatagtgcacctttaacctcatctttagtaaattgcatcatcaggttctcagcttgctgtgtggacaaaaccgctcctctgctcacaagcttctttagcactggtcttctgttagtcaagcttgttcccagcagttccttatagtaatcaacaaaggctgctgagattagatttggatcagtgattctggtgccatgcttgctttctatggagaaaatctgattttgtcttgctctttgcttaatacttgcatgaaaaattgcagtatttaaatcaccattttgtatccaagtgaccttagccttctgctgtaaaaaagctgtatagttctgctgcacttgaattaacttagctctagcagctatttctccatcaatcttcacaacatcaagagggtcttgctgtagttgttgttgcacactttctaattcaccgttagctctctgtacagccgtatgcatattagaaaaaccagctttgttaatctcttttaggaccggtttaagagatttaagtttagagaccacctggtacatctttgtaacaccctaacta

SEQ ID NO: 149053 - DNA, 597 bp, Cannabis sativa
cagtgaacatgtcactgtcgaactactttctattgtttgacacaatcttctgtggatgttcgaatcaacatatgatgtctttgactgtaaaagttagactttctttgggaggtgattgttgcaaggggttcatcttttgccaacttggtaaagtagtctacaacaactacggaaaactgcacccctgcttttccctttgggagtagatcaataaggtctatcccccatactatgaagggctaaggagactgcatcatcgtgagctcattgggtggagctctagggattttttagaatctttggcacttgtcaaattttttgacgtagtccatcgaatccttgatcattgttggctaaaagtaccccgccgaagtatcttttggataggatttgccccctggcatgattgtcatagaagtcttcatgcacttctatcattagtcgctcaacctcagccttggtgacacacctttagagcgacattgagaaactctatctatacattactctgtgtaggattagatacctagcaacctttcttctcatatttttgcctcattcttgctttcaagcaaggctccagtttgaaggtaagct

SEQ ID NO: 149054 - DNA, 583 bp, Cannabis sativa
ttatgccactaaaaactaaaaaaaaaaaaattaaaattattgattattgggatgccgcttacaaactcaaaactttaggtacttatgtcgctatttacccgtagaataattattttagatgtagtaatgacacaattgtaataacatgagaatatcataactaattattaagtaaaaataactcttactaaaaatatgatatttgtaattatattgaagagagaatgcaaaagagagtaggatagaaagttctcttaacactcagaaaatgttagttttttttttttacgtgagaaaatgttagttttattgtaaataagatttaactaaaattaatatagatatttttttattctattgcttctctctgtcatgtaagccgtaagcgttaccgccgcctatttttttattttcatatctttcattttctttctctcatctgacttttttttttttcattttcatatttttgggtccctcgtggtgctcttggcatggctctttagtatcaattccgaaatccacaaaactcacattctttgacttattctcatcgaacaaaaggtccaacgtcgacagctgc

SEQ ID NO: 149055 - DNA, 524 bp, Cannabis sativa
  modified_base (498)..(498): a, c, t, g, unknown or other
tggactcactatcacgtaatttgaccgtcactggctcaacaagttcttgaaccatcctatctatctcattagtagataacgagccctggcagatcctcgtagtaggggctttatcctcagatatcgaggtgggtatgaagctgttgcttcattcaagctcatcagcaaaggtccctcctcgagaatcaagcatttggctatccgacaagtcactcatttgaatgatagaagatcttttcagtgtggtgaaagtgcaaaaaaaacaaagtgccatcacccgcacaaagttcagaaatagaaaaaagtaagagaactaaccagacatctcgagaaattgttgggtgtatctcagtaacataatggtcatatcgctacatgagaattaaggtactaaaatgcaccaaccatttcgagaatatagtcaatccttgcaaaaagtaagtcgtaaagttaaaactaactgtgtgttggaagtattttaccaagatctagatttantaccatgtatgtttcattaacatcct

SEQ ID NO: 149056 - DNA, 1211 bp, Cannabis sativa
  modified_base (617)..(618): a, c, t, g, unknown or other
  modified_base (1020)..(1023): a, c, t, g, unknown or other
atatggtccttcccagttaggtctaagtacacttgtcgtattgtctttggtgtttaagaatacccttctcaggaccatatctctgacgaagaatttccgagcccttacttttttgttgaaatatcgagctactttttggttataggccatcaacttcaagttttcagtggctcgtctctcttcgatttcatcaagtgattcggctaggagtacatgattggtatcttgtttgaacatcattcttttgtgggatggtggctcgaattctacaggcagcatagcttcatatccgtacgccatagcgaatggtgtctgtttggttgctgttttcgcagttgtctgatatgttcatagaacttcaggaagctcttctggccaatttcctttggtatcttcgagttttttcttcagtgtatccctcaaggtcttgttgactgcttcaacttgaccattggcttgaggatgtgctactgcggagaaacttttgatgataccatggttcgcacaaagtgagtgaaggattggctgtcaaactgcttgccattatctaaaactattttgtacggcagtccgaaccggcagattatgttcttcaaaataaagtcttgaactttctnngatgtaatggttgcgagtggtttggcttccgtccatttagtgaggtaatcaactgctgccactgaatactgcactcctcctttgcctttgggtaattgtccgattagatcaattccccaaatggcaaagggccacggactctgcatctgagttaactcgttaggtggggctcgaggtatctttgaaaatatctggcattcttcacatttcttaacataggcttttgaatcttcaatcatcgttggcctgaaggaacgttgccttagaattttcttaaataagctttgcccggcggcgtgatttccatagaatccatcgtgcacttcagataggagtcgtgcagcttcttttggagtaacacatctgagcaacgacatggagaatcctcttctgtacataatnnnntctactatgatataccgtgcaactttccttctcattttttgagctttatttcgtttatctggcagtttcctaaagtcgaggtaggctgctattggtgtcatccagtttggagaagtatcaatcctttcgatttcttccgtgccagtgatgctaggctctttgaggaactggataggaaccaagttcgc

SEQ ID NO: 149057 - DNA, 595 bp, Cannabis sativa
gaccatattaccaatagtattttcgtttatgttaattctttcaaaagaattatgtaagtttgggttttcattaaatgaattttgagtcattcactttgacaagtaagttttattttaaaattatttagggcatataaatattaatcaactagactttataactatgtcatttaacggagtcaaatatgatgatataaggcttttattacgtaagttttgttatgttcaaactataaaaacaattattgtttgggtttcagaaaaaaaaaaagcaaatattgtttttttaagtagttgttctaattaattagactctaataagtaattaattaaagtcttattgcttattggttgggctttaaccttgattaccagtaattaaagtcatagacgtgccttctctaatttagttgaaataatgcctccttcaatgtttttatacaatgattaatatgtaaccggtcattaacgattgaatttttactagagactcagttggaatagtataatccttctatctaattctgttaaaattgactaaagttgactgttaaattaataatgtggcattatacatagatagtagttgaaaaat

SEQ ID NO: 149058 - DNA, 1134 bp, Cannabis sativa
atttagccacatacgatgcttaccacttttcttaccttagttcagaactcaagcgtacgggctgacctgagtggaaaacaagctagggaatcccgatcctatgtaacgacatcaaaaactcactaaaaaccttaatcaaatttctgataatagactttaattctcataatcggacacaccctactttcccccggataaaactagcttgaacatctctaaaacaccctgaatttcactctggaagataccccgaatcagatcgaacttgaggagaaaaacccaaaatcccctctgctggccaaactggtcgtccggtttgccaggtgcctgaaaaaccggttcaccgcttttccctgggtagccaaggaaatttctagtttttcaccctaaaaactgattcaacctccaccaaacttgctcaaaccttccaaaatagtttaatatagcaaatataacataaccaaacaactaattcatcagaatttatcaattttctaaaaatcacactttaaagtgaagaccacttaaaaccattcctaacatgctcaaaaacctaccctaaatacaccctaaaccttatttaactcacacaaccatcgaattataaaaccctacatgaaaacaaactcgaaaaactaatgttttcaatccaaaaaggttaagaacctaccttcaagctcttctagggctggttttggcttgcacgaatgagaagaagagaagaggaagtttggtttgtttccttggaagttgttcccttaaatagggttttttttttcttatttttattgttgctttatttttattttattttttttaaagtcagcccataataatataaaatacatatcctaaataatgaccaacttaccctccaagaaacttaaattctaaaaataacctaggggcattttggtaattttactaatccattaaaacgacattctaaaattctaacctagttcgaaatacactcaaaataattcttccatcaatgtcatgacatttctgaccataatgctaattttccatagtttgtcgggcctgataaaatatttttatttcaaaaatggtatcttcgatacacacatatcccaatataatcttcgtaattaataaattacgctttatgta

SEQ ID NO: 149059 - DNA, 1219 bp, Cannabis sativa
ttttgtatttttgtattttattgtgtatgtagaaactagtttctatgttttccatttattattatttttttttgtaatcttcattgttattgtgtgacaaaattgattgtgtttggttttcataatgtttattgttgttgtaagatgaaactggtttcggtttattttttattttttttaattgttcagatagaatttcattcctccaataaggatgcaacaaaagatgttgctaaagattcaagtgctgactttgagaagaaactttctctaattaaaattaaaattttaaggaaggttattcacaagaataaaaaaagtaaatctgatccaaattttaaggatttatcattggtatgtatttttttgaagtatatttttttttttaatttatcttcttatgtatgttcaattttttagttggttatactagataactgattttcatgtttaattgttgttttacgtaattgaggtttaagtttcatttttattttaggaaactagttttactgtgtcagatttacgtaatttgcttgctttatgtaactggcaattctgtgcactttttaattggttgtttaacataactaggtttagtaatttaaatttaatatatttatttcatgtttcaatatatctttttattgttttatttaggtttcttatgttttgtttttatattaattattagtttttttaattagctatctaatataattggttcctccattttttttaagaaatttgtttttatgttttaatttatctaatgtaactagtttttataatttaattgttagttttttttaagaaacaaatttttatgtttcaatttatcttttgattgtcttaggttatattggtaactggttttcctatttagttattatttttgttgttttacatataactgactctaacattttaatttttaattcagttgatttaaataattggtttttcagtaatacttgtaactagttgattatcgtaactggtttcagtgtgtcaagttccaacgtctaacaccagtgacaactctaatgtctaacttcggtgacttttcagtaataaagataactttgacgcctttttagatgatttttcgaccacgataacaacttcggcgaatattctaattctattttttatttttttttgtggctaatattttattttagtggataatgattattttgtgtagtgttgtgcattg

SEQ ID NO: 149060 - DNA, 960 bp, Cannabis sativa
ctcgtaggggcgtggttgatccggtgaatccacaggcggtggatcatgcactgtagaacctagggaacacaagggttccgccaaccgtaaatctcggacaaccattaactgtgtgtcacagtatgacgactcctgtgagtgaaatcacgcctggcgtgcaagagactgggaataccagttcagtagccaaccagggcattcataacatagccattccgcccactaccaatgttcaaacaaccattggagatgacactaaaatctagaacctccgtgctgctcttggagtcatgcagggtcatagcaacaccctgcatcatgatcaggaggaactccgtgctgcgatgaatcttgcatttgaagagcagaggcgcatgttcgttgaatggagagataaggagatagaaacattaagggctccgcaagcagtcattgacgaccgtagtcggtaggccactgtgttgataggaaaagcctatcagactaccagacaacagcctgtaatcgtcatccccaaggaggaaacagacaaagatccaacgatgaatacctctcagactataaatggtcagccgccaaaatccctggtcacaggttccacctgtgggccaagttgtaggcgggcagactttatctcataattcatcaggagaagtcatacccaataattccaacaaacttaatggtgtcggtcagcaaattagccaaaccaatcagtcgcttaggcagccaggcatttctgtatttaatagattggggacgactcaagatctcagcaatgatctaaataggaggaggggagtggacaatcaacttgacgtcccaatcgtgcaacctaaaaccagtgctcaaaatctcgctcaaagatatgctgatttgactctggtcggccaagaggccggacaggttagtccaaccgtgcaggcacagttggacgaactaaaaagtatgttccaaggc

SEQ ID NO: 149061 - DNA, 552 bp, Cannabis sativa
tggaaccaaccgtaaaaaaaactatctgatgataaactaataattcatgcatgatgatgtattatatattccagaatttaaattcaatttgttctctgttaatgcttatcttgaacattgtcataacaaattcatattcacttatactcaatgtttgattcaggatccctccctgacttctacgattgggatagctaagaaagttggccaactgtttttctttgaacaagagcggcgttttctcacttccaatgtttctatctttgcaaactcttgtactttgaaggacccctggcatcttcgccttggccatccttctatgaacattactagtattctaaataaaagtttgcaattttgtgaaaaacctttggattatatgtgctctatatgtcattttgctaaacagaaacggcctccttttgtttctaacaataatattgccaatgctgcttttgatttaattcaccttgatatatggggaccttttcatatcattagcattgaaggttatcgatattttttaactattgttgatgatttttctcgtta

SEQ ID NO: 149062 - DNA, 806 bp, Cannabis sativa
atgcacgatgtttttcgtgcaagaaagatcacttgggtatggcacgtcttcaaacttccttcctagaatggaagaattgcatgaagtttgaattattccctgtggtgctttctccttttgatcttttcaagccaagtctaagcttgacttatcatgcaatttccgccttcttttaaggaagccaaagctttcctcataaaaattcaacgtgactcttgcatgcacgatgtttattgtgcaagaaagatcactaggggtatggcacgtcttcaagcctccttgccagaatggaatgattgcttgaagtctgccttactcctcgttgagctgtctccttttgatattttcaagtaaagtctaagcttgaatttttatgcaacttcaactttctttaacggaagccgaagcttgcctcataaaaattcaacgtgactctttcatgcacaatgttttttcgtacaagaaagatcactcggggtattacacctcttcaaccctccctgaaatggaaggactgcttgaagtctatcttactccacgtgatgctttctccttttgatcttttatagcgaagtctaagcatgaattttttcgtgcaagaaagatcgctcggggcatatgtgaatggcattactggttagatagtgtagtaaatatgtatatcattactttatattgtgttggtgggattggctcacgggtgctctactgtgcaggaaagggtaagtcattagctgatcaaccatgagtttcaggagcagggcgaacaatgtacatgttcgtgccatatcagaccaagcgggtta

SEQ ID NO: 149063 - DNA, 631 bp, Cannabis sativa
  modified_base (351)..(351): a, c, t, g, unknown or other
agacttataaatttttaaaatcattaaaatttatatataaaattacatttaatttgatacacgtgcagggcacgtgtgtctctactagtttatatacaattcaaaataaatttctagctaactataataacaatcagtagcaaccaaaaatattattattattattaggggaattaccccatatactatttttttaacttttttctttaatttatggtttgagtttctaaagtgcttgcagcactagttgcaatagagatttctatatgattttttgttgcaatttaggttgcaatgctagttgcaataggggtttctatgtagatttctgtaaaaatgcaaaaaaaaaanaaaaaaaaaaattggtttgaagtgttaaaataaaaaagtcccttattattattattaacaatcaaaaaaaattttattaaaaagaacaaattaattctctaaactaataaagacatatttgaaagtattaaaaaaatattgtgtcaaaaaataaaatccaaatacgacccatgtaatccgtttataaatggtggagtgagataggatgatgacaataatgacattgaatataatgataagatacggtgataaaaacagttttgaattaacgtagtcccga

SEQ ID NO: 149064 - DNA, 823 bp, Cannabis sativa
  modified_base (225)..(226): a, c, t, g, unknown or other
ccaagccaatggcagggccacacggcgttgattttggcaggggatattttggcccaaatttggcctttttcatgggctatttcaactttaaaatgccatttttcatgctttgggcaatctttttgtcacctttattagtttttttttttttttttaatacaaatgctatttttacaatcaaacacaaaccaaattaaatccaaataaaatattttcaatataaannatatcacaataattttaatgaaaatatttattttaaatctaattaacttgtaagtcttttaataaaaatattgtattttcttaatttttaatttctttttctccattatgccataaatactaattattatttataaacaatgatagaattaaatcttaacaaaatattttcaataaacaaatatataacattgattttatgaaaatattatttaaaatttaattaaatttgtattcttatactattaaatatgtaatatttaatttgtcatttaacacaatctccaactagcttatttgctagtccctagaaatttaagcgcataacaaaatattatcaagaggaacaaatcaaaacaaactcaactttattaaaacaaaacaaaatattagtgtaaattctaaaaaatactatataatgatttataatagttaaattctagattttgtgtgtgtgtgtttcaaatcatattctttgctttaattcattacacaaataatatcgaaaaatctttaaagtaaaaagtctcaactctaaatcctcacaggtattaaattaaatatttgaaaagaaaaaaggttgtcactcttggagttg

SEQ ID NO: 149065 - DNA, 827 bp, Cannabis sativa
cccccactccatattttattttaagacaaaaataattagcctttaatataaaatttctctatatacctatcatacacctatcaaaattataaaatctttatatatttttttgctagttttttttaataaatcatagaattttaataatagcaatcaactaaaataataatttgcaatccaatcgagacatcttctcgttggagacacgactaatattaaaattagaaaaatgagccaaataatcaatcgcctaattcacatatcgtttgaccaaaaaaaaaatatagatgaaaaagattgcagcatcacaattaatcttaataatacatatattttatttcatccacggctcaaaagatacaacattagaaattattgcgggaagttcattcaatctcgtaacttaagcactcaactattgtgtaagagcatctcaaatcatgctctctaaatacactccatagctaaaatagggagtgagtctaaaaaaataagctctaaccatgaaaaaaaaaatggttctctataatagagaatagatagggtgttccctaaatgtagagagcttcctatttttttgctaaattactaaagtagggagcatgcttggagcaaaaataataaaaatagttctcaactttaattttttagctattttaactaaatttgggtaagaaattagaagcaccattggagatgctctaaggtatgtaattgcgctactaacaaccccttcaaccgctgaaaacttgttattaccaactactaacaataatttgatgtcgagtcatcgaagaacaaagaataacaaacaatgaaacaaaata

SEQ ID NO: 149066 - DNA, 717 bp, Cannabis sativa
  modified_base (662)..(667): a, c, t, g, unknown or other
tgtacaagcacaaatttctcgatatttggccttgtcggattctttcaaatgtcacgtttcgtcttgtggtctcttaaaagtcgttcgttatacccacactttccaggtccaaacgtgaggagggtgtattagagctagtcctttactacaaaagttaaaattcgcgacggtcctaaaaatactttttttaggggaccgtcgatgaaaatattaagtaactgtttaaaaccgtcgagaaaaattagtattcctgacggtttataacaataattacaagaataggcgacagttttaattggaattcgtaaaatttattggacccttataggcgacggttttaaaccgtcgggtgtaatagcccaataaaaaatcgttacctacttctcgccacatttcccacgtgcctacctacttcttttctatttcccacatgcccacctatttcttctcacctatttctactccattttccacaccctaaaacaaaaatcttaactctccaaaaccccacccactcatccgaaccatcgctctcctctctcgccgtcttcctccctctctcgatctttcttttttctcgtctctctcgcctatcaatctccacccatccctcctcccgccagtctctctctcctctccgtcgcatacgtcggaccaccacnnnnnnccgtcggtgtccctctcatctccatctcatatgttggaccaccaccacct

SEQ ID NO: 149067 - DNA, 623 bp, Cannabis sativa
  modified_base (30)..(46): a, c, t, g, unknown or other
  modified_base (158)..(160): a, c, t, g, unknown or other
tccttgtttgattacatctcagatggctcnnnnnnnnnnnnnnnnntctggttaaattcatacataaaagcacatttaaccccttactattgtttctcatggatatcttgttgtgacattatcttagtctgaaactgtaagttccttctagactaagnnntcaacatagcaatctagtattaaccttaatgtaaaaaatacttgcttaagattaagtaatcgttagagataccataaaacatttcatgaggattaggaattttgcctaaatcaatcgaatagactatgaaaaattctactatcttatcctcaaaattctgataagttatttcactactacaaaaaaccccttttaagtccattaaagttggactagataagtctttggaatctcttttgtgttggacattatatccagggacataaaaagggtatttttctagtccaacataattggactagaaaaacatttctagtccaacattaatagacatgatatttgaacccacaataggaacccctttctaggccaactttgctggacattaatctatatttttaaaataaaaataaattataaataatttacatatatatattttcaaaatattaatttacaaaat

SEQ ID NO: 149068 - DNA, 729 bp, Cannabis sativa
ccttgtacattagcttcaccattcttcacaaacttaagacattttcttgtacacttttaatgtacttgacttgcttcattctaccgaaaaaatagaaatgactagaaagcattccaatgagctttaaagttcatcaacaataataatcaatttttttatattcagctgcaataaacacaacaccacaaaaaaaataatagcatttataaataacttataaacaacgatatatcaacataatgattaaaaatctgtacataaaactcattaatagttatggacttagagcaataacaacaatactaaaagctcaactcaataaaaaaaaaagtactattatagatgtcctcttttattagactagtgaaaacccaactcttttgggtatttcatcaaatatatagtatgggtgtctttatatacatatataatatctttatttatatacatatacacacgaaaaagattcaaactcccaatataatatatgtatagaacagagttggcaaccattcattaatttacataataaaagttcaactctcttagatgtttttcaaatagatggcagatgtataaatttttttatatatatacatataccaaaaaaatctaaactcccacaataatatatgtatacaatagagtttgaaacgattcactaatttacacaaaacaaacaacggtaacatcaaaatctaagcatctatttccaaaaatcaaacaaat

SEQ ID NO: 149069 - DNA, 590 bp, Cannabis sativa
tagggcatcaaacccaacaggaacaacgtcgctggagtcagagaagagccagagatggagaaacctgagagaggcgacgctggaaaaacgccgttggaagctgccacgcgctgacgcgtggagatagtcgctgcggatggagtggctctagggcccacgcgcagctcagatggtcgtcggatttttgggttttgccgatcggaggtgggagaagcttcttgggtcggagttaagaatagaaaactccttttaattagttttctaagataaagcctccaaatcctaattttaagaaccctaattttaagaagggaaggaatgaaaaaattctttgagaagcttttacatgctctgataccatgtagaaaatgagagaaatgatttttattttctaaagatttattttagtatatacaaatggtatatataatacaatgtgaacacctaaaacactagagtaaatgaaaaaacattaaatgtaaatttacacctagcttgatttcctacacctatttatagtcaaccacctagggttaggttggctttatttggcattaaaataatgaaaaaataaatggtaaataccctac

SEQ ID NO: 149070 - DNA, 1201 bp, Cannabis sativa
aatttggtatagaaatttaaatagtgtggtgtttataaaaaaaactagtggagtgtacttattaaaaattaaattaataaactaaataaagatgtgaaggtatttattttagtcatttcacaaaaggtgaaatatataattataattatggggtgtttatataattttgtgtggtgtaaatataacttttctattttatttatgtatattgtatatatattaaaaaataaatgttaacgcagattttcgttaactaaatttgagcatcacaataataattccacacagaaaaaataaaagctatagaaaaataatgtatgaacacagggatttttacgtggttttgcagttaaaattttgcatagtgcacgagtcaatcttattcaaatttctgattgtgttactttttttagggcctctcttgtataagatttttttcgtcacttttttgagcttgtctgccactatttataattacatagtggacaataaattacaaagttgaccagaatttgtttacaacaatcatccctaaaatcatgggatttgaattacatatcatgtaatgtaaatacggtttatgatttgaaaatcgtatagctgtgatttttctacttttatttggtcaaaatgatcgtaaattaaacacgtctttaatggttgtatttggagatgtcttgacagaagcttggttccagtgatctcaatagtgagcttgggccatttttccttccgagatcaacgatacatgtcttgcgacgatcacggttcttatttacaaagagttcttcgaggctcatttgaatgttagcttccgacctgccagagttgtaagccttgctgacgttaacttctgactcgccagagttgtaagacttactgacattagcaggatgaagttacaggaagccttcccatagcaagacgatcacctcacttacttgctcttgagccgatctgacttttatacttaatttgtcattgcatgctaaggactttcatggttgatacatgtcgctttctccggtgcctcactattcatatttagcgacatatggtttctcgctaataaactaagtgctagtttgtacattgctttctagcctaagaccttacagtcggcagattacaaatatactctgatacttacgtaattaatgagttattccataaaaaactatcgcatcgattcacattccct

SEQ ID NO: 149071 - DNA, 1216 bp, Cannabis sativa
  modified_base (559)..(572): a, c, t, g, unknown or other
tgtatccttatggtatccaatatcatattaatatggcactttataagtggttagcgatttattatattatttattaaatcaaaatatttaggactcaatatatttttacactaataacgatatgccactttttatagtacttggcactataagatgccctttattatttggcccctccttattttgtcgtctggttctgcctagattttatcatatttgcaagtatttcatatcgccaatacaatataaaactctttaaaaaaaaatttgtaacatatttagttttattaatatactaaagtagtttatataaagttggtttacagaggtctaacagttgtttctctacatattattatgaaggtacaagtaattatcgattagtgacaaaaaaaaaatactgtcaaatagtttcgtatagatacacattcacatttaatatttggaataattacacaaagcaccattttttgtaaaaaaaattacatttttaagtttaaagagtttttattacatttttacggtttttcatagaaataacatgaaaacaacaagaaannnnnnnnnnnnnnacatgaaaataacatcaaaataataacaaaaaattaatatgcatataacaaaaaatcaacaaaaaattaacaagattacaacataaaagaccgtattttctgtaaataaaatcaaaaaaccgtaaaaatatttaaaatttcgtgaaaccgtatttttgtaattttttttttatttttttgtgtatttgtgaaattatcccttaatatttttagttgcaattaagttgcccattagttgaataatagttttgctactaaaatatcatagtattataaaaacaggactcaaaattgtcaaatacgcgacctaaacagataaaacacgattgttgtaatattcatttgtattaaatatgtagaattattagttgttttataattttatgctagttggttcacaacaaatataactgttgcactacagttttatcacagttgtcttaaagttcttctttcctttttagccgttgaagttgaaatttttttcaggcaaagacacattcgacttcttcttcactggacgacgaccaactttaaccacagggggagaaaaattggagtcatcatcgtcgatgattgggtgttttcctttagccttgttagcagctgatttatgacccattttaaaaaaaaaaaaaattggc

SEQ ID NO: 149072 - DNA, 631 bp, Cannabis sativa
tatatgatttgtttgcttgaagtgctgatttcataacttttttttttctcacaagtttgatttacttatatcaaacttaaaaagcctcgatgacatgtgtgtattagaacatgttactattgactttcttgtagacttgtttatattgagtgagatgatatatatatatatatagacaacatctatccagtaccaagtcctaatttttaactacttaagtttaggtggctgattaaacttttcaaatttaggggctctttatttttaagacttatcttcacaaattgaatttctctcttttttttttcccaattattatggtaaaaatacagttttaaacttgataataaaccctttgtacagccttacccaatgagagtacttagttagagattcatgtagtatgatcaataaatgtgtaggtgtagccacttgatattttaggtaggaataatgaaatatcagaattatatctctattttttcttatacaatttttttgtattatatatttattattatataaaattattttaaaattaaataatgcaggtggggaaaattatatgaaaatttataatttttccttttctacatttatgcttcactttataaccgacgcaataggtaaa

SEQ ID NO: 149073 - DNA, 669 bp, Cannabis sativa
aggtaatgaaacgacatgtcgtttggctgacagagcttaaacgacaagtcgtttttctgctctaaaaacgacaattttcaccccagataaatgacatgtcgtttgcccgatagaggcaaaaagacaagtcgtttttcgtcacccctgtcacccaacaaacttccccatgggtccgcgggtctgcaactcggatcggcgcgacccgtttcgtgacccgatcagttggagcattctcggccaccaaaaccgacgacgtttgaggggttttgttccattttcaaccctctatcaatttctatcatctatttttcacaaaaaaatataaaacactacccataaaatacaaatccgaaaatgggtttcacccattgataaactcaatgaataaacttgcaatcttacaataaaccatgcaataatcatccaaagaacaagataaacccattctaaaatatttaaactcattttatccgaaaataatacaaaaaattcatatttgaaaaaaaaataaattaatgggttatctcaaatattttggagctttaaaatcaagtattctagctcttgataccaattgttaaacattcacatagattatgaactatccaaacatacattaaacatcattgtttataatcattaatgtaacgtccccgcttcaagcctcca

SEQ ID NO: 149074 - DNA, 580 bp, Cannabis sativa
gttttggattgttgttgctgctgtaattatgtgttgttttcagaagtttaagcatgcttgattgagtgaattagaataggttttgaggcatgtttagttgcttcggttcaagtttagaattttggctcaaaaactatgggtttcaaggtaaaatgatgattttcgttgctgtggttgttgttattgttaggtagtgttttctgtggttaaattatgttgaaatagattgaattatgcatgatttggtggttgtttgaagggttagtcaagttttgtgtttttgaactcaatcttgaaccttcaatggtgaatctcgtttctgtgtttgaagcttggtttctttgcttgggttttgttatttggggtatttagaacaggtgtggaatgttgcatgaagtttgaggttgatttgagtgagaatcgaaattttgaagtttcctgcactgaagcggaatttcggttcagtatggcttgcaggaaccggaatgccggttggtgttctaggttccttccagaatcggaattccagttgtagaaccggtctaccagttggggaaaaattgggaaccctagttcttcc

SEQ ID NO: 149075 - DNA, 695 bp, Cannabis sativa
aaatacttagctacttgtaaataatatttcagaaactaatataatttccaaaatgagtgctctatcatttatcacgtcaagcaaaactctaaaaaatctatcgtttcacttctaagtatttcagaagtcatagattccatatctatgattaacactcccactcaattgcactaccgagttctcaagatgtaagtatatgctaattttgtaggtaagttgtaacgaagaagtcaaagaacccgtgcaatacaataaagctagagcttaaccatctcaagattgagatcaaatgatgtttgatcaactaagtgatcttgacttagaaaagatataatgaaaagtttatgatacatttttcactgtcgatatcggtctagtctgatgtatagctgatacatccgatcctagtttactttactaatgtcttgaaaaggatattctacttacccaagtgtaagtaaactttctcgttgattatcacttaagtgtaaatctagtgcactaataaattgtgagactaaataatttgaaacatacaatcacaattactttatactgtgatgacatcattgtaattgtgagtaactatatgtttgggattcaatagaacttatatattaaacctataatggtgtaacaaacatgtgaacaagtatgtaatgttggtttttgtgccctaaataaaaccctttaca

SEQ ID NO: 149076 - DNA, 1394 bp, Cannabis sativa
  modified_base (624)..(629): a, c, t, g, unknown or other
accaccatagtttctccttgaacgtgatgttcgagtggtatggggtctttgagatcccattggctctttcccagggcaatgtgtaatttcctcaagacgatttctatcattttgattattatcagccattgaatatagatagattgttgtttgtaaggagagaattttttgagttttatcactaaggctctcaatgaaagttccaaactgttaatgcagattttcgttaaccaaaattaaatagccttttagtaataaatattctacaaaaattaatgagtaataaaataaattataactctatatatttttacgtgttttgtagttaaaatctacgtactccacaactccttattattaaaaatcttttttcaatacagagtacaacttcagaatttgaataataataattcactctcaattttgtcgtcccttttcccatggaatctgtcccaatttataagagtatagattgacagttattctttttgggatagatttaaatgtaactgttcatgaaacgtgaacaatacccacgtttcatttaaatcgcatgttagattatactaaataactacccatccgttctttagctttatcctttagatggttattgctgacgtnnnnnnttatatcttctctgatttgagttatcttccatgtccatcttgataaaaaaaaatacgcgtgttgggaaggttttcgtctcgctatattccctttatgatatttgtaatgcgaagtgatcttctcgatgtaaaaaatgcgaggcgtcttatgctgatacactcactttgctcggatggttgaatgttcctttcttgtcagtatattccgaggcatgcatatgtctcgttaatctcagataaatagttattattcttatctcgttattgactataaagtcaatgagttttgaatattatctatttaacctttaaataataaacaagttatttaatatgcatttaatgatatcgttattatcattcagaattacttcgtatttcttttcttggacacatgtcaacctctaaagtgtaatcgaatttcgggtataacacaaaatgtacctctatacattcataacatatgtaaaaaactcacctataaatataaatcaagtaaaaaaaaatagtcaagagaaaaaaaaaaagcaaacaacttaaaattaatgtcaaattataaatatgtattctcgcgatttatattaagattaaccaattaatttttgcatgatatctgaataaaattaaaataaatcagtaacttgaaaaaggagtagagtagtataaagtgaagaaggtgagatatatatatatatatatatatatatattaaaatttataataaagtatgtataaattgaaatggatagtataagtattgatata

SEQ ID NO: 149077 - DNA, 516 bp, Cannabis sativa
  modified_base (83)..(118): a, c, t, g, unknown or other
  modified_base (452)..(489): a, c, t, g, unknown or other
tgttctggacttaatagaatttaatcatgaaataaatcatgtgaaccatgcaacataaaatttaatttctgatctttattaannnnnnnnnnnnnnnnnnnnnnnnnnnnnnnnnnnnagggcacaaaacccaacaacaggtataggaacaacgactctccataaacttgtttggattatattagaacttttattagatgttcctttagttgttagaagacttcatcacattcagtggtccattcgaacttgttgtttcctcgaagtacaatgaagaacggtatgcacttatttgtggatttgaagatgaatctgctaagtgctgctattcttccagttaacttctaatcctctttgtgttttctagctgaaggcatgtctagaagagctttgatctgtaggaaatattttaccaggatgtaaatttactaactagtatgttgattaacatnnnnnnnnnnnnnnnnnnnnnnnnnnnnnnnnnnnnnnataagggtttaagaaaaccttacgttg

SEQ ID NO: 149078 - DNA, 728 bp, Cannabis sativa
  modified_base (144)..(148): a, c, t, g, unknown or other
catgcaacataaaagcgatttcttgtttgtgaattttcactaagcaagggcttatttaagaagaaaaaaggatttagggtttgtttattaattaagagactttataagatcatattgaaaaataagttaaatgacaattttatnnnnnaattaattataattattaaatatatagaattgacatttatagagttagaattaaaatacggtgtttgtaaaagaaaagataagttgttaaataaaatggcaaaattaaaactagtggggtccacaatgagaccggccactgaagggatttcaggccattattttaccttttttaattccatttaaattctaaaccttaccctactatctccctataaatagaataagatggctcttattttcacaaccaacatcaatctcttttgttagacaatcagaaaatagaaaagagcctctcttcttcttcttcttcttcaatatttcgaatcccatagtgaattgagagtatgcccactcatctcatagcaatcccttgcatagtgaggaagatccaagttcagatcttgataatgctctgctcatgaaaggaatcaagggctatatatatgaatggaatgagtcattatattctgctgtcaacaatttatagatttcctaatctcttatgtgtttatttcattattttaggaaatttatatttaggatgtagattatagaattataatcaacatacatgttag

SEQ ID NO: 149079 - DNA, 593 bp, Cannabis sativa
  modified_base (290)..(290): a, c, t, g, unknown or other
agtactttaaaaataaatctttagtacttttatttagtactatcgaaactaagagaaaattaaaattagaaagtaaataaagaaacaatgaagataagaagcaagtaaatcaataaaaaaattaatgatgattaaaagttagggctttcgatttcaattgcatctattgattatggtttgacatgattctattcttattaccaaattctatgcaatagcaggtttactaaggtaaattatagtcttctcagatatataaacctcgattacatgcaaattttctactctcntgataaattaaacatgtaaaagacattaaacacagaaactctataagctatccaaaccatataggtactctcgtcctatatcgaaatttagttctctttcacagcataattaacactcacttcaaggaggcctttatcatctcttcgactttacagcagaggaagccttcatcatctcatttccttacaggggaggagtgttcgaattattttaccaggatctagatttactaccatgtatgtttttcacatcataatatgaatttctaaaacaatgtaatttaaacacatataaaagtttga

SEQ ID NO: 149080 - DNA, 629 bp, Cannabis sativa
gttcctgggtaccaaccggccgaccggttttaatggtcccccagaaccggtcgaccggttctgtgctgggaacccaaaaatcgatccccttaaatcaaaacaatcccaaactttctaaaaacttccagtatacctgtttataccccaaccaactcaattcaagcatcaaattacaataaacaactcaaattatgaaaacaccattaaagcttcaattggagctcaaaagctccaacttgattcaaatagcaatatagaaccggtcgtcaaatagaaccggagctccccaaggtgacacacttggtcgggtgaaccctagatccaacattccctgaagttatatcttcagttcttttaattctgcaggtgccattcggtaagtgcttttgaaacaggttctgcccccaggtattaggtcaataataaaatctatctcccgctaaggtggtaatcctggtaattccttaggaaacacgtttccaggaattccttaaccactttaacctcttcaggtccaagtatcataggtttactagaatcaattacaaccgctaagaatcctatacaccctctgcgtagtaaatccctagctttcaatgctgagattcttgggacacgagaaccttgaa

SEQ ID NO: 149081 - DNA, 591 bp, Cannabis sativa
gtttctagttatatttatgtaacccgtacttgtaatctctgaataggtttgcatttattacccttgttgtctcttcttatgttttgtgcttactttaagtaaggttgggggagctgtggttctattaagtgtatttattgcctatcatttatacatataattatacgtattcattccgagagtttctttttatttttgttttgtttttttttatggggtgctttgggaagtgaaaagacatatatactcttaaggatgcttctcgaaatttgagtgcacgtgttttggttggcacgtgttttaatgccaaaaaggatgactcttcgtttctgtttttatggcatcttcattattctgcacgcaatttttttgtataaataggcttctcgttgagctccttctttttttttttatctaagaattttcttcaactcttttttctttttttgggttagttcagttgggtttttcgtttatccttcatgcattatgtcttccttactcaaaaaccaaatacctcactcaaaagagccttcctcctccaacattttctcaggattgcaaccattggatcttgcttttctttctttg

SEQ ID NO: 149082 - DNA, 500 bp, Cannabis sativa
aagaaaaatgttcaaatgcttaatcctagatcttctatttttgaaaaagctcagaatgcaggtcaaagaggctttgctggcattggatcaaatggtatggacagttttggaatcacaaatttgtaaaatctagtgttccaacgaattttcctgatgctgcaaatttgaagtctgctgcaacaaattcaaaacctgtcgttgcaaaagctgcagatgcaaagtctccaagatttgcaaaaagagtaagatctgaggtaaaagatttgttcctacttgtcatttttgtggtagaaaaggacatatcagacctcaatgtttcactagctaaatatgtttaaaacaaattattttgataatttggaaaaatctcaaaaacaaacataaacgtatgaaacaaaaatggattaaaaaaagtgtctagctggtttttctagataaaagtgttgaatctcaaatgtggtattttgatagtggttgctctagacatatgataggtgaca

SEQ ID NO: 149083 - DNA, 751 bp, Cannabis sativa
ggtcttggttggggtatgaatccttgtccgagtctaggtctgggtttgggtccagttctagatcccggtctgggtctgggttcaggttaggtcaaagttcgggtcatgggtgcgggtccaggtcttggtctgggtttgggtctcggtccaaatcaaggtctcgagtttcaatctcggtctacggcttctttgggtttgagtccaggttcttgtccagatccctatctaggtccgagtttgggtttgggatcgggtcccaggtttaggtcctagtctgggttctggtctaggtctcagtcccgttctggttcatgaatgtgtttgggcccgagttttggtctcggtttgggtctagggctaggtctgagtatggttctaggtttgggttcgggtattggtcttgcagttctttttcagtttccagtttcgggtcctaaatttttgtcagggtctgggtttgggtcctgcttctggtttcggttccagttttaagtcacagggtacgagttcgagtcgagtttgggtctgagtctgggttcgagtcttgatttgggttcggggggaggttcgggtccgtatttcggtctcggttagggtatgaggttgggtacgagttccagttcaagtttcagtgttggttcccgagtgtgtgtctgggtctgggtatgtgtccaggccttagtttgagttcgagtttgggttaggattctgttctaattcccagatccaaacactgactacaggtcaggtc

SEQ ID NO: 149084 - DNA, 681 bp, Cannabis sativa
  modified_base (327)..(330): a, c, t, g, unknown or other
tttctataaaaatatctatcttaaataaattattttttaaaaattatacaataataaatataaactaaatttatatattaagttaaataattattcaattatttatatatatatatatattcataactatatatatgtgtgaagtttttttttactttgcagaatataggaaaaataattttttttatagaaagaatttactgtgaatcaaacattatgaattgaacaacaaaacaaacaggtgtgagattatgtaaaagaagaaaaaggtgtgagattatgaattaaatttttttcataatgtattatttttatatcccgatcatnnnnagttgatgtcatcattgtagttcctattgatgttctcaaatttttaaacttaacactcaatctaacgttttgttagttgatcaataaagtgctacatgtaaatatagtattggtcaaactaataattcttttagaaaaataattttaagaaacaaaaattaattaaaataaaatcatattattcaaaaaagaaaaaatattatatacacatcaaatgaaataaaaattaatttttccatcttcttccaggcatattatatctttacagattaacaataatttttttggtaagaagattaacaataaactttgattctcgattcaaatgctatttttcaattctattttcat

SEQ ID NO: 149085 - DNA, 710 bp, Cannabis sativa
  modified_base (338)..(342): a, c, t, g, unknown or other
ttttatctttttggaacatcttgagttgtccaatttcgagtaatagcgagagagttatggtaaaaatactatcagtcgacgcagcagaaaactcaccaccccttctaatcctaagcagaatagattttctaatcctaagctgaatagcttttctttttcaacaatttttattttattttatcattttttggatataaaagaagtggacttcaatagttttgggggggcaattaagagggaaaaaggaatacgaattttagagacagaagtcaatactggaggcattctgcagagggttttcagcattattttattctctttcttaaagttaatatgtnnnnntttgcttccatgaacatgtgtagcaaaacacttgattaggctctagatggatttgtttgacattgctttatggttttattttgcccctaatttttatgtattttatttcattggtgcttaattacttttaattgtctgaccatcaattaattgttttacgatttcgatgcaagatctaagaagtaagtgtcgattatgctatagtgaaatagaactgaatttcgatataggacgagagtacctgtatggtttagatagcttataagtttctgtgcttagtgcctgttgcatgttaaatttatcacgagagtaaaaagtttgcatgtgattgagttttatatatctaagaagactataaattactttag

SEQ ID NO: 149086 - DNA, 573 bp, Cannabis sativa
aactatggttaaactataaaaaaagccatataaagtgtccataatcaattatgccatatttatcataaaaggtttaaaaaacccataccccacgtaaattctacttttgataaccactaaacttactagtgtaataagaaattgggcttcataatataatgagaagaaggacccaatattcatgaaagcccaagtggagtgcattcctttcttcttttataattggactttatgttcacccagcccaaattatgcattgcactaccttaacaatttatctaaatttagataaatatgattaattaaaggtatatttttataaatacttaaaaataataaaaaaaaatacaaaaatatggatcttcaaaagaaagaaggaaaagttttgtttacgaatagataacacgctaggaaagggaaggctgcttctcgggcaagcttggttgctagcaaagaagcatcaacatatgcgtatgcgtacgtagatgaaactagggcaacaagaggatttagctagcctcatttcgtcgctcttgggctctcgcttactcatccctcaatgaacagagtcgg

SEQ ID NO: 149087 - DNA, 502 bp, Cannabis sativa
cacttagtaagaaaatagaaaaaaatttgaaaaagaaaacctctctcttttccttctctttttcggctgggtgcatgtgattcaaaggttgggtttttcatcacatttcaagctagattcatcttaactttgggaactcttgattgtggtatgtatttcctaattgttcttctttgttttcttgaaaaaaaatggtgtattattgagtgaaatgcatgagttatagttgttgttgctgctgtgaatttgtccttgatttcagaggtgtaagcttgttagattagggttatttaaattgttttggaagcatgttagttaggttgagcaagctatagctttttctatgcaaatatgtgatttttgatggaaatgtagtgaatctgtttctgtggtgttgttattgttttcaattgttttcagaagcttaatcatgcatatttaagtagaattaaccaggtttgaatgcatgtttgtgggattcgctcaagtttgagtttagaac

SEQ ID NO: 149088 - DNA, 699 bp, Cannabis sativa
ttattgatagcaagcccatcataattcaatagtttaacatttgagttgttggagctacaaatgtcattggtttctttttgtcttaagaatgcatccacatcctctataattttattgtaactatttaaagcaattatatatgtttcttcatattctgctgactttattaatacttgtgtttgccttctacacaagtctttatagcgcaatcccaatctagctttaagatcctcagaattgatagacttcaatgtgtttactttaattccaacctttgcatgttgtgtctacctttgtaatacatatctatcaagtatttttgaaatattctttgtagaaagaaagaactttcaaagcatatgcacataagattcctgcaaactcaaacttcttacaagtgaacacaaacaaatattcaaccgtataatcaattgactttccatgatgagtgactttgtattttgtcaatattttcgtttcatcacaaatatgcaaagcataatcataagcattgcatacctcaacttaaaataatataaatatcgttggtgtgtatatctttgcggcatgtttcagtatttcagcaagaaaagacaatgacacgttactgtgagaatttaggggtgttcattagaccacatccaatacttttaggcctatccaaatccaatcccattatatattgggtgttaaatttta

SEQ ID NO: 149089 - DNA, 848 bp, Cannabis sativa
cacctactgtacttagggctgagcgtaatacattagttacctttaaagactcctgtcttaatttttatacttggaattccattctcgtggaccgcattgctcataagtttgacagttggtatcctagattccatgtctagataatctgtcacgagtcaattatggtatagccgagcaatatggtaccatggaagataggcaggtcacatagatgcaagctgggatttagaaccaatcgagccttgtgatatattcaaaattacatgttgtagggattttagtgaatattatggtccttctacccctcatctagtgatagctcgccttctagtgattttggtaaatcccttaggtggaaatttacactcctcccctttttaattgtcttttataatgattgtaacgcctcatctcgttttgcagacatgggttacaaagacatcctggatcgtaaggggaagaaaaggtcatccaaccctggagtcaccattgccaccgaggtggttcctcccaagaagcaaaggaaaaccaccactcaaaagaagaagttaccggccgagcctattgatatcgaggtttcggacaacgagattcaagagcaagttcctcctccatttgttcctcaggtcaatgcccctcatctcgaggtgactcccgctaccgattctccaagttaggccatcgagaccctgtcgatcgtagctagagaagctggctctgagttttcctaggcatacgaggtcacttgttggcgcaaacttcaaactctccttcccccagattgggattttctcaatcttaggaatctagaggagatgctttccaggaccttggattgtcacttcatg

SEQ ID NO: 149090 - DNA, 516 bp, Cannabis sativa
ctcttatttcttcaattttcatcaagaaactttctcaattttggtctccaccatgatcgttctctcacatttctctctacagcttttgccaaacaaaaagtcacgactgtgtgcttatttccaagtttttggtaagtgttgttgattgccatgaccttatgttaggccttaggaaccaaatgataagaaccctgctgtagattaatcaactagtagataatctgatactaaatgataagaaccttgttataatttaatcaattactagccaatacaacacacagccaagaaataagagcagaaaagtatccaaactagtagtaaatagcacaaaacacaacgacaagattattatattgagtataagagagtattacaagtgatgggagccgttaggtcgctttgatgcaaagtgttcaacgaaaacaaaaaaaaaaaaaaaagttattattattattataaataaattacctcctttataagccattcaaaatgtaaaggaataaaataaaaaaa

SEQ ID NO: 149091 - DNA, 653 bp, Cannabis sativa
ttccgaaggaccttatcctttttgtcaaggatctgaactggttgttcttcatatgacatgtcaggttgcagctcaagattttcataactaagttcatgatcagggtctgaaacttacttccttaacatggagacatggaatacgttatgaactgttgaaagagttggaggcaaagctaattgatatgccacttgtccaactttctcgagaatctcgaaaggtcctataaatctaaggcataacttgcctcttttcccgaaatatttgatccccttcattagagacactcataggaacacatgatcccttacttgaaactctacgtttttgcgttttggatctgcataactgttttgcctactctgagaggcaagcattctggctttaatctttttaattgcttcattggtccgttgtacagattttggacctaggtatttcttttccccattttcatcccagtgaatgggagatctacacttcctaccatatagcaattcatagggagccatccctatagtactttgataattgttattgtacgagaactctatcaatggtaggtacttactccaggagcccataaaatccataacacaggctcataacatatcttccagtatttgaattgtccttttggactgtccatcagt

SEQ ID NO: 149092 - DNA, 619 bp, Cannabis sativa
aataataatttatattaattatatccaaatacaattaaatataacaataataaataaaattaactaaatataaaatataatcatattgaatttaaaagaaatatctaatttataatttttaataaaacaataaactgtaacaaaaaaaatcgaaataacatataaaaaagattaaacttaaaacacccactagaactttacaaataaatctcaaatacaaacattaatagcccaaatcagatcaataattcaataacaacaatactaaattttaaacagaatattagatttgagcataaattttaataaagaaaaattacacaaactatatataaaattttaatcactcagttagtctcatacagaacccacgtaccgttcagtttgaaactgcaattctccaccaggtttacgctttcagtctctttacagcaaccaaagaaccatctgcaaggcaacattacaaaattacaaaattacagaccacgaacagcaaaatattttcacaatcagcagcgatgaactccattatcgacgatgaaccactatgaacccaatagctcagtcgatttcgaacagccacgaatctcgaagctctgaagcttcgtcatccacgaac

SEQ ID NO: 149093 - DNA, 843 bp, Cannabis sativa
ttggaactagatatgtagctagatacgccgattgtaactcaatctcctcatcagtgtctgccattatttctaatttaaaattatcctgtaaatattaaagagtatatgaaatacatatgaaatagccataaagtctttatagcaaatgcaagttaaaaaaaataataaagcatattcatactagtgataacaccaagtctgaagaacaaatacaattaaagaaaaaacataacaaacatatattaaagtcttgagagcaatacgattaaagaaataacataacaaaaatatattaaagtcattacacaaagtttagaaaataaaggctactattctgaacgatttaagcattataattatattccagagtatactcattcttgagccaagtaagcattaactcaggttcttccaatgaagcaaacatctctctcttctctttcatgataaacaagcgcgttgcaaataaatacaagctgctccctttctcgatttcaggcaaagaatttaacattttcataacttcggcaatactattctcttttctagctatttcaatatttctacttcttgtctccacggcatcagcaaggcgaccaatttgttcaaatatcattacgggccctgtcttcttcatttttccttttccatttttcatttttttattttgtttctcaagtggctcagttgttctcttgctagttttctctttagaaaatctatcaatattaggcatctctatatcatcatcactactctcaagttgttcatgtaaggtttcagtatcattaaaaggcttttcagactcagatggaattattccagatgaaggtgtccaagcat

SEQ ID NO: 149094 - DNA, 845 bp, Cannabis sativa
taaacgccaaggagaagaagctacttccgaaatctgaatatcaatgtgatgaaaagaaaagctaagcagctgcacatcatcattatgacgccaaagcatggccacccctccactatgtcctctcgcatcaacagaatacaatccatcaaaccctaccgcaatccgtagcctttccaacttgtccttccgacaaagagtctcacacaaaaacagaaaattgggcttcttttggataataagatccacaaggaattgataagccaatgggttcccaagcccacggtaattccagctaatgatactcataatgggtggtgggcccaccaatcgcaatgtaacatgtcgagaacactactacaatatgggcctttaacttctccttttataactcattttataaaaagggaagctaaagggtgtggaagcacccacctaattcgaaattgacatttagaggcgattttttggtaaaaaccgtaggtatatatacatattaataaaccctatcccgtcggttggaaattgggaaattttgagggttttttggtaaaccctatatatcgttttcttcttccccacttcttcttccccaccataaccacccaccgtatagcagaaaaaacccacgaaaatcctcgccaaccaccactaaaaacccccatatctctctcatttcttcaccatttcatcccatttttatcttaaaattttctattttcaatatttaatcccatacactaaaaaaattttgttttttgacccatttacactgtacccgaacctattttaaaaaaaggtgatggtatattgtgtgtgctataggtggccggatttttgtcgcaatt

SEQ ID NO: 149095 - DNA, 1809 bp, Cannabis sativa
tattggtggtacgcgaggtatatgtgaaaatccttggcatttatcacatctcttgacaattcatgtgtgtctttgtttatcgttggccaataatatccttaacggataaatttctttgataaactttgccaacctacatgatctccacaaaagccttcgtgaatttccttaattatctcgtttgcttttgtcggcaatacacatcgtaagaaagacattgaataacctctcctatataattttccctccactattgtatagcgaggtactgaatacaagagtttgcgtgcctcgtttttgtttgtaggaagttcttcgctgagtagatacctgagtatgggtgtcatccatgtagtcgaggcatctattatctcaacttcttccttttcacatatacttgggtcgcttaaaatttccaccggtaccagatttaaattatcaagctcattttgtgaggccaactttgctagtgcatcgacatttgagttgtgttctcttggaatttgttcaatcttcaaataatcaaacttctccaagttcttacgaactttctccaaatattttgccatctttaaacccttcacttggtactcgcctagaacttgatttataatcaattgcgagtcactatgacatataagatttttgacctttagtgcttcagccattcttaaaccacccaacaaagcttcatatttggcctcattgtttgaagtgtccaattggaatcttaaagcattgtgaaatttaaagttgtctagtgagatcattatcactcctgcacccgagccattttcatttgatgccccatccacatacaatttcaaattttctgcatcgtgcttgacaagtggatcttcttcagagactatcccttcaattaggaaatcgaccaaagcttgacctgtgattgatgttctcagatgataggttatatcgaactgccccaactcgattgaccattttatcaatctccctaaagaattaggttttgataaaacttgtcttaatggttgatccgttaagacttttatgggatgtgcttggaaataagaccgtagtttacaagatgcatgaatcaggcatagaagaagtttttcaagagtgggatatctcgattctacccttagtaaccttttactaacatagtaaacaagttgctggtggtttctctcttctcgcaccaaggctgcactgattgcactctctgagacaactcagtaaaggtataaagtttctccagttattggtttggccaaaactggaggtgttgataaatgtttctttatgcctttaaaagctgcctcacattctttagtccattcgaacttcttgttgcctcgtaaaacttaaaagaatggtagacatttatcaatagattttgaaataaatctgtttaatgttgccaactcaaatgatcaataaaagttcaaaaaggtgttttctcaactctcacaactcaccaaaaatgaaaaactttacactcaaaatttttctcaactatatgtgttaacaaccattttaccacatgtttggaaagtgcacaaaagaactctaaaaatcacaacctgataacaaaacatagcaaatattgactcaaactgtaattttacaatcatgcttacataattttgaaaaaaaaattgacttaaaaattcaacaagacaattacaattctccaaaagaacgcttcaccagagctcaccacccaaaactcaaaattagacagtgtcctcaatgtcacaaaaaatatgaaatgaaaaaagatagggaaaagagtacacctgattgacgacaatatgcacggag

SEQ ID NO: 149096 - DNA, 1141 bp, Cannabis sativa
  modified_base (463)..(464): a, c, t, g, unknown or other
  modified_base (1097)..(1112): a, c, t, g, unknown or other
cctcgcacacctccccctcgtgcgcgagcgtaggggtatgcattgcacacccatgtgcccaattttatttttgtgataagttttgattcaaaaatcatttttcattagaacaaaatttaaattttggtaaaattttgtgtagaatctaaattttcaaataaaaatttaattatcagaataaaacaaatttttatttattttctttaattaattaaaattagttttagatattagtagcatttgaattaaaaatttaattatttccacaaactagccttatagttaatttttgaatttttttttatttttttattttaattataagatcaaatattatttattttattgtttaaattttaaatgatcttattttgatattaaaatattaataaaatttagacataatctagttaaagtttcaaatttactaaccatattagatttttaaaatttgttatttttnnaatatattttattaaattaaattagaagattagaaaaatgttagtttcaacattttatcttattaaatatttattttaattaaaattttatttttgtcaaataacatgaaattttgaaaagtttgttaatttttaatttgaatggaaattttagggtatggtaaacataaaattttcaaacttagaatattttgttttatttaattaatagataaaattgataatatcctaaccttcaactatcttattttcaattttgtttattttttattatatttgatttattgaattataagattagaaatatctaaattttgaattaagatattatattatattatcttataagatatttaattaatttaaattatttaaataaattgaaaatttaaaaattagttagatatttgaatttcagttagaattttagatatttaggatatttgttagattttaaatatatttttttaattattctcgaacaatctaaaatttaaattctattaagatatattttaatattttattttaaaatagaaatatcttaacctactttccagatatctgttacatgtttattatgtttgtttattattttatttatttattcaattttttttacaaacttattannnnnnnnnnnnnnnntgctatgattaacttgttgatagatctaa

SEQ ID NO: 149097 - DNA, 670 bp, Cannabis sativa
cactaatcagctccaaacatctttcaatgagatccactactctgttgagttagctctctcagatagaagttgacattcaaatgatgttgactgccaaagttcaccttctcaccaagaattacgattgtcagatggagcgttatgtcttcaatagcataaccgaggagatttacattgtcaacctcgaaaagacatgggaaaagctccagctcactgtcagggttattgttcctatcccagtgagatacaccttgcagcgtgattaaatccacatcagcattgacccgttaaaagcagataaatcacaactatgtggttttcaaataataaccgcatttattctacgtgggacgtaattaaatcccataattttagggaaatattgttatgagatatgaatctcattgtaattaactgccaccctatgtaactataaataggggcagaattactgaaaaagagataaaaaatccttgagagaaaggaaccctagtttgtatcagagaaatctaataagatagactcgtggactatgcagagttttaactgtaaaatcacgtaataaccttggtgtgatcttttcattattcttcttagttttattttctattatttttgtgctagttctatcatgaaaataggcttatatcgttaacaaaaatctgcgtta

SEQ ID NO: 149098 - DNA, 528 bp, Cannabis sativa
gttctaggtcccgaccttggttttgtgtccctagtctggttccatgtttgggtttgagttcagattcgtgttcgagtcccgagtccaggattgggttggattctggtgggctcccaattcgcgtctaggtcttatttggagtccgggtcctggtccggttacgtttctggatctaggtctaatttcaattatgattccaagtccaagtcctagttccagtcctgatcaacttctggttttggttccaatttttggtcacaaggtaggggtcaggtcaacttttgggtttggtactgggctcatgtccgggtctgggttcgcgtccttgtcagggttcgggtccagggctggtcccaaacccaaacaccgactacaagttttctcaaagccttgggtccagatccagatccaaatctcgggtcccggtctagttcgatttctggtgccgggtaacgagctgggtcctaggttcaagttaaggtccgggtcgggtactaggtccaagtgctagttctgtttcccaggtcc

SEQ ID NO: 149099 - DNA, 1175 bp, Cannabis sativa
atgttgccccaacattcttcaacctaaacggcatgacattgtaacagtaaagtcccatgttggttacaaagcttgtatattcctgatctgcggcatgcatttttatctggttatatccagaatatgcatccatgaatgacataagctcatgcctagcagttgcatccaccaactggtcaatcctgggtagtggaaaacaatcttttgggtacgccttattcagataagagaagtcaatacaagttctccaagttccgttaggttttgggacgagaacaagatttgctattcacgagggataaaataccttgcgtaaaaagtcattgaccaacaacttatccacttcctatttgagtgctccttgtctctcagattccaagggtctccttttctgtctctttgctgggtagtttagatgaacgtttacatgatggcagataatcttagggtcaatccctatcatatctccatggttccaggtgaactgatccttgttcgcccttaagaaacttattagctggtatttcaattgctcgtctaggtttttcccaatgtaaacacactttgtgggatttcctgggtccagaacaacttcttccaattccttaattggttttaataagtttctttcatcttgaatctgaggatcaagatcttcatccttcttttcgcttttttctgccaagactaccattaactagtgaccggctttgttgtgttgcagctctatgtgatagcaattgtgggccagcatttgatcgcctcaaactaactgcccctagtcagatcaaggctggacgacccaataatatatattgtaagctgacggcaggtcgacaaacaaaagtcttgcataattaaggcggatagaggtgcctcacccaaggtaaatgcgagctcgattacaccttgacttgcaatactgtcgccaatgaatctgcatagatttaccatgcaaggcctcaatttggcatttttgagccccatcttctttagtgtttacttgtaaaggatgttcactgaactcatgttatctatcagcaccctatttatccttttattggcgagttggatggtaatcaccaatggatcgacgtgagggtacctcacattcttctcatcttccatcaaatatataattggaggttcttcaatttttatcttcttggaaggtt

SEQ ID NO: 149100 - DNA, 763 bp, Cannabis sativa
  modified_base (341)..(344): a, c, t, g, unknown or other
gcataaatatgaaaagaaccagcttcataacaaaataaataacacaaataatatcacacaataactaaaaatataatataaaaatccggttatatttatctactagttaaaaatttgagaaaaaaaaaactagtttcgtaaagcaactaagataaaaactcacacacaaaaactagttaaataaaataaatcaataaaaaaattggttccttaaattaactaaataaaaaatcagttctcgaaataattaaattaaaggctagtttctaaaataaataattcaagaattaatttttgaattgattaaataaaaaaccaaatgacataaattaaaatagacnnnnttccacaacaaaatgactaaaaacaaataacacagaataactcagaaaccggttataattgaaaaatagaattggttctataacataatgaataaaaataactaacacaaaataacggaaaccagttataattaaaatataaccggttctgtaacatagtgaataaaaacaaataacacaaaataacttaaactagttatcattaaaatagaactggttctataacagttgttgacctcgcttttagccaacgacagtgagtctaatttagtaagcgataagtagtttataacgacacaggaatagcctaatcctcgttatagaggaatataaagacacaggaattttatagaggttcagcctagagcagttcggtaatagcctaatcgtcgttatttgtattaactcaagaacaagga

SEQ ID NO: 149101 - DNA, 577 bp, Cannabis sativa
cccactatgtatgtggtcggccagccactaccactagatgggtattttactctatttttatcaattttttattccaaataacaaccgtaaccctagtagaaattagttcgtcctccaattattaattcataattagaattagtcaaaattatcgatttacccttcatattatctcttgactccttatgtaccattaattcaacgtgaacaattaatctataacttattttagatttagatccaactgttagtacttttagaattaacactataaatgaactaatatttgatctgttaggcaagcttggattctttattgtatgttatgttctcagtcactcatgttattagattctcaaaataaaaattgtaagaatcatcttctttgagaaactttaatgagtgaatcaaataacctaataaacagaaacaagagttcatgtatacacagtatactcaaaattaagacatatcaactaatgattatcattgtgatatgaataattaatgaaagatattttttcattgtggtattagacaccataaatgcctcctaagagcatcaccaaggaggcat

SEQ ID NO: 149102 - DNA, 696 bp, Cannabis sativa
aataattaagtttattttatattttaataaatttaattaaataggaaattatatttaagttggaaattttttaatttcatatcaacttaaattcgaataatttttagaatgcatattatttattttaattattatttttcccagataaattttgaaatacattttcaattgtagatattttgaaattttaaatttaaaaattagattaaagttgaaaattaatttgttaattaattttggatcaacttaaatcaagtaattttcattaatgattaattaaattaaatagactaaaatatattattttaattagaaaataagtaattagtttatgaaatatctagatagttattttctaagtagactttttggtatttttctagatatatttagttaactagaaaattaatatttaagttaattttgttcaagacacttaaatatttgatatttttcttaagaaatttaattaaataaaaaaattatatttatgttgaaaattaattaatttattaattttagatcaacataaattagaataattttttgaacgtttattttattttattttaatataatttcaaaaataaattgttcttaaatatattagatttcgaattatgattagagatatatatttaggaaaaattaaatttgagttaaaaattaatgatttaattaattttagaccaactt

SEQ ID NO: 149103 - DNA, 735 bp, Cannabis sativa
  modified_base (42)..(59): a, c, t, g, unknown or other
aaaactcatacaagagaagccctgaaaaacaatcagaaatcnnnnnnnnnnnnnnnnnnggactatgcagaattttaactacaaaaccacgtagaaaaccctgtgttcctatttttatttctatagcttctattttttctgtgtgaaatcactaccgtgaggctcaaatttggttaatgaaaatctgcgttaacagtttggtgctttcattgagagcctttgtaaaaaagctcagaaaaaaaaccctcccttcttttgaagaaaaacgacctccttcatggctgaaaatccataaaatgctaacaccccacatgaggaaagtaatcatccttctaggaaagagcccatgggctccaggaggtccaccagcctgcagtctagaagggccacccgttctaggaggactgaacctgagggtggccccagtgtacggaccacacgttcccgatgaacccaacctgacgatggtcctagtacgcggacaacacgctcgaggagaactcaacggtggattggtcagaatcctaggacgagggatgaagagttcaatcgtggaggtgtctagcctatgggagaagatacttatgaaacagaaaactgtcgcttgagacgccgtctagaataagcgcatcgtcaaaacgttgagttagagcgtgatgcagcctcggccaggatggcacaggggacgaatgctcaaaatcaacctgaacttggagtgagaagactacgaggcag

SEQ ID NO: 149104 - DNA, 696 bp, Cannabis sativa
  modified_base (214)..(217): a, c, t, g, unknown or other
agatgccttaagacaaaatataaaagaagggaataaatcacaagtactcaccgcggccagagcagcgctgatgtcttagacctggtaaacggagttcacggaggcacaagcagcgtatcttttggctgggaattgggtcagatgcgagacaaactggttggtcatctctgaagcaaaaggagcaagggtaggcccgacaaagcggttgaaccannnngtcaaagggtccatgttcaggtcccaacgattccgaaaagcgtcctcgcgcaaagtgttctgctgctcctcccgcaggatcttctccagggcctccacctgagcatgtccccgactgaactcgtccagggcatagttatgtttggccatgcagagcatctgcctttcctcatcggtggggatcggggtgagcacgatgccgtgcggcacagtatactactccgcttcggaaggaatcccggagtcattgctaacagcaggagtgtccttcctccgaggccgcttggaaggctcggtctcaaccattttgcccttctgcttgcgctcaagggcggccacaacctcgccctcatcctccttcacttccccctcctcatctatcaagacaatcgtgcctgaaggggcgcttgacaaggacctcccgggggtcaccagttgggatggggccgaaggcaaagaagcgtccgggctataggcctc

SEQ ID NO: 149105 - DNA, 523 bp, Cannabis sativa
atatatatatataaatacttactcacaaccttgagtgtagattagttgggattaccttgacttgaacaagatattacacatttgtccaaaagcttatttctcctatctttaagcactaaggaaactctctaagaaatagctctcggaattatcaagccttttagggtttctagcaaagtgctttgttgatagaaactagttcatcccaaatgggcaccaaagactttttttatagtctttaggtgatcacacttagaattcaaacacaccacctcaattctctcatataaatgagtattaatatattttgtaactactatatttcataacatttgaatcatatcatcaattttatgtaacatctcttttattacacaaaaataggatcaaccaacgaagttaaaaaagcaattaaccttgtaacacctctctatgttacaaagtataggttaaaattttaggttaaataaatcatatgttatataatttatttaccaaatacttaatatatattattcacata

SEQ ID NO: 149106 - DNA, 517 bp, Cannabis sativa
ttgggttgggttataacccttttaaaattctgtcctaagtttaattttttttattaccattatttattcatataagaatcatcagaataaaatttaatgcaaaaaaaaaaatctacatcttagttgagttttaaaaatgttaatacaaaaaaagaatattaacttaaaattactatatagttatccgattccaaaaaaaaaaaaattgtaatgaataaaattttaaaacaaaactaaaattatagaatccacacaataattatctcttgagttctcctttgttgtagccttgacttctttgttaggttaattgtctacaattaaaaaaaaaacatattattataaataatatagtaattaaattataaaaaaattccaaatattcaatcagataaaataataattacatacattcttacataacacatattaatatacatacaagatatttaaaagggaaaaaatacaaaaaattgttgtagatttaaaagaccaaactcaagcaaacaaaatgaca

SEQ ID NO: 149107 - DNA, 876 bp, Cannabis sativa
atacattctgaatttaaataaatcactataaattaataatttagaattaataaataattttcataattaaaccctaattatctgttaaagctaagcggtctttacacaatcgaacatgctttaattacgtgttcaagagccaagcaggtttgggaacgggttggcattgggactgcaattgcagctgctggtgcgagcaagtttctggactggtgcatccagtcttttgctgctgttgatgcagaaaaaaggaagttgttgctggtgctgtgctgggcgatttggagcgcccgcaacgaattcgtttggcagaaaaaaaaatgttactgctgctgctattgtagtgtcagcaacgggattccttgatcagtggagtaatgctcaaaaatctcttatcgagacgtcttggtcgggttatacgacaggtgacggagctgagcaatgagtggttccaagtgaaaataaaatcatggttaacgttgatgctgctttctttgatggtggtaacaagtatggttgtggtttcatcgccagagatcatcatggtatgctagttgaaggaaaaacactcctgttcacaagtacgacatctcttgaactagctgaatccataggcgtacgggaagcgttgagttggataaaaatgcatgggtggcaggatgttacacttgaaactgatcgtcttacagtggttcaagcgctaagaagctcgatggacatgatttctctatttggccaagttattcttaattgtaaaaagttgttatccgacttgaaaactgtctctgttttatttgttaagcgatcagctaatatggtagctcataactgtgcaagagcttctatattttatcttggttgtatcttcgatatgga

SEQ ID NO: 149108 - DNA, 528 bp, Cannabis sativa
tcaagtttaggtcttcaatggcatatttggtttcaatgagtttttcttggtttttctcgttggattatattgtgtaatatcctatttaggtactctggaatgtttggaggcaattggacaagttttgagcaaattggaagtgttcttggggagaattggtagaaactggttcaccggttttggcagggccctagaaaaattgattttctcaattcttgtccattttagtgccttagttgagtgtttccctatttcctgggatagtgtaatccgtagaaagtataacagacccttgagttgtagactcgggtttcccggattagggtttttgacatgtgatttaccaggttttaatatgtgattagggcatccacccagcacaagactttctgttcaggtcggtcaactcatttgaatctggaaaggaggtaagaactatatataatgtgtaatatgagtacgtgaatgtatgtatgggttaatgtatatgcatgcttgttgtgaatcatacactaccaaaacttgtac

SEQ ID NO: 149109 - DNA, 708 bp, Cannabis sativa
  modified_base (467)..(471): a, c, t, g, unknown or other
tgttatttctgatctatattaataagtaaagctaattatattgaaatgagttttaattaggtcataaaacccaacaatttcatcaacaacataatgaaaaaaatacaatgcaaaaaattataatctaaaaatgatacatactataaaaatcagtttcgaacgtataaattctatattaatatctaataaccaaacttctaactttattctttattttagcattcaatctttcatttgctttctaaaaaatcaaagttgatttaagcatacaaaatggggtaaagacaataaaagaaatcaaaaactaaaactagtttcatcaagaacataataaaaaaaaaaatacaatgcaaaaaatataatctaaaaatgacaccaaatataaaatcagtttctaacatataaatttatatgaataattaataccctaatttctaactcatggggtgttcgcggtgcgggtggtnnnnnttttgactattttttcaaaccaactcgcacatgcggttttttatatttctcaaaccgcacccacaccgcaaaaagtagtgtgatgcggtgcggtttatgcgatttggactatcactaaataattaaaatatctgaatacaacaaaacttgagctacacttgtcaaaaatacaataaggcttgaaaataaatataaaaaaaagtttcaagtttatacaatacaataattagtgggctt

SEQ ID NO: 149110 - DNA, 640 bp, Cannabis sativa
actgattaattcctccttgtgcctctatagattcgaaatttcactcttaattatatagaacgatctatatgtaccaagatataaatacgttatgagttatctattgttacaatccaaaaagtcaaagatcttccatagatgatttacatcgaaaaaggacaaatttacagttttacctatttattcttaaaaagctactactacaaaaatttcaattaccaacacttattcaacaacattcaattaaaaagtgttgttaatttatttatttttatattttgaataagtgttgctaataactctcacatttttaaacttattttttttaagtaaatataaataagcaataacatcacttctaaataagtgttgttaatacctataggtaaataaaaaaataaaggcaaagtgttgctagatataattacaattaataaaaacatcaaaaataaagtaatttaaattagaatcaaattgatgtttagtggattgtaagttactctatatatgttcatatagatatatatatatatattaatatgagatataataataaggaagaaaataaaaactgccattctcatcaaactaccgaagagattatcaaactatcataatctctcaaaaaatctatgatgct

SEQ ID NO: 149111 - DNA, 569 bp, Cannabis sativa
ggtcccgagtccaggtttgggttgggatccgggtccggctccaaattcgggtgtaggtctcatttggagtccgggtcctggtccagttatggttcaggatctaggtccgatttcagttttgattcaaagtccaagtcctagttcaagtcccggttgagttctagttttggttcaaattttgggttagagggtacgagttcgggtccacttttgtttttgggagtggggtcaggtccgggtgtgggttcaggtccttgtcagggttcaggtccagagctgggtcccaaatccagacatcaactacgggttttgtccaagccctgggtccagatctagatcccatcttgggtcccagtctggttccatttcttgtgctgggtcacgatttgggtcctggttcaagttcgggtctgggttgggtactaagtccaggtcctagttctgtttcccaggtccctatcttgaatctgggtccaggtcccggttattatcttagtttatgtcccagtctaggttccggtttgagtcctaatcttggtttgggtttaggtctctgtctgggttttgat

SEQ ID NO: 149112 - DNA, 545 bp, Cannabis sativa
gggtgttacctttaagtcttggttgctcaccattacccatatatctgtgaccattgtgaggcttgtaatttaattcaataacaatcatacaagctgtgtcaatatatgaaaataacttgcaatttcattgataaatgaaattggcgacaacgccttattacatcactgcgtagtagtgtgtgattaaaactaaagcaaatctaaaagaaaagactaaatactaaataaagattctacgttgcttacgggcatacccttagcatgaattgtcgctgaaaagcaactgttattgataatatttacggaggtgttggtcgttccaatatcgaggtactggtataaggttcatgttggagtcataccggccgagcctatacgtgccggggggtacaacttctgtaacttcgtatggaccttcccaattcggccccaatacgcctgctattgggtctttagtgttggccaagactctgcgtagtactagatctcctaccttgaagcttctttccttaactttggaattaaagtatctggctactttttgt

SEQ ID NO: 149113 - DNA, 612 bp, Cannabis sativa
gtatttatttataactaggagttaaacttagatatttatactgcaaattactcaaataaataatgaaaaataacaaagctcaagcttaatattctatagggtcctttcctgaattttttttataaggaagctttatatttatagtagacgagtattctggtagatctttatctagtttgatacttatgataattttttagtttaagttttttaatgattgtgtacgttgtagttatttaagtttataaattttcaaaaaatttcaaataatttttttattattattattttaattatttctattttttcaagtaatttatagtgttagaaataatattcaaatattttgttgcatgcgtgacttttttttttatacatgtgctaagaaactatttgaactttatttttggcactgtaaattattcaaaaaaaatttaattaggcggtcttaaataactacaaatacactatttaagaaagaaaaaaaaaagctttcttcactgctaaaacagatagaaagtccaattggagccaaataatgattctccctaagaaaatcatccaggaaattgaagcaatttgtagagcctacttgtaaagcccgcttagtta

SEQ ID NO: 149114 - DNA, 867 bp, Cannabis sativa
  modified_base (252)..(262): a, c, t, g, unknown or other
tgaactccccgccattaattttttgtcactttagttctctttgcacctcaataactctgctgagctctctcttaatatatacagtaagggtgggcattatccaatccaatctaattgaatcaaaccaattggatgctaaaagttggattctaattggattggatcggttattagatgtcaatctcaaaatccaataaaaaaccgatccaatccaattacatttatacatattaaaaaattatttatataatnnnnnnnnnnnaaaaatataatatatatttattatatttttattagacttttttttatgttaaatttgtaatacttgattattttatgtatttattttcatgatattttgttttattttatttcttagaaatgttattgttttaattatataaaaattttaactatattacacttgtaagaatagtatgtatatgaagtattaaacttaaatagaaggtgatacttagtttttactattttttttattcatattttaaagttaatattgtaatttaggtatataattagatgtccaattaaaaaattgatccaatccaattagtaattggattggattggattagattttgaggtctatttggattggatcggatgataattttccaaatccaattactaattggattggatcggaaaaagaaaatagattgaatcggatgcccacccctaatatacagccaagccaagtaatgccgtgtggcttgcttgttcttgtcttagagcagctccaaggagactgcaaaatcattatatggtgtatgtatttgatccaaggaggctgcatatcatgcagcattttgtagatttctctatatgccgtgcactgtagtcacg

SEQ ID NO: 149115 - DNA, 730 bp, Cannabis sativa
ttagtggacttagaaattggagaattaaatgttatttgatttatttttggctgaaataaaagatttaatgttgcatgttctctcatttcttcattcaaagtttcaaaagttacaaaaattatgaaaaagctctctctcttttcctttctattcggccctccttgagcagcaaggaggtggatttttcctttgtgattcaagtgtttttctagcaagttcatagtaattctagtagaggtaatctttgtctagcttctcttcttttagtttctttaatttttgatgaaaagatgatgtttgcatgcttgtttgagttgttcttgctgctgtgtttttgatgttgtttctgaagttaaagcatgattaattgaggataattaagctgcttgtgatgcttgatagttaggttgtttagagttgtggaatttttagctcaaaattatagttttcaaagtgaaagttgagaaattggttgctgtgattgttgcataagtttgtgtatgttttcagcagtttctaaatgcatttttatgtaggttaaatcaagtttagatgcttgtaggtgagctttagccaagtttgagttttaaactcaaagcttggagctcacatggcatttttggtatctgaggtttctggatggttttgttgctttagacttgttgtttaggttatttagaataggtctggaagttttggtgtggtttggatttgatttgagcaaagtatg

SEQ ID NO: 149116 - DNA, 723 bp, Cannabis sativa
attatttgtgactaattaactatttaattgagttttaaatagagtaaatattaaaaattgtgttcactgtttgggaactgtcaatatgatggtacaatataattctagtctataaaataaatttaagactaggttgagatattttgttattttatttatttaattaattggtattttatatatatatatagtttcaagtgtaaattagtacataaatatggataataaattgtacttatttctagatagaataaatatgttttataatctgtataaatgattaagaaatatgctagcttctgattttggtaaataattacatatttgcatattttgttaataaatggcattttagtgagatttcacgtaaaaagtgtttgtatgagctcatgttttacgttaaaaatattcgtttgagtacatcatatgtgttggtgtgaatcatagtgataaatgattgtgtaatgtgtgtcatggaagtgaaattgacctatgtgttgtgtagtttgacataagatttcattgttaatcttaggttatgcttgaatatgttttaagtgttattgcgttattggatttaggatcttcttctcaacaaagaaactgggggagaggttcgagggagagaaaaggatatacttagcaactgaggtaagaagagtggacatctgtgcacagggtgtatgttgaaacatacaaatgtattatgggtttgtatttaca

SEQ ID NO: 149117 - DNA, 505 bp, Cannabis sativa
cacggttattgtttttgagagtgggttgagtgttaaacacgattccacgttctaattttctctgtcaagccatcactcactcaaacacttccatttctcttttcgtttcttcttccattttcttattttccctcatttcagtaaagtattatggtttctctctgctagggtttctcatttcgtttgagtgttaaaccgtttatggtgcgtactaggagttcaatgtctccatcaccggaggtgtctggttcgaagaagaaggtggaaaaaatagaggatgttgcgaaaaaaaatggttggatctggttcaaaggttgttgagtatgataaggagaagaaaaataagaatgtgtccatttcgaagaggagtggtgtttttgaggcttcctctgacgatcgacgctctaagaagttaaagagtgttgttgaagatgacgatgattttgattcagaatgtgatgaagcccctattgtgttgccaaaaaaattgaaggttagtatattg

SEQ ID NO: 149118 - DNA, 517 bp, Cannabis sativa
actaagccatacaccgcattccaatgttatcgggcactgaacatgcaaaattatgaaatttctatatatgacatataaaaatgcattctgaattcaaataaatcatgaaaaattaataatttagatttaataaatatttttcataattaaaccctaattatctgctaattttcaaatttaagctaagcggtctttacacttttactcaaggttccgaatatagaagaacaatgaaggaggattgaaatcactaaggaaggaactctctcatatactagttgtctcacatagaaaacaaggtttgatttggtttaaggcatcaagtggatgagtgagagtaccatgttccttttatagtgtttcaactagggcttaaaactgaattatatggattagaaaagaataaagttttgagaaaaaacacttcatggtcgtacacttaataagaccattctctagttacaattttgccacttttttcaaccacttatttttcttttaataatacaatattttc

SEQ ID NO: 149119 - DNA, 690 bp, Cannabis sativa
catagaaaaatagaagcaatttgacatggtggaaactaaaaattaacattcaataatgaaattaagaattcatgtctcggattttgaaataacccttaattaaaaaaaaaaaactacatagtcagagctagacattataaacaaaatcataatatttagtagaagtagaaggagaagaaaagaattatgatgaagaacacttcgaagccgatctctgtctcttccttgctctctctctgattttctctctctaatttgtagcttttagaatttcctaatttgtactctaagaggttctatttatagtgtttcaagataaatgaatcctattagaattaggattctatttataatagtattaggaaatatctcagtaaaagaaaagataactcatcttttaaacaaaagataaaaaaatcacaactcttcttgagaatttatctttttttttcgctatctttttttcagaaatttcctactgcgatggctgatagtattttggccataactctctcgatattactcgcagttggacgatttaagatgctctagaaagctaagaacgagatctaaaacttttatgttgagctccaagtctagttctgcctctaaggttatccgaatttacaattaagttctgtctcgtacaatcgagctcgccaactttcactattttctaccaaaatatgc

SEQ ID NO: 149120 - DNA, 2015 bp, Cannabis sativa
  modified_base (1943)..(1968): a, c, t, g, unknown or other
tatccattggatcggatgtctcatccaacatccgatccgatccaattggatttttaaaatttgcatccgatccgatccaattatgataggatatccgtatctattggatcggttgggattggatcggtcggttgggattggattggatgactttctgcacacccctacaaataatgaccgcatttattttacgtgatgtgtaatcagacctgacgatttcaggggataatcgttgtaaagattacagtcaaccctataattaactgcctactatgtgattatagatagaggcaagatatactgaaaaagggacgaaaaattcgtaagagaaaaggcccttaaaaaaaaccatcaaaaatctaatcagatttactcgtggactatgtagaattttaactgtaaaaccacataaaaaatccttcgtgtttatcctttccttttattttctttattgttttttatctttgtgtgcaagtttatcatttaggctcaaattttggttaacgaaaatctgcgttaacaatagtaaatcaagtctcaagagagtatatggcctgtagagaaaagatgatggcctatctaagtaagatctaagatccgctcgcacaatttaagggttacaccctcaagaagattccaagggaagaaaatacaactactgatgccttggcacgacttacgagcagcacagtgacaaataaggccaaattagtcccaatccaattcctagaagagcccagcatcaactgtgcggaagaggtcgaaatgatagatacaacaccaaattgaatgacgcccacaacaacttatctgaacattagagaacttccaaacaataggaacgaagctcataatgatgagaaaagctgcacggtatatcatagttgaaggtgtgatgtataggagaggcttctccatgtcattgcttagatgtgtaataaaagaagagactgcacgactcttgtttgaagtacatgaaggattttagcctttgctatgattcttgactctttgagtcataaagaatatgaggctcatattcaagttttaaaataaaaacacacattgggcttcaaaacttacctttgccggtttaggaggtcttgcttgagacctggccggccctaaggcttaatcatgggagttggctagctttagggttttaccctataaagctagcctattcatgtctgggtttggtgaccctggccagttcttggctgagacgtgggaccgtggccgaccctttcaaggcttgagaaccttggccagcatgggctttggttccatatgggtatccagtgttctgtcctcttgttacttcggcaagaatttggctttgtaggcatatacaaccttagcctcatacgtggtttccttggaaactctgtatgaagcttaatggtgagtctattatagtcgaacgtttaacttaatactcaacatggcttggttcccataaggaactctgccttagccgtagcctagtacatggcccctatagaagctctctctagttattttctggctatgcagttctagcagggccttggccttatgcatgtgaaccgatctcatatccggccttagggctttcatgttcttactttggcctataggccctctatttttaacacaactattatttagcctcaaagccatctatgacggacatatgattgtcctagctatcttcttatggccttgacatgtaagggtctagatttactatgtcaagccgaagtatgcctgcacgacttagaggcaagtttagtagcttattttaagccttaaaatttctgcataagttctttgtgccggttcaatgcattgtacggtatgggcgccccttaagcgaccatgcaggcaagtctcttggtcacttgctattcaacaagttttaagactttgcataggttcttcctgttggaatttattttacnnnnnnnnnnnnnnnnnnnnnnnnnngtttcattaacaccctaatatgaattctaaaacagatcggaagagcg

SEQ ID NO: 149121 - DNA, 842 bp, Cannabis sativa
atataaacacattattattattagtatgttttttagtacgttgttttcagagctcaaaaaaactcagaaactcttaattagcaagcaattcaagagtacgaaattggagagcaaaatcaatcgcgaaggcttttttaacgggattttcaacattcttttcttctctattttctttttctattctgaattaatacgtttgaatttgctacgatgaatatgagtagctaagcaatttattaggggttagatggatatagtttgacattaatttatggatttaatgtgatttaattttctcccaatttctatgtatttcatttcattcgtacttaattacttttaatttcctgatcaccaattgaatatttatgatttcgatgcgaaatctgagaagtgagtatcaattatgctatagctaaatgaaaacaaatttcgatataggacgagagtacctatatagtttggatagcttatacagtttcggtgtataatgccttacatgtttaatttattacgagagtagaaaatttacattaattgagatttatatatttgaaaagactataaattacttgagtaaacctgttattgcatagaatttggtaaggaattgaatcatgttagaccataatagatagatacaattaaaatcatatccctaatttcacatctattgttaaacctcttttttatttatttttgtttggtttatttagtttcaaaatttatctattcgattgccaaatagaaaaaagatttcaatagattggtactaggctagagtcctcgtgggaacgatctcacttacccgagtattacttgttaaaacgatacgtatactt

SEQ ID NO: 149122 - DNA, 644 bp, Cannabis sativa
tatagatgtggtacaatttaactcgcacatataaataaaataaagaataatttgcggcataaatacctaaatttaactcctagttgtaaataaatacgtaaatttaattttttgcggtaataatacctaagttatatttttagaactctgtagtacttaagcgttaacgattaagtcattatccacgtgtcattttgttattggtatatttaaattatttttttttaaaaaaaataagactttaataacttggaccaatcaggtgttgccacgtgacaatttatttaatacttaacagttaggtacctataaaacttccagaaatataacttaggttttattagtaccagaagagtaatttgcggcaaaacccctcaactaacaatttacttgcaaaaaaccatctaatctcatattttggtgggaaaaccctccaaagtactgttttgtttacacttttaaggtgctgtctgttcagcctcgttaaatcttagttttgcccacatggcaaagacaggtcattaaaaaattatcctacgtaatcatattttacaaaataaaattgaaaataaaaaaaaaaaatttaagagtaatttgcggcaaaactcccccaactatcaatttacttgcaaaaaacaatccaa

SEQ ID NO: 149123 - DNA, 565 bp, Cannabis sativa
tttgttgatgagtacttcatggtggatggcgcgggcatcacccgtactcggttccagtagattccaacatatcactgccctccctttactcttactctcagggatagagctcaaaagcttgctccactatcgggggaagaccggaacatcatccagttgacatccgaggataacgtcgtgaagtacgggctctatctgaaggatttcattcctaagccactaaagttgaggaagaggaaatctgatgctggatgggctaaacgagctcatcaggagaatgaactcattcaacttaagcgtgaagctaagttgaaaggaggtgcaagggccaagcagtatgctcaggagcccttgaatcctgaagatgaagccaaggaagagcaggtgactccgctcaagaggaagaagcttccgacccagcccaggcctattgaacatgcaattcgcattagggagcgcatctcgcctgctcggctgccttatcccatgctcggaaaagggaaagcaattatgtctgaaataagaggcatgtcaagtgatgatggagtttcgagtcttgctcggg

SEQ ID NO: 149124 - DNA, 629 bp, Cannabis sativa
tttaatttagttttaatcgtattttgagcatttttatgcttgttatcttttatttttgtagagttaaaatagatgaagatttgaaaaatatcaatagaaaaatataaaagatcgcataaatatcaatgtggaaaaaaaaaacataatcctgcccagaaaaagatatttcgcgtggaaaatgaaggctttggaccacacgggtcgcgacccacgaatgggcatgtcgcgaaccgctcatttgaaaaacaccgaaatctcgtgctgcaaaacaacacgagtcgcctcccagccattgtggcgccatgacccgcccctatttctgcagaaaatataatcttttcttccacgtgggtttttggtggtttcccaatttgaatctgaataggaatttaaacttgtgcttttttatatcttcttagtccctcagtgcctatataaagagtgaactggagatgatttcagtcaagcaattcagaatgaaaaaggagtacgaatttcagagattgaagtcaatactggaggcagtctgcagagagttttcaacattattttctattttcttctcttttcttaagataatttgtgtgattttgcttccatgaacatgagtagctaaacacttgattagg

SEQ ID NO: 149125 - DNA, 651 bp, Cannabis sativa
atcaaagttgtgaataaaattaatgagaattttgtcaactttagtataattttaggttaatctcattaaggagataactttaaaataatgggtaaaataattacattatttggtaaagttgtgagtttgatattttagtttttttgagaagactaagaatgtcaaatgacataattctaataatgatctctaagaggtattttagaaaaataaattaagttgtttaaataatgtaaagattatttagataactaaactggtgaaaagtgattcttataaaaatttcacttgatactagaaatgtgggggtgcgccacaaatttaatcaaaatttgatgagacattgttgattaattaatttgattttgaattgaaattctaaatcaattttggctatgtgcatatgtgaaattttgacatatatttggtgtcaaattttggtgaaagtaatttcatgaaggaaattaaatttaagagaaattatagaaacaatatgatattctatattttaaaatcaagatatgatcttgatggtgaaatgtgaaagtgtggggtgatactccaacttgaaaagtttgagacatgcttggtgtcttaaaataaagtgtaatttatatatgtttggtgtctaaattagtgtttaattttgat

SEQ ID NO: 149126 - DNA, 569 bp, Cannabis sativa
taccatataataaaatatatactacaatagaaatatatataataacagcaaatcaaataaaaatatataggatgctaataaaattatatatcatgcctcaaaagtacaatagaaaatagattttaaatattatttaaaaaaaaatgatataccatgtaacaaaaaatacatatactattcactaaaatatatatatatactaacaataataataataaaaatattatatattactagtatatatatatgtatatactatattaactaaattatataccacaattaaaatatatataccatgataataaaattatacaccactattgtatataataaaatagaaaataattaaatgttctttaaaataaatgatatatcatacaattaaaatatataaaaataatagttaaatatatatatagcatgccagtaaaattatgtatatatattaaaatatttatactatatattaaaatatttatactatgctaacaaaactacataccactattatacatagcaaaatagaaaataactatcatctaagaataataatataccatacaaca

SEQ ID NO: 149127 - DNA, 672 bp, Cannabis sativa
ctcttcaataccatcaaatggtttcttcttcttctattaggatgatttgtaggcaagtaccgtctatgacccatataacacatcttgtgtccatttgccatgcaacgagcccatgtgtcagtgcaacaaatcgaacaaccttcgtaaccttttgtgcttaagcctgataaattactgtaagttggaaaatcactaacagtccacaataacactgctttcagattaaagaattcctttttaaaaccatcataggcctgaacaccattctcaaaaaattctatcaaatcgtcaatcaatggttccaaatatacattaatattatgtccggattgttgcgggactgatatcattaaagaaagcatattaaatttcctcatcatcactaaccagggaggaagattgtacataacaaagaagacagaccatgaactatgaagactacttaaagatctatgtggatttactccatccgcagacagaccaagacgaatatgtcttggttcagatttgaattcaggatttatgtagttcacttttttccaagcttaagaatctataggatgtatgtgtttttcatctttcactctcttggtctcatgccaaatcaaattttcagaatgttctgcactacgatataatcgtttcagtcacggaatcaaaggcatgtaccac

SEQ ID NO: 149128 - DNA, 685 bp, Cannabis sativa
tcagtagaatcacaatttagtattttagtatagggggacggtttagttagacattgggaatgtcaggatgggtcaggaatttagaatttcccaaattacccctagtgccatttttataacttttagtgttggaggggcaaaatagtcattttgcttatgtgagttttgtcttttgtgaattttattaaagattattaatgtgattcgtagttatgttgtatgttgattgctaagtaaagaaaattaatttctttctcatttttattgaaaaatcaaaattagacaaaaggttgcatttttctttcaaagtcttcctctctctttcaaacccacctagagcagctaggttttggttgatttctctgcattttcaagctggttttagcaagaaattgtgatctcaagttgttggtaagattcttgtagctttctcttaagtttcttgagttttaagaaaaagatgttttccatgctttgaggttttatttgatatagttgttgtagttgttttttgttgtattcagaggcttagtgttgaatttttatgttgatccatgcatgatttggtggttattaggttgtttgagcaagctttggagttttgaactcaagtttggctcattagtgatgaaatgttgtttagcttattgtgcttgttgtagttgattgctgttgttttcagagg

SEQ ID NO: 149129 - DNA, 645 bp, Cannabis sativa
aaaaaaaaatagaaaaaatgacaataaaaaaataaaagaagaagaaaataaaaatgataaatcattgtttagaattaaggtttttttttaaatttatgttttcaaaaaaactataaaaaattattatatatatatccgtgttttgggtgggctcgagtgtaatttgattttttttaggttttggattaatgaaatataaaccctgtcggtgatggactgggtgtaacccgaacttagtttactaaaattgaaacccacttttttgggtttttttgggttttgggcaaggtgggtttcaggggtgtttcgagtttcgggtgtaaatgtacactcctagtttacatggtttttttgccaatattacgtatatctatataaaggatgaaacataggatgatgatgtgatatcttctatgagttctatgaaaaattaataatgttaattttttgtataattttaagacttaatatcattaaataaaaaattttaaaaaataaataaatattcaccgcgaaatgcaaattgtttactagttcttaataaacgaaaacgaggctctaaaattttcaatgagattaaattatctgttaatagttacttatggcacgtttactatacattattcagaatcagaataaagtaat

SEQ ID NO: 149130 - DNA, 541 bp, Cannabis sativa
atatatatatgtctcatgtacatatgaacaaaaggcattagtttatcaattatagctttattatacaatttgactaagttggcacaacattattcccacaactttttgaaactatggaaagttacgtggcgagccacgtaaatattagttttatttaagttttagtgatttttttaaaaaaaattcaataactaattgtaaattattttttattatttgttgtataaaaatagacttttttaagaatgccataattgtatatataaatatgatgtacacatagataatcattttataattcgacaacaaattttttaaacttattttaaatcatgtcatatcatcatgggagggtacatagaataaacactatatatacaattcttgcaaattttagagattttcaaaggtagaaggaatctcttcactaactccacaattggtaataccaagtaagcaatataaagaaaaaaattaggatttattggaatagataaatggaattatatgcaatccgtactacatacgatacttctaattt

SEQ ID NO: 149131 - DNA, 502 bp, Cannabis sativa
agccatcaaatatttaattgccaagaaagatgcgaagccaagactcattcgttgggtgttacttcttcaagagtttgatttagaaatccaagatcgaaaagggaaggagaaccaagtggctaaccacttatctcggctggaaataggtgttgaacaggaggacaaaatgcaaatttaagaaacttttccggatgagcagctacttgttataacccaagaaaacactccttggtgtgctgactttgtatattacttagtgagggggttgcagcctcctgatctgaataggcagtaactaaaaaaattcttccatgaagtgagattctactattgggatgaaccttacttgtataggcaatgtgtggatcgcataatgcggtgttgtgtgccagaagaggaagttgcaaacatcctagagcattgtcattcatctccctatgttggacactttggtggacaaagaacagcagcaaaagtcttccaatcagggtactattggcct

SEQ ID NO: 149132 - DNA, 536 bp, Cannabis sativa
actatattaacatttaatccacaattaattaatatatttattctaaaattaattacatactacttatttttaataataaattaaaaaatatcaactatcaattagttattaaaatatatttaaccattttaatattattaactttttttttttttgtactattacatttttgggtgactattcaatagttatattttaaggttacatttttttataacctactataacatgtcacttacaggtaaactttctatttttagacttaaataaattaattttttaattaaaatatttaataaaacttttttagaaattaatataatttttattttattttaaaaaataaatcaaatcaagttagtatcaggttacaagtaatttattaattatttttattaaatttttaaattaatcataaccgtctaataatgattcaatgattaaaaataaatgtaactatcatggttacatatttaatgtaactgtaagaatcgttattttctgtagtgataaattatgtccagttgcattccagt

SEQ ID NO: 149133 - DNA, 906 bp, Cannabis sativa
  modified_base (763)..(769): a, c, t, g, unknown or other
ttaaaaataacaaaataagtttacaaaaatacagatttatagtttttcaatattttaacgaatttaaacattttctacaaaaagacgaatgattttttgtgctgtttttatgttactgttacattatactgtattgccctaacatgaaaataatgttagtttttgtaaaaatgtaacttaaagaaacttttaagaaaaattgttaaaataatatatataattttaggtactttgtgtaaaatttccaaattaaatttcctttttgatcaaatgtccaaaaaaaaatgggattttacaaaaatactggattttaggtaaaagtttacaattttattgttacatatcattttttttacaaaaataccatcttttttataaaacaacctaaaacaatagtttctttaaagaaaaaaaaaacttaaaataattgtaaaacaacaaaccagaataattaaaaacaacagtagaacaactaaaaaataaccgtagagcaacagtaaaaacttaacacagtacacaatataaaacttatttaaaaaaaaattctaccccacaataaaaaagaaaaaagttaaaaaattcagtatgtggtgtaaattagcccaaaaaaaaatagcttacatagtcaacctagatgatggacttacaataataataaataaaatagaggaaattacatggtatatccattttattttacttgtttaatttttacctctgttttcatattctttacccacttttatagatgatatctccattnnnnnnnttaggttaatgtaaattatatgttaaacttaagtagagagtgaaggtatattgggtaaccgactcaaaaaagttagtatattttaaaaaatatatatatatatataatatgagggtatttttaattaatgaatacaa

SEQ ID NO: 149134 - DNA, 726 bp, Cannabis sativa
  modified_base (41)..(67): a, c, t, g, unknown or other
  modified_base (682)..(687): a, c, t, g, unknown or other
tttccataaacctcgttgactagcaacgagctgcacagtannnnnnnnnnnnnnnnnnnnnnnnnnngttagttagggtgttacactttcaaggattgagaacattagtcggcatgggcctttgttccaagtgggtagcagttttctatcctgttgtgacttcggtaagaatttggctttgtagacatatacaacttagccttatacgtggtttccttaaatactctttatgaagtttaatggcgagtctattatagtcgaatattcaacttaagactcaatatggcttggatcttataaggaactctaccttagtcgtagtctagtacgtggcccctacaggagctctgtccggttcttttctggctatgtggttcttgcagggccttggctccatgcatgtgaactgatttcatatccagccttagggcttttcatgttcttgctttggcctatagaccctctatttttgaacattactattatttagccttaaagccatctatgacggacatatgattgtcctggctatcttcttatggccttaacatgtaagggtccgaatttactatgtcaagccatagtatgcctgcacgacttagaggcaagtttcgtatcgctgtcagaatatacccttgcctttccaactagaagcttcaacttttggaaatattttaccagnnnnnngatttactaacaagcatgttgaattaacatcctaaatat

SEQ ID NO: 149135 - DNA, 508 bp, Cannabis sativa
cgctcttccgatctctatctagaaaatatcttatttgactatactgacgtgaatcaaattggccaaaatgtcaagcaggttagtccagctgtgcaggcacagctagatgaactaaagaatatgttccaaggcatggccgggcagagaaacaataatctcgagttggaccgaccacgtggaacccctttctctcacgagatcaatctcttggctttgccccacaagttcaaaatgccaacctcgaaactgtacaatggaagagaagatcctcattcctacctcaagtatatcgagatgcaagtggatctcagaacctcagacgcctcggttccccctaaaagcgaatatcggaaatcaaaagtaatgaagtgtagctgtcaactgtggtgagagaaaattggattttgaaatattaattgttagagcatttattagtcaaaaactaaaaagatgcccagtcaacctcacatcgagtcacgaacagacgcgcttgacacgtgtcacccat

SEQ ID NO: 149136 - DNA, 516 bp, Cannabis sativa
ttttgaaagcataacatgtatttttgtcatttgtaatgatttttgattaaattgcttggtttagaattccttatatttattatacatactttattttatttccggttcttcaaaataataaaaataaaaaataaaataaagagagggaggcattggtgacttgattcatgggctaaggaaatttgtgcttaattgctaagtatcaatatttattcttccttgatttattttgatatgtttcctttgaaagtttgatctcttatgtattgtaatttgtccttaatcttgaaagattttcttaaatgggatatttttggaaataatgttggtatttctagtttccctttatttttaatttttttttaaaaaaaagggaaaggagaaatatatacttttgcaagatagtgggcgatttcctttttgttcatgggctggcggttattttttaaaatttcaaaattggtttccttttctcttctttcttccatggttttttaaaccattttttttcattta

SEQ ID NO: 149137 - DNA, 619 bp, Cannabis sativa
tttatatatgtatgcaaagtctaatttttgataaaaataagcctataaatttaaactatatgtaatgtaaataagctaattaattaattaataactatattttaagaaaaaatacagtgagaggtatttaaaaaatatataataataatgaaaggaactaataaagctatttttaatatagggtaattttattattttactatcaatattacatgattaaaaaataaggggattagtgtgcatataatcttttaattttttctctttcttttttttctctttctttttttttttaaaaaaaaaaataaaattaaaagacatcattttatgacggattgtcatgatttggaagattatctacaacactatcatgtcgttgtgttcgattcaaaagtacaaagagaaaaaaaaatccaattgttgatgatgaagttggtgatgatgcaaataattagttcgaacgtatttatcaaatttcatttgaattttcaattattaatttgttctataattttataaataaataagtgttgaaaataaaagagaaaagagtcaaaatatagatatgttccaataattgtaaattatgtttcatactataatatgttcacttattcaa

SEQ ID NO: 149138 - DNA, 532 bp, Cannabis sativa
  modified_base (65)..(73): a, c, t, g, unknown or other
  modified_base (126)..(132): a, c, t, g, unknown or other
  modified_base (186)..(192): a, c, t, g, unknown or other
atattataattaaatggcttaattgttaaaataattagagtaagaatttaaatataaataaaaannnnnnnnntaaatattaattgctaaaagagttgttattattaaatatttaattaattattnnnnnnnaatagttaattataattaattaatactaaaaaaaaatgtttacctattagtaannnnnnnttacaggtaaaaaaaaatgtaactatgatggtaacaataaaaatgtaaccattgaatagtcacccatatagatatatatagttaggattcccaatatgcaatatacagaaaaccagtagtaatctcatcaaaaaaataaaacgcaatgcaaacacttggtgatcaaataaagcaagaaaagataaaacagataggaacacaaccagtttttacttggttcagattcgaatcaatgtgattttgcacacgcaagtgcacgtattgttacaagtagtaaactcactgagagtgaggtcgatcccacaaggattgtagttaagtacgttaaaattaaacttct

SEQ ID NO: 149139 - DNA, 751 bp, Cannabis sativa
ctcagcacttctatggatgcaaactccatgtatggtttccactccaagttctccagatttgtgtctggattatatggcaacttatatggtcctccactttcatttccttcgtcactatgaacactgcccatttcatattcttcaccaatgtcaccttcatcttcacagtattcatcacgaaccaattcagtgtgccttccccaccaatcacaactatcaggttgagtgtagtcatgcctctcaacttctggctcaccacagtattcctcctcatgcaaaataaaatcagcttctggttgggtttgtggttcagattgagtttcttgttggattagaggatcaggttgggtagactgtgagggaaactaatattcaggttgggttataatatctagttcaagttggtgttgtgtttctggttgggtttcagtgtggggggattggtagttccccctctgcctaagtcttctagctcttgtagattcttttggttcaggctggggttcaaaatctggttgggtttcaatttctggatgggcttcagtttctggatggggttcagtatctggatggggttcagtttgtggttctggttggggtgttgggagaatggtttcaggttcaatgttggattttggttgagtgtggggttgtggttgtgattgggcactgaatctcaacctcctcctctgcctaagtcttctagctcgtggagattcttcaacctctttataaccagtgatctccacct

SEQ ID NO: 149140 - DNA, 556 bp, Cannabis sativa
  modified_base (498)..(506): a, c, t, g, unknown or other
atacggcttgttaagaattctcctaaacttttacatttgcaaaaatttagtccatctgttaggttgcatcccattatttcgtttaaatattgatgtgtctttgtaaattagcaactttattccctaaattttgacaactatatatcaaatcgtaccccctcaaaataaaaattaaaaagattcaacattttttagtaaatcttaaaaagttaattttgtttttaaaataattattttgaatgattaagaaaattaaaaaagaaataaaaattttaaaactaattaagcgatttaaaaattatttattttttttattaaaaattcatttagatactaaaaaaaatatattaaaaattcaatttttataaaacctaaattttacgagaacaaacttgcgtctattttgtttttctcagaaaaatgtagatttgtttaagtgaacaaaatataaatttttttagtttaatttctacctttttttaaaaaataattttatannnnnnnnnaatttttaattatttttctttatttattaagagtttataaatataaataa

SEQ ID NO: 149141 - DNA, 575 bp, Cannabis sativa
  modified_base (39)..(39): a, c, t, g, unknown or other
  modified_base (301)..(302): a, c, t, g, unknown or other
gaatcagatgacaattaaaaacaaatatcctctaccgangattgatgaattatttgatcaacttggttgttcaaagttcttttcaaagattgatttgaggccaggctaccatcaattgaggatgagggaagaagatatccctgagactgttttcaggacacattatgggcactttgagtttttggtaatgccatttggattaacgaatgcacctgttgtatttatggatctcatgaataaagtctttagacctttcttggataagtttgtggtagtattcattgatgatatcttggtgtanntctaagacacgtgaggatcatgctaaacacttgacaatagtattacagacattgagagatcatcgattatatgctaagaaagagaagtgtgacttttggatgactgaagtcaagttcttgggccatgtaatttctcaagatggtatcactgttgatcctgcaaagatctattctacagtgggaaagaccaaagaatgtcactgaagtttaaagttttcttggattggtaggctactattgtcactttgtggagaatttctctcgaattgctat

SEQ ID NO: 149142 - DNA, 1281 bp, Cannabis sativa
ctggtaaaatattcccaacaagtactgcctcacattctcactattgtaatcttaagaaagccactctagaactcacaagacttttgattggagtgttattatctctcatatcaatacaactaaaagaagagtaggtcgttaccgacaaactaagggggccaaacctgtatataattgttgtgtcctttttatttacttgttctcttttttcacacgtggtaatatcgatcataaatacgactccgctatcggttagaaaaattctaggtcaacaagtaccgcaagaccaacacaacaagatgtaatttcattttccaactagttagatttagattatgtaatattttgttgagatttagagtttaaggttcatatcaaattcaataatttcttaataaaaccttgattcaatttctacttccactacgactctgatatgaaccctaaaaactaacatattataggggattgttgtgatagaaggtactcatttaagcatgtaaagtgaaatttcccttagaaactctaaaatccacactagcgaattggatgtccattcaaatgtaaaaataactaattattcacacatatttatatatatttcaaaagttatatatgtaagtaatattttaaagttaaaagaatatttatgtaaaaatctaatacatatagtataaatatatttaaaaggttagtatataaaatatatattctatacttatttatacgtataactatattagaacgaaattaaatatatatatattttttttgcatatgtttgtttttttcctcttcatataatttgttatttttgattttgtatgttttaatttgcttttggagacattaaataacaataatttatttcatgttgttgttagttatgcgaaaaaaatattttttatcaatattatatatgtaaggaataaaaagtaacagatttaatctacactattgtggatttgattgaatttgagctaatgtatggattagattagatccaaaatataaaattcccactttatacagatcggatgcacaataagaaaaaaaaaagtgtgaatttgattggatgaacacccgtaaaaaacatattagaaagataacttttttttaggaaagagaacttcattgaaggttaagaaaagggccaaagccctacatacccgacggacaaaccagacaatctcactaggagtaggagatgacacaaatatcggctaaccactccgatgatggaatgagcaataagctcaaggctcacataagagaatctaa

SEQ ID NO: 149143 - DNA, 578 bp, Cannabis sativa
agtattaaatacacccttatcgactaagatatagttcctcttcttaatcttaagattcacttgccaataccatgccaataccatttagtataacttttatcgattccacgacaaaatacatgattctttaacatggtaatattttttttatatattatcacaatcgatacaaggacacttaaatttttcaggatcgctacaattctttagggaaaactctaaaaagttgttaaatctttccacgaattgtggggtttctctcttctcttccatccatgacttatccattttaaaaataaaaataaaattcctaacaaacaagattaaaaaaaaaaattaaaacttgctagaaaaattctaagcacgctaagtaattaaatattaaaaacatgttcatttaagaatcttaaaaaaaactggccagagtttctcctatttctacaacatttcccaatttaaaaattatctaacaatgcgcacaagtaaatcggataacaagaaaaaaataaccagaatagcatttaacaatataataattgccacccatctgaccgcagtacatttatatcgcagaacct

SEQ ID NO: 149144 - DNA, 715 bp, Cannabis sativa
  modified_base (653)..(661): a, c, t, g, unknown or other
atcataagaagtttctccgcagtggcacatccctaagcaaacggtcaagttgaagcagtcaacaagacactcaaggacaccctaaagaagaaacatgaagatgctaaatgaaactctccggaggaacttcctgaagttctatggtcatatcgcacaactgagaaaacaacgaccggacatactccattttccatgacatatggatatgaagctatgctacccgtagaactcaaaatgccatcccactaaagattaatatatagcctagaggccaatcatgtactccttgcagagtcacttgatgaagttgaagagaaacgaagcgcaacaaacttaaaactgatagcccatcagcaaaaagtagctcggtattttaacaaaaaagtgagagcacggaaattttttgtgggagatatggtcctaagaagagtattttttaacaccaaagatagtacggtaggtgtgctcagaccgaattgggaaggaccatatcaagtggtcgaagttctagaattaggggcatacaaattgggcaagtatgacgaaaagatgcaactcgttttagtgccaagatattgaaacagggaacacttaagaaaataataccagtaaaagtaccacgttggatgtattagaaattattttaccaggannnnnnnnntactcacaagtatgttgattgacaccctaaatatgaaattaaacacataggctc

SEQ ID NO: 149145 - DNA, 814 bp, Cannabis sativa
ctcttgtgggaaaattgggaaagtttatgaatttgtttgtgtgaggattaaggatgcctttcctttcttgtgttattaacagacccccggagaagagacagagagttccctcggcattcaatcgtttcatcaaggatgagatccaacgcatcaagtctgaatcctgatatttctcacagagaaggcttcagtgcagctgctaagaattgggctcactttccacacattcactttggtctcatgcctgatcagactgggaagaagacaaatgtttgccaacaggaatgaaaagacgttctgatgaaggatggattttttgcatcagccaatcaagttggtgtttctcgttactaataacataaacatcgatcgaccgacagatattaaacatatatatatatatatatatggagaggaagctagagatgaagactacgtacgaacctttattgaaagacaacactatatttcatggtgaccctacgtagtaattagtagtactagaaggaagcctttttaatttaatgacgatactgtgtctactaaaatatcatgtactttttcagttctcttttatatctctttttctaaaatgtttaaggccctttgtggttgaacattacttaattgtctgatcttatgctaattaaactatgacaaacgctcattatacatcaaaaaaaaaaaaaagaacattgattattctggatattattgttttgatttgagaagtgggatttcaggtgaatgaagaaaaaataaaaccttaaataaaactaacaatacgtggctcgccacgtaacattcacctagt

SEQ ID NO: 149146 - DNA, 657 bp, Cannabis sativa
tttcatgcattaaacatcaacaacaaactctcaaaatttcagattgtacaataatcaaaatcatgcctaaaccaacaaaaactcaagctcaagaacttgagtttcaactcatgaaacctccatttatttccagcaacaaacgtcaaataaagacctgaattctaataagaaaacacactaatcattccatctagagctcaacaatgaagaccacaacaaattcatactcaaatccatcaagattaaacattaattctcttaacatgcaaatctcaagaacaactcacttttttatgcttttacaacaactagaaatcagcaagaacccaaataaaaatcagtagaaaactacctcaatttcttgcacaaacaagctccaagcttttacacaatttccccaacaatcaagctttaaatcaagctagctttcaccaaagtcaaatttgaaattcaagaggatttgagagagtgagaaggtaaggggaagaagcagcaagaaaatccacttccttttctcataatttcattattttattaaatacaaatcaaatgtcaaaatgaacatttcgcccccaagggccaaataaagcctatgcataaactaagggaaaaaatgtcctttcacatccatttaaactcaaatatattttcagatta

SEQ ID NO: 149147 - DNA, 629 bp, Cannabis sativa
tgtttggcctccaatcgggtctccaagattgttgaacctgaaaatatttttatttcacaaataactcagattatatccacatttcaaataaatctccataattaacaaattacgcttatatatccacttataaccaaatttaaattttatactgaaataaattagtaggatcataatcccacttattacctaattaacccataatataaatataaaccttaactatttatcattaggcttatcgggatattacatgtgatgtgtaatcaaaccccatgattttaggggatgatttttgtaaaaagattacagtaaactttgtaattaactgcccactatgtaattataaatagtggcaagaaagatcaaaaaagagacgaaaagatcatacaaaaaaaggccctgagaaaacaatcagaaatctgaataagattgactcgtggattatgcagaattttaactgcaaaaccacgtaaaaaccctgtgtgtttatattttttattttgtagcttttatttttctgtgtgagattgtcacggttaggctcaaatttagttaacgaaaatctgcgttaacatcttgtgaagctaggatcttccgttttgaataaagatttttttttttttttt

SEQ ID NO: 149148 - DNA, 529 bp, Cannabis sativa
  modified_base (476)..(504): a, c, t, g, unknown or other
aacacagggtccaattggtaacttttgtaaaacaaaaggtccaaaatagtatttacctattttttttatgcccactaagattttggactaacccttatcataagtacactgaacactattcaaaacctatatatattgtaagaaaatctataaatataaattgaaaattgaagtataaagttgttacctaaacacgtaatttataacggtaatacaaattataaactttcatgattaagaataatatttataaaaaaatttatagataagtttatacgaattaatatagtctagtttactatttaatttttttgaggcaccactgattcatgtttgtcggtcggctaataaaactgttcatgaattagttgtgcatgtacttagagtaaatggtaagctagtttggatgatgaattttctttcttttcatttcaatgttattggagaacattgtcccacatggattaaatgtaaannnnnnnnnnnnnnnnnnnnnnnnnnnnntactccactcattgccaattggttt

SEQ ID NO: 149149 - DNA, 911 bp, Cannabis sativa
tataaacctgcaaagaagatctagaagcaccatccgagaccctgcttggagcctgagctaaaacactataaggctgaataatttcttgggcatcaagataatgaaaaaaataattgacactccaatttatgttaccttcatcaccacaattctgttaaatcctatcaaaatatattaagagaacacatattactcatatttttaataaaaaataatcattaaataattataaaattaaaataactaaataataataaattttttttaaaaaaataacaattacattttatgggaagaaaaaaaataaggaaagaaatataattataaatagtattgggtaattctacaatacacactgatgcaccatttatttgtttcggcatttagaagaatttttttagtcaaattttttcatattcgtatacgttaatagttatttaaaatatcttacaaaattttgaaaaattaggaataatttacaatatagaaagcagtgttcaaatagtgtatttcacactcgtataaaataaaatagtcacgtgtgcaacacattgtttgaaccctgttttcgacatgttaaatttttctgaatttcttaaaattttgcaggatatcttaaataactataatgtacatgactatgagaaaaaatttgactaaaaaattattacggataccaaaatagatagagatacatgagtgcattctttttaaaggtctgcattgtagaattttctaatagtatttatgtatatatatttttattaattaaataaatattattcatttttttttaactttaaattatataataagtttttagaaaattctataatgcatccctttaaaaaagatgcaccgatatatttctatttattttagtatccgaataattttttaatcaaattttt

SEQ ID NO: 149150 - DNA, 1148 bp, Cannabis sativa
  modified_base (332)..(341): a, c, t, g, unknown or other
atggttcacatgattaatttcataattatatatttaatgtatattttctattggatccaaaatatatatatttattcataattacaatgatgtcatcacaatggaaagtgattgtgattacatgcttcgaagactttagtctcatactttatcagtgcactagatttacactgacgtgatcataagcgataaagtttacttacacttttataagtggatagtcctttctagggcattagtatactagtatagaatgtatggagtatacatcagactggactgatattgacaatggaaaagatattataaacttactgttatatctttctaannnnnnnnnncttagttgatcttaggtcaattgatcttaatcttgagattaggggtgttcattggaccacatctaatatttttaggcctatccagatctgatctacttatatattagatgataggttttaccattcgatatgattcaattaattttagtcatctaatcaatccaacatccatttgatgttggattggatcggttctatccgttggatgtatttcttatatacttattggtttaatttaggtttatcaaatattttagacctagtattttttggatcggatcggatccatctaatattttagctccaggttgtattggattggattggatccatccaattcaagaaaaaaagagtaaaattcaatattgatttttatatatacggttatactcgaaattcggctacacttaagaagctgacacatgtccaataggaagaatatgaatcaactcaaaagatatattaaagttatatcattaaatgcagattaaaataactcatttttattaaatcaaggtatgatagaaaatattcaaaactcggtgactgtatagtcttaagcgagacaaggataataactattgacctgatattgacgagacatacatctacctcgaaatacatagacaaaaaagagatattcatccactcaagtaaaataaatataatcacatacaatagtctcgggttatacataacgtgtaaagaccgcttagctttaatttgaaaattagcagataattagagtttaattatgaaaattatttattagtattgaattacttatttatgatgatttatttgaat

SEQ ID NO: 149151 - DNA, 1001 bp, Cannabis sativa
  modified_base (164)..(169): a, c, t, g, unknown or other
atattgatcttggtaaagatattataatcttactgttgtatcttcctaacatggttaagtttgatctcaagagtgttatttgtgttctttgagctgttagttaaagactaccatgtggtttgagtcgaacgtacagttggggaacatgatagtacaattgagtnnnnnngctaaacatagatatagaatctacggcttctatctggacatagaagtgaaatgatgatttccttcggtcttgatagtatgtcaagaccgatcaaaatcagaggaatgacaatagccaagacttgctacctctaccggtagacggacatctgcaagtcatcattggaggcccgcacatagctggagatttgggcaaagctcaagagaggtatgcccgaacagcacagcacgagtaagaagaagtgatcctggccgtagaagaaaggaagcctaaaatccaacgggtaggagggcctaccatcaccttcaacgatgaagacactgtcaaaatcaggtttccacacaacgacccgtttgctgtggaggtccagatagctaacaaaatggtggccagaaccatgattgataatggagcctcttccaatatcttgttcaagactacctatgaaaagatgagactccagctcaatgatctaaccccatgtctcctgtctgcctatggtttctccggccaaggagttgcacctctaggacaaattcgcttacccctcactgttgggcaagctccgacgagcatgactatcatggcacaattcctggtattagttgttccttcagcctttaacgtaatgctaggccgtccaaccttatatgacttaaaggctgtcacattgatattccactcgtgcctaaagtttccaacaaagaatggggtagggtgtatgagagggaaccaacagaccgctcgggaatgttataaccttgccatggccaaggcaaagaaggaagtatcctctagccagagcaccgacaagggaaaaaacatttccaag

SEQ ID NO: 149152 - DNA, 580 bp, Cannabis sativa
tccactaacccagttgtcgagcacgagaagagaaggaaattcatagccaacacatcttgccatactcgaatcaatagctcgggtgcacagaaaaaaattgagccagagaatcagaaccagcaaatttcagccagcccgagctaagttctggtttggtgaggtaaattgaaaattattttggttgaattgcatacttggtgggtgtagttggactgctagtatatgctacattaaaatggtgttaaaaattatcattatgattcaagggtggtagccgagtgtgataatgttggtttggaagatttgaattggaatttggtggaatttttgaatattgggctgagaaagattggtaaatttgagaaaagtagtgattgtgaacagcgtgatgcgtggaagatggtttatttggtgtaaaggagttaatttggatacattgatagtttgaaattggggttgtaatttagaattttttagtgtggttttgaatgcttcactgttctctgccgtgtttgtatgatggtgattcttagtgaaatggtgttgaattggcagtggtagtgttagaaatagtgcaagt

SEQ ID NO: 149153 - DNA, 999 bp, Cannabis sativa
  modified_base (240)..(247): a, c, t, g, unknown or other
  modified_base (299)..(310): a, c, t, g, unknown or other
agaggtaaaaatgatagactttaaaaaaaaaaagtaaaaatgaaagagtaaaatataaaaaagggtatagagtataatttcctctttctaaaatggtaaaaatatgaccttgaacttaatttttaataacttttttttttaatatgaccaatttaaaaataattcctaatacgaacaaatacaaaaaatgtaaacaattttgtcataatacttttaaatcggattattattaaattttannnnnnnnaaaaatcagttcaggatcctatttgtctaattttagaaaatacatggtctannnnnnnnnnnnacaaaacagagagtccaattagtaacttttacaaaatacaaggtccaaaatagtatttaccatttattgaaaatcaatggataatatattaataagtggtaaaaatgtaattaaaaaatgtaatatttattgtgggctaaaatttggttaaatttggcctatgttatctttgtaccaaatttggcacaatttttagcttgagctaaatttgacacacactttacattaccatcggaattaaatttgagcaaaatattctaaaaaaatagcaatatattatacactatatttataattctccaatagagatgctctaatcccaaccttggatgaactcatagtgtcttgttcatcaataacaattttattttcattaatttatcaaaacagaaataaagaacattaatttttgaaaaattgttcaactcactaataaaatttcaaaaactaatcaccaataaaattcaaaaactaaattaaaagagtaaaaaaaaaatattgatactgtctattattatgtctatctttcttttactttcatgtaattttgttttcttataaaacataataggattcacataatataaaaatatagggcaagactatggtaggacctagcaaaagttccctaccggtagggtactttttttaaccattgattttaaatcgtgtggttattataatataag

SEQ ID NO: 149154 - DNA, 649 bp, Cannabis sativa
  modified_base (483)..(489): a, c, t, g, unknown or other
tggcacgattgttgtaggcgggaacgtatagcatccaaagtcgtcgcctaggtatccatcctggtcgagagatcaaaggcgcgccacagtaaccttggacggagggcttacccacctcgcacccaaggcacttttccttctacgaggaaccgcagcagtaagttcctcactgacgtagtccacgccctcaactaggacgtctccatcagcatcgactggctccccagcctcattgtattccccatagtttgggggttcaacctctgcctcgtcctcctcctcgatccgatgtcggttttcccaagactcacctgagttcatctacaaagacaacacacaagatgtttggtcagaatatcgaacgataaacaagcaaatatgctgaccaggagtactcaacagattaaagaacgattatgtttgaagaaatgtcagaactcaagaagtcaaaaattttctcgagttagggcaaaaaagttcatnnnnnnnagaataagcaagatgaaagatagatgttacgtagttttgaaacaagtattatgactataaaatcgcacgacatgataaagaagaatcgcagaggtttctggacctagggtttcctaaacattttctacagcaaagtagagggtgcatttgacatataaac

SEQ ID NO: 149155 - DNA, 679 bp, Cannabis sativa
cctctatcgccaaaattttaccctgggacttgctgtcatctatacagataacacctgcactgataggagtagctggagctccctcataaggatcatacccatcatgaaagacctcctcatcttgtagttgggctgatgcagttggtagtgggggtgatgcagctggtagtagggtagatggatctgctggggcctccggtgctaaagttgtcgttggcggacgatgcaacatggtcaatatatttttgagctgctccataattagattctgaccagccttcatatgccatctttagctcggcatgacaagcgtacatacccttttggtcagcctcgatcctatccaacctccccactaattcattgtactcggcaccacgaaggcctgatgaagatggtgcattgggctgagggtctaaacaagtggcctaaaaaaatatataccaaaatgtaacaaatatcacagaacaaaaagaaaaaaaaacaatcaagttatacaatcataaaaaaagttccaaaaattggtacctgaatgtttgtacctgagtctctggtacctgagtctttgcctcagcctctttgtcatccacaccatcatcaaccaggttttccacactatcgtaggagatggtcctcacatatgcctcctcttctatccgtggaagtagccccttcacca

SEQ ID NO: 149156 - DNA, 770 bp, Cannabis sativa
  modified_base (309)..(309): a, c, t, g, unknown or other
aatcatcaacaatagttaagaaatatcgataaccttcaatgctaatgatatgaaaaggtccccatatatcaaggtgaattaaatcaaaaggagcattggcaaaattattgttaaaaataaaaggaagccgtttctgtttagcaaaatgacatatagagcacatataatccaaaggtttttcacaaaattgcaaacttttattaagtatactagtaatgttcatagaagggtggccaaggcgaagatgccaagggtccttcaaagtacaagaagagtttgcaaagatagaaatattggaagtgagaaaangtcgctcttgttcaaagaaaaacagttggccaactttcttagctatcccaatcgtagaagtcagggaaagatccaaagacgtatgagaccacaggaagattgtcactggtggatggagtgctttggatttgttggttgagtagagacattaattgctagctgagttgaagttgagaagagccggcaacaggggcttcaggactggccgaaacttggtttgcccgagcagtaggagtatttttctttttatcaccatattcaggtgggaaaccatggaggaaatagcacttctcaaccaagtggcctggtttaagacagttggaacatgtagggtgaggcctcttgttccgagaaggctgattcggttttgttttggtaggggcagcagcaacaatgccggtatttccaagacaacgttggcgttcttgttgaacaaccatggagaaaaccttggatagtgg

SEQ ID NO: 149157 - DNA, 503 bp, Cannabis sativa
gggaacaaatcacggcggagaagtggagccatactatgctcgcatggaaatatattgttctttgattgaggaagggattctgaattcgaagaggtcttctttcttttactcatgggtcttaaaataaaaaagaaaaaagaaacccatgagaagaatgacaaagaaggagataacaatatatgcatatgcaatacatcattcaggacaactctttaaacaaaaaacaaatcatcaacaaaaaaaatcatatgacagagctatgaaacaaataaaggtacacaccatacgtaaatgcgattaatatttcataacatgactaatatgctttatttatttatatacatatgtatataattaaacagagtctaattatgatttaaacaaacacattaagtttccaaactaaacataatacatatatgtatgtatatatgtgcgaaacaaaagcaatgtgtatagtatagtatgtatatatatgtgtcaaaactgtttaggatgttaaa

SEQ ID NO: 149158 - DNA, 537 bp, Cannabis sativa
ataacgtgccgactaaattaggtagtctaattaggatttttgttctcgaactttgacatgtatcaattcatgtcctctgaacttttttggtcgttaaaaatttcccgtgaactattgagattgttagatttaaggaattttgtccaattttagtaagtctaacatggatgaaagttcagggggcatgatttggcacatgtcaaagtatgagaggcgtgatttggtagatattaaagtctgagaagcataacttattacgtaaacaatcactaaattagtaaattgaatgaattggacaaaagtccttaaattcaaaaatatcaatagttcaggaaaaaaatttaacggtcaaaaaaattcacgggacataatttggtacatgtcaaagtttaggggacaaaattcctaattagccaattaggtatttagatgggtttttttccatatatatgggaaaatgtacgagaattcacttttatatagcataattaaatgatgcaaaaaaaatatagaattaaaaataaaaaaataaaataa

SEQ ID NO: 149159 - DNA, 611 bp, Cannabis sativa
gacaactccggcgatcactatagttttatttattttatttttttaaaaaaataaaaatgaagagaattttaatattttttataaaaatttaattgaatttttatttctttatgaatcttaaattcaaatttctttttaatattttatatggttttttttcttaaaaaaactatatttttagtttgattggttagataatgttatatttagtggcatttactttttatgccatatatatcataaccttaataatttttttcccatatttttgaaaatagccctatataatagggaaatttatataaatattgttttttgaccaaaagttttcaaatatactgggacacggtaaacataacttttttactgtccaagccggttttcttttcttttcttttatactgcgcaagcccaataactttacttttatactgtaaacagtaaaaaaaacacaaaaaacaggatctccttcctggttggggacgggctggaatcggagataactaagaaaaaaccattaaatccggcgaagagtaacccctgctaaatctaaggacagtcgaagaacgaacaacaagatttacagaagatttttttttttcaaaaacaga

SEQ ID NO: 149160 - DNA, 579 bp, Cannabis sativa
ttcatacaactttgattattggttgccgaaaatcccagtcaatattttggtaaagataggaaacacttcacgtctacaacaaccagatgactcaaaggacttggaagaggaagaagcggcttctacagtggatattgaagaagaaggagacaccaacaatccaaagtattcatgtcacgacccgagccctaggccgtggcagatatgtaatatccataacttgggtagtcaaaggtcacactttgacccttgtaggaagataacgcttataaatgatcctttaatttatattaaaaattacttatttaaaaataactatattgataaaaaaaaaaatattagtaacaaaatcatgaccattcattaatataaaagaacaataatatcctcatagttatgtagtcaccgaatagatagatttaataagccaataaaataccaaaataatacctaacatccatcattcttcctttctaactattacatagctaatttaagtcatccagaccatccatttgttaggttatttttaatattatttttaggttgatttttagtgtgtttttaatttagttctac

SEQ ID NO: 149161 - DNA, 576 bp, Cannabis sativa
gatcccaagatgatacgtgttacagcttatttaatacacgtttatattgatccagtaaaagcggaccaatcacagctgtatgttttttagagattaatcgcacttattttacgtggaatgtgatcaaatcccatgatttcacgagatacttgttgtaaaatatcagtcaatactgtaattaacggcctaactatgtaattataaatagaggcatgttatactgaaaaaagggacgaaaaaattcataaaaaagccctagaactgtatcggaaatttaattagattgactcgtggactatgcagaattttaactacaaaaccacgtcctttgtgttcttacttttttctttactatttctatattatgtgcaaatttatcataactcgggctcaaatatggttaacgaaaatctgcgataacatttgtaatcttcttcttcttctacctttctcatataatatatataatatatatattgtatattatgtattttaacatttatttaatctatttgttaatttttatattatattgccatagaattataatgtcttgattttcttccattgtaataa

SEQ ID NO: 149162 - DNA, 674 bp, Cannabis sativa
  modified_base (631)..(633): a, c, t, g, unknown or other
aattttttatgtaaaataattagaattttattctggaattatttttgttggatagtatgggaaaaattaaccaattcacttttttaaataacttaatttcgattttattttaattagttatgaatttttgaaaattagaaaaatcttaggggtggtgacaccccacacacgcgtgcggacacccgtatcacacggggtgcacgcgggttcggacaaggggatgtccgagtattctcagttagggggacaatttcgtgtctgaacaaggggccgcgcgcacggagaggctgcatgcaacctccttgtgcgtgttttctcggccagcccttccccatcacgcgcgcggatggtatgcaatgcataccatccgtactaaatccaattttttttgcctttttttcattttttcatggtttttcatggaattaacttcgaattttttgtgtaattttttatttagatttttatttttcatatttcaaatctaattatcagaactaaattaattatttttttaattaatttaagataatagtagtttttgaaccttaaaaatagataaaattctaattttttgcttagttagttatcttatttttaaattttgattatcttatcttatttttaaatnnnaggtcagatattttatattttgcattatttaattaatttta

SEQ ID NO: 149163 - DNA, 723 bp, Cannabis sativa
agtcattgaaaaactagttttttgtctcctaatggcctcgagaaagttgagaccctacttccaagctcacccaatcaaggtgttaaccaaccaccccctccggagagttctgcaaaagccaaaggaatccggaaggctcctcaaatgggcaatagagttaagccaatttgacctgcactacattccccgcttctccataaagggacaagcgctaacaaacttcttcaccgagtgtaatgaagccgaagcaaccacgaacataccgacaccatcggtccctgcatggaaagtatttgtagacgaagcctccaatgagaatggctccagagtggggattgcaatgatatctccaagtggacttcgactccaagcacccctacggttcgacttctcagcttcaaacaatgaggccggatacgaagccttgatagtggaggctaaaagagtagaagtgtacaacgactcccaactggtagtgaaccaggtgtcgggagagtatcagacgcgcggagaaagaatggccgcgtacgtagcgatagtccggaaactgctccacgagttcacggactataaagtagagagaatccccagagaaaagaacactcacgcgaactatctcgcaagttagcttcagacagtgagattgagaaactaggggtagaacccgtggaacgcttggcagagccaagcatcaaagtaaaagaggccataacaacggttggg

SEQ ID NO: 149164 - DNA, 608 bp, Cannabis sativa
cccatgcggcattaaatgcgagatgactgttcagatagaatctgacaccacccggagaggctttgtagcaatctcgctctctgggagcatacgatacttacatgccttctctgggaggcatgtctaaggtaatcctgtggtaaagaagacttagctattttattcaaatgctaaatcctttccacccacgtgtcatcatccggttggtccacgtattttgggaaaaatcaggggcaacatttaccccccaagccttgtttaattatgaaatgaacaaggcttgcctagatgcctctggttgccttatcagtttcctggcacatgctttgggcacgtggtggcgtattaatgaccatcattattgtagttattcgctttttgcaggcgtcgattcgtttcttgtccatttattgaaacggcgcattaatgggtgtcagactggtcctcaaacgttttcaccaccttgatgacaattgaatccaacagttggatgtatggaattcgtatcgatcgctatcccagccgttcgatggtggctgatcacagctgtctcacacatgctctggcctataaaagccaaccttcttacttcatttggttactttcag

SEQ ID NO: 149165 - DNA, 563 bp, Cannabis sativa
tgaattgtaattagatagatattgggttgtacatatgggtagtccggcccgacccatattttaaaaagtctatttcaaatatagattaaggtcagcctgatccgtataattatatggttcgtgtatatgtcgtgctcatattttaaatgtaaggtccactcggccataagctcaaattatctgtgttgtgctttgacatagaggtgcgtatttgactcaatctaatatttttcttttaatctcatccaatttaattagtaattattgtacactcactaaaaaaagtgtttcggtacacccattattatttgtttcggtatgtaggagaacttttttgtccaaaattttatttcatattatatatattgtatttacttaggattatttttaaatttccagaaaattttgaataccttatagaatgccgaaaaaatgaggtttaaatatttattaaatgactatcttttatttcatatatatgcgtgtaaataactgttaaaattttattttcggtattatcaattattgagaattttttaaaattatgttttaatgaatatatt

SEQ ID NO: 149166 - DNA, 540 bp, Cannabis sativa
  modified_base (76)..(77): a, c, t, g, unknown or other
  modified_base (246)..(248): a, c, t, g, unknown or other
ccagatctagacaccgactactggtctgttcttggcgccattacttgaatctcgagtcaagatctggatcactatnncgggtctcggtctggttctagttctggtcccaggtctgatttctgagtcttcgtttgggatcgagactggggtgcggttctaggtcccgaccctggttctgtgtcgctagtctagttctgtgtttgggtctgagttcaagttcaagttcgggtcctgagtccaggtttnnnttgggatctgggtccggctccaaattcgggtataggtctgatttggagttcgagtcctggtcctgttacgattctgggtctaggtcaaatttcagttattattccaagtccaagtcctagttccagtctcagtcaacttccgattttggttccaattttaggtcacagcgtacgggttcgggtcaactttgagttcgggattgagttcaagtcctggtctgagtttgggttcgggtccagatcaggcaccgggtgtgggttcgcatcgggggtcctggtctaggttgggtcc

SEQ ID NO: 149167 - DNA, 1097 bp, Cannabis sativa
ttgttagatgctgagactcgttatcctcaaatggagaagctagcattttccctagtaatatcgtcaagaaaactacgaccttatttccaggtccataacattgaagttttaacaaagtatcctttgagccaagtcttagcgaagccacatgcatcgggaaggttgttgaagtggtcagtagagctaagccagttcgacatcaagtacaacccgagatccgcgatcaaggggcaggccttgagggtactgtccaactgacgaccaatcagtacatcgcaatccaagaccagatacgcgccctacaggccgaagtggatggacagaacagggcccgatgccccctcgagcacccaccactcgcacagaaaaccctcaggtaacaaactctaggcgtcgtaataaccgtactcgcagggaacaaagtgccaacccggaaggactcgacttgaatcaaccaagctcgagggaccaatctgggagatatcccaaccaggaggaacagactgaagaagaccctgaacgacgcaatcctcgtagcagacctcagtcgcgagacaatgacattgaatctgcctcctcatccccgcatggtcgcacacccagcaggtatactaggtccgattctgtggagagaccacagggaggacgatatcaggtgcacagggatgatctatgcgatcaccttaacgctattttcagggcactctcccaggcacctcgtgacgttgaagagccccgtgatccccgaatggacgatcaaggtgtaaataatcgcaccaatctgcctaacgcaccagctgcgaatactggagtcaatatccaagcgaacctcgctgcattagcaatagcacatggagcagcaccagtccctgctcccttagccgagaatattgatcaaagcatgcttttgcaagctttgaaaatgctcgagcagtagagaaagcccatttacaagctgcacgggacatctccttgtaccgcagaagtgcgacaagctcgactccccaagggattccggttatctgaatccctaaaatacaaaggacccctaatcccatagactatttagaaaaatttaatactattacggaagtaga

SEQ ID NO: 149168 - DNA, 762 bp, Cannabis sativa
tttgaaaccagtgagagtgttctcccattgatggtattgaatgaacttaacaattccatacaccctatgagcatgcaaatcataattcgtttcactctcaaactttcgagtagcatacaaattccaatcacgctcattatcacgatagtagaaacaaggacaataggagagagatgtaggaatgttaccaggagatgattccttcattggttgcttgcctttggcagcagcagaagccttggctgctgaagaagatcgagcaggagttgtagcagatttggtcaaaggaggctctagctcgagttcagtttcctcactgtctaaggaaactccaatgtcttctggaatctccttctcagaatggagagacacggatttgtctgaggaatcaacagagggatcctccatgggatcttcttcttcagaactcaagaaaatcgaagggggatttaccttttgtttcttggctggaggcactggcttgtcacgacttcgagatgatcaaagttccttctcgacagaagcttgctgggcacgagtgcgagtggaaggaccagttggagtagaagcaacaacttctttgacttatgcagcaggaggagaaactgtagcaggtggaggagatccctttgaagatgaagacgacgaggtccaagtttttcatgggcacacagatttttgagccacttgtttaggaattcgtttgggcttctcgggctaagttcacgctgaggaagtgatgaatctcttgtttttgcagca

SEQ ID NO: 149169 - DNA, 527 bp, Cannabis sativa
taaatggaagcatgtccgagttatcgcgcttggtgatggaatgtttagcaagaaagttaagcttaagttatttttgctgcaaatcttaattttgtgttcttgatcaattactaagctctgatttgtggaaaattaagactagtgtgcagaatctgatcaactaaaacttaaatcaacacacagttagcaatgacaagatagatgaattacaaataataatcggaggaaaaatacgaatgaagagagttacctaaatcagaaacaattaaagcagtaaaacaataaaatcaacaacaagatatgtactagttcaagtcctatagatcgatgtactctatgattctactccagttctagaacaccaccaaattctctttattgattaagcaagaataagggtacaatacaatcgagatcaattctctgctgaattctcttaaagtgtttcaactctcacatttttacccaagaatcgtcttcatctataaaagattcttcatacaaaatctaaacccaatatctctctt

SEQ ID NO: 149170 - DNA, 570 bp, Cannabis sativa
tatatatatatatgggtaacgattcagttattgaacctttttctacaacaaaaattctttctaatgggtaaaattaaaattatacacatttttttgtaaatcgtctaatttgaataatttgccgaaaccaaactgaaaaactcaacaaaaaatataaactgaaaaaaactataaaaacataacccatccattttgtatattgagtgtgttgatcaagataaagctaacccgccaaatcgactcgaattagctcgaccaacccaattaagagattacttttattctgttttattaagtataataaaatttaatactattttagatcttgtgttttacaaaaattatcaattggtcatctgttttgttaaatgatgaaatagaccttgtattttttaaaattgtattaataggacactgaactgattttttatcaaaataaaatttaaaaataatccgatctagagatgttatgacaaaacttgttgcatttttctatatatgttcgtgttagaaattgtcttaaagttggttatattaataaataaaattgttgaaaattgagctcagtgt

SEQ ID NO: 149171 - DNA, 664 bp, Cannabis sativa
tcttttatttttttcttctttgttatttatctatagggatattgacagctaaactactctaacttttaggtttgtaacagttaaccacaaaaactaaaattttggcggcataactctctgaaccctggttccgttttgctctgtacaccaccgtccaaaaatcacaattaagtgccacaatagactgtccacgtgtacacccttgtacacgtggcaaatttttagtggtctacatcattttaattttaaaaaataattataaataattaaaaaattaaaaaaaccaatttataaaaataaaaaaatctttttttattctcttttttctctttttctttttctttttctttctctttcttctcgacagaaccccctacaacatccgcactacaaaagctgagaaaatttattgctctccaaacgacaacaaaacctcatacacgattatcatgaaaagcatctcccacaacctactcgtacaaggcaagaacccatacattggctcatagtactcacactcaaaaccagtactcacgcccaacgctgtcatattcggattcttgatcatcatgcccatcgccattgtcgtttcactcacacaagggataataatgatcaagagaatcagaaacagcaagcttgtttttcttgccattctttctgg

SEQ ID NO: 149172 - DNA, 1175 bp, Cannabis sativa
taggttttcccaccaaaatttgagtttagatggttaagtgcaagtaaaataagagttgggatggtttagccgccaattactctaatactttaatagtaattttaccatataatatgatgttaacttttttttggctgaattaatgtgatgttaattcataaaggcttttccacttacccattatgggttaaatatttcttttcagtatacatgcaccattctctccaatatcaacattaattgacctttcatattcggaatggtgggtcacttttattaatttttaggctaattaggattttgtcttccaaattttgatatgtataaaattatattttttttgaacatttcaagccgttaaaaattcctccaaaattattgagattgttagattcaaagacctccgtttaaatttactaatggaagtctgacattgatgaaagttcaagatacataatttggtatatgtcaaagtttacgaagcacgatttagtacatattaaaatttgaggagcatgatttagtataaagaaaattattatattagtaaaattaaacgaaattagaccgaagttgttaggttatttttagtactaattttagattaattttagtatacttttaatttagtttcactcgtgtttggagcaattttacgcttgttaaattttatttttacagatttaaaagagaaaaagattagaaaaatatcaacggaaaaagataaaagatcgcataaaatatcaatgtgaaaaatcagagtcctaaatagaaaaaaaaaaaaaaagattattcgcgtgaaaacgtggacattggagcacacgggccgcggcccaagaatgggtgtgccgcgacccgcctatttaaaaaaaataatccacattgaaaacccacgggccacgggccgcccctatacaacagcaaaaatctatatttttttctctcaacgtgggctttgtggcttctgaattcaaagttgaataggattttcagcatgtgcgtttttctatctttttagtccctcaatagctatataagaactgaacttcagttaatttcgagaagcaattcagaaagaaataaatagcagaatacaaagtacgaattttagagatcaactgcaattctggaggcattcttcagagagttttcagcattcttttcttctcttttct

SEQ ID NO: 149173 - DNA, 1491 bp, Cannabis sativa
gcctttccatccaaacattatgaatactgaattccctcggggattcaagaaccctcacgtctcgtcatatgatggaaccacagattcggtcttgcatttaaatagttttaatactatcatgcgagactgcaatgttacaaataatttacgttgtattttattctccactttgctagttggagcagtgagctgctggttcaacaaatttacccataattcaatcaactcttgggaacagttgtctaaggactttaagaaacagttccaagtagcaagggataggcaacctgagacgtcctccctcactaacataaagcagcaaccaggcgagatgcttaaggcctacctaagtcgctttagcacagatgctacgagggttagaaatttggatgattgtacctagcttactgctcttcaagcagggatcacgactgatttctccactgctggaggcgagctatgggatgacgtgtagggtcgcccagtgaaaaacatcagtgagttaaatgaaagagctcaagtgtttgttcgaaaagaggaagcaagaaaaaagatgaagttgttaaagactggctcgggaggtaaccccagcactgtctcgaaaagcaccgtctcgaccaaggctgacaatctaggagcctctagttcaaagagtaaagataactgtaaggagttagccaaggacaaggaaaagcaaaagaagcacgacaagtacttgccaatatacaccgtttacactgagcttaatgaaactcgagaaaacatctatctcgcacatgaggacagggtcgcattccgtaaacctgagcccatgaggcatgcgagacaaaagagagatgcaaccaaaattaacaagtatcacaaagacattgggcatacgacagacgagtgtcgttagctgaaagatgagatagaaagtctcatcgcatgatgtcacttctggaaatatgttaaaagataagcaatggacaaaacaagccaaatccgcccaataacccaggcaaccaaggattacaacctcctcctcttgaaggagaggatattttggttacctcgcaaaggccacatgttgtaggggaaagtaacaatgcccgaaagagatatgtaaaagaagtgaagaacgagcagactgctttttctccgaaaccttctaagaaagctaagactgaagaacctctgattgtattccccgaggaagatgaaaaatgcgtgagatatcctcacgtcaactcactggtagttcccatccagctcgccaataaaaggataaaaatggtgctggtggacaacgggtgttcaatgcacatccttcataaggacacactgaagaaaatgggacttgaaaaagtcaaactaaaaccttccatggtaaatctgtgtggatttattggtgacagtgtcgccagtaaaggaataatcgagcttccattaactgtgcgtggagcacgtttatcctgttgggttttgtgacctaaataaaacccatttcaa

SEQ ID NO: 149174 - DNA, 812 bp, Cannabis sativa
ctagaaatttaccaagtaaatccaactaaattattaatttctcattgcatccactcatagaacttgaaattgcaccaccattattggtctctatataatcaaagaaaataagttcgaacagatatgataagtgcatcctgaatcaaggattcactctttattgttattattttctaaaatagaaaataactctgcatctaaacttctatctccattactcttagcaacagctgcagggtcttatctttaatttctctaatcattaagtactggttctagtttttgttgcatctcttgtcatcgtagtttggtctggaatcaggttgattcttcaattgactacaaaatcttttaatgtgaccaatttttccacattagtaacattgtcaattgtctttgagtttcaacttcgatcttaatggtgtttggctgtttcttgatgatcctctctttggacttcttcatttttcaagatatgattcttgttttctagtctccttctcaaattgcaattcaaagtcctttgactttaatgctgcatgaacaccctccaacgagatcacatccctgccatacttaattcccgccttaacttctggatctgccatcaacaataatttgagtaatatgattgcttgattttcttcatctattttatgatcaatgttagctaaaccaataattatttcattcaatttttcaatattatatctgttaggtccttttttggcaatttagttgtcaaaatatttcttaattaatgtgcattttattgagcattcaatttgttttttatcaactctagacccttt

SEQ ID NO: 149175 - DNA, 677 bp, Cannabis sativa
gatagtgcatctaggtgaaatgttcttccttttgtagttctttaggaggtcttgaagaatcatgacattatgagctattgatctcccttgcacaaaagctccttgattatggtttaccaatcccagaagaacctcagagagtctcaaacaaagtaatttagatatgcatttgtagattgttgtgcagcaagcaatcggcctgaactccacagctttagtcgggttttctgtcttgggaataagagtgatcatagtggcatgaagttcctgtggcatgatatctgtcaagaaaaaaattctccactgctttagtgatttcagctccaatttcaggccacattgtcttgaagaacccagctccatagccatccggaccaggtgacttggtgtccggtatactgaataaagcctcctttatttccttgctagagaaaggtttgattaaagccaattattactctctatttagcttgttccccatctccatacaatctttttttaagtcttgagtaggccttgtgctagtccccttatagccttgaaagtgcttaatgaagtgcttaacaacctcactgaaattgtcaacaacctcaccatgatcattggtataagtaactatgctattttccattcttcttttttttcaggaaagaatggaaaaaagcattgttctcatc

SEQ ID NO: 149176 - DNA, 633 bp, Cannabis sativa
aattattcttatatagaggtatactttgttaatacgggacttaaaaattgtataactaattacaatttagaggttattcttatctataatagacctaaattgggacttgatttttttataacaaattagaagttattcttgaataaggtattcttaaatagaggttctaccgtatatagatgctttatttttttttaaaaaaaaaaaatgagaataggcattatgaatgagccatacacaacatttcttttcattctgacaaatacctcttctttaggtaagatcggctacaattaaatacattgcattaaatattgcgtatgataaagaacaattttctttgcaacatctcatatgaaacaaaaaaaacagttaaaaccatttaattataaaatgtggtagcaatacgtacgctaggtagtactgattcttgccattaagtctgcaatcctcattatatatactgcctatattaataaattgtattactacatatatataattatataatatacactttttaaatatatatatatagggtgactattcgttacatttttattgtaaccatatggttacatttttttttaacctgtaatagcaggttactaataggtagactttcttttttta

SEQ ID NO: 149177 - DNA, 648 bp, Cannabis sativa
gtctaggtctgggtttgggtctggtcccagcccagttttcagagttttcagtccgtgtctgccgtgtctgtgtcctggtcttggttcttggtttgggtctgggtctgggtctatgttcgagttctggtttgggaatgagttctagtccaagtgtcgggttacaggtcctaggtcccaggtcctggcgcaagtctgggtctgcgttcgggcctgggtcctggtattgatctcagtctgggtccgggtatgtgttcagttccgtgtcttgatgcgtttttggatcaaggtccaattcctgttccagggtccttattatggttcttgtgcctatttcgggtctcggtgtccgagtttgggtttgggtcctggtctagatatttttccaggttcgggtcttggtacgattgcaagatctagacaccaactacgggtcgggtccaagcccaggtcatgggtcaagatccggatcccaatcttgggtcccggtctcatttccattcggatcttgggtcctagtatatgttcgtgtccgggtctgggaccgagaccggggttgggtctttggtctcacccctagtcctgagtcttgattctggttctaattttgagtttgggtccccaatctaggtctgggtcctgggtgcaggt

SEQ ID NO: 149178 - DNA, 832 bp, Cannabis sativa
aactggaaagtagactaagatatcactattttaaaatttaaaatttaaaatttaaaacatatcttaactagaattttaaatttaggttgttagagaatatttgaaaaaattcaaaaacctgacaaatctcctatatcctaaattctaaattaaattaaaatatctaaccaattttcgaatttcaagtttattcaaaatttaaattaataaaatttctaataagataatataatataatatcttgaattttaaaatttagatgttcctaatattatattcttaatcttataatttaataaattaaatattagaaaatgaacaatttaaaaaataaaatattttatggttagaatattaccttttttattaaaaaaaataaaataagtttcaaaatttttatggttaaaaactctaaaatttctattcaaacctaaactaaccaattttaaaaatttcatgttatttttggtataattaattttaattaaaaaaaaatatctaataagatgaaatgttaaaactgacatttatcaaatcttataatttaattaataaaatatatttcaaaaaataaaaaatttgaaaaaaaatatgggttagcaaattttgaaatttaaactagattattttttaaaaaattattttaatatcaaaataagatcattcgaatttaataataaaaaaaatgtaaaatctgatcttataattaaaataaataaaataatttaaattttaaaattaaccataaggctattttcgtgaaaaatcaaaatttcaaaatttaaagcctactaacatgtaaaagtaattttaattaatttaaaaattaata

SEQ ID NO: 149179 - DNA, 699 bp, Cannabis sativa
gaagatgaggttgaggaagagccagtgactccgctcaaaaggaggaagaaacatctggcccagcccaggcccgttgaacatgccattcaaattagggagccattttacctactcggccaccctctctagtactaggaaaagggaaagtcgtcatagcgaagataaaagacttattagctgatgatggacttttgagtcttgctcgggcaaacgcttttcatgaagcgcaggatatcctgtcttgtttttaaactttttgatgccttttttcttctaaccaagttgcttttattccgtgcagacatgtctcagaagatgctcgatgctttgaagaagacagttggaggaagctcaagctcatctcctccggccaagaaatctaggggcaatgaggtgaccccatccaaggaaaaggcaccggccggggaggttattgatctttctgaggagctaactgtcgcggacccttctgctccaaaaactgctaagtccaaaaatactcaaggaggaagctcgaacacgcctgaacagtcgaagtggggatctgagcagatacgggctcctaccccacctttaccagtgcatccagaagcaaagaaaggcaaggagatgctcactcaccccatgaaccggttggttcctgaggtgagtgatcagcttgccggcgctgacaccgaatcttccctagagttgctgatg

SEQ ID NO: 149180 - DNA, 577 bp, Cannabis sativa
tttgagttcctcctcctcgagccatggagaagaggaaacaaagaagaagaagaaaagaagcggaagaagagctcaacgatcagttggctctgataccattttagttgcagaagagaaagaaaacaaaaaatgagaatgaatgaaaatctcacttcattgattcgaaacagaggaggtacaatacaatatatacacacataataatgataaccaactaactgaaatcctaaccaacaactcaactaataacagaattgtaacaaactcaacaccttacaactaacactttaatacggtgctgccgacgatggcgatgcgattgctgaagaagacaacgaggaggatgattggggtttagagagaggccagatgtaaaacgagtgaaggcgacgaaatcccccaagggcgaaaaccaatcatttctccgggtgctacaagtgattgtaagaagtgagattctatttctccagtaacccactcaaatgcttcccgagtaagcctatactcttccagtacccttttgctagcaaaagtgcttcggatgactgcctgtaatttttttttttttttggttgaa

SEQ ID NO: 149181 - DNA, 618 bp, Cannabis sativa
  modified_base (131)..(132): a, c, t, g, unknown or other
  modified_base (413)..(414): a, c, t, g, unknown or other
tagaaactacctcaaaaccacaccaaaggctagaactatgattttcctcaaaaacaagcttcaatccaacctaagctcaagcaatttcaccacaaattttgaaaactcaaagagggtttgagagagagagnnagaggggtcgggtgagaggggaaacaaccaaaattttttatttgctttttctcaaaaatcaatattagcaaggtaaatccaataaggtcaaaagaccaaaatgcccttagggccaaaacacacataatcatcctcacaagggtgttttagtcatttcatgcatatttaatttcaaataaaatttcagattttatattaccaaataaaatgccaaataatcccattcaaattacatttcgggcccgaacccagttcggtccgaaatacccggttgtgactannccgcgccaacctgtcagaacacaattgaaaagacaatacaggtatactatataataatatagtttcattaagcacataattaaattaatatcatcagtttaatcttctcgggtcacaattactaaaatgtccctcgctcaccaacagggtcttaccatattataaacatattaattcacataaattgaactatataataatata

SEQ ID NO: 149182 - DNA, 524 bp, Cannabis sativa
aggacccagacccagacctagaacggaacacagacctagactcatacccaaactgagactgaaactccggcccagacacgttcgtgtacccagaccgcaagtgagactcggacttggacctaaatctgggacccgatccaaaacacaaacttggacctagatagggatccaaatacgaacctagctcggaccaagacccagactaggatcaaaatgctggacatagatgttgaccgagatcctgaccaagacccaaacttggacctgcactcgggacccgaacatggacctcgacccgagcctagacctagatcggggtctagacctggacacaaacccagacgtagactcggacctgaactccaacccacacctagaatcagacccaaagctaaacccagacccagacccaaactcaaacccataccatgatcgaaaccaaggacttagagccagaacagaatccagactcagatggggattggaacttgggactcagacccaaccttgaccaagacccagga

SEQ ID NO: 149183 - DNA, 640 bp, Cannabis sativa
tttattttttaaaaaaataaaattgacacccaattaaaaaaaattaacacccaattaaaataattaacaaccaatcaatttttatttttattttcttttagaaaaaccaatttttaatattatttatcttttcctaggagctccattgttttattcccactcttccttcatagccccaactataacaacaaagcctattaaaaaagaagagcaaacaaataatcatacggaccttgaatgcacgctgcatatccttttctgtttcaaactcaacaaaagcttaaccacgtgaagcaccagttactgaagcaagtaacaataactccataaattacataacactaactccataaattacataaatgcagagaaaaaaaaagggagggtttctctaaatcataaataaattacataaaacatacaaaccattcatatataaattataaaaaaaaaaagataaaatgattatagaattatgagaaggagacgaagatggagacgaagagattgagaaaagaaggacgtttctgaataaaagagagagaataaaaaaattaattaattggtggaggttaaaaataattaattatttatttaaataattattatttaatttaaaaatattattaaaaaataattt

SEQ ID NO: 149184 - DNA, 816 bp, Cannabis sativa
actaatcagattgtaaagagttttatttagggtataaaacccaacattttacccttgacaggcattacacaactgcaaaattttaagagagttaaagatatatgctttggtcaatattttggtgagaatagtaggtgtagggtggccaagtttgaagtgacagagattaatatcaatagaaagagtagaaaaaaaaaagcaacattagatggaatgttagaataagaagaaattaagtctttattgatcgcagtggaattacatagagactaagtacacgattggattcaagaattagaattacaaacctcagaaactaaagaaacattagaagtgtgtttacaccaaaactagccttggtgacgtgtacatgaatgtttaacacatggtaagaaagatgacatctcgtagttgagtagtcccgagtcatagtaagtcgacctgagaggggtccctagccctacacccaggttgacttcgataactcttcgatggaagttcggactttaataacttgaatctaactcactatttatcagtcaactgtaccatgaagacatgtaacaatcaaatacaggcgccgatagttgaaattacatgaacctgcaccccgagagtcaacttgggcacctaaggtttcacccagcacccaggttgacatcatcaattagggtttcagtttccaggaccatcttagagaaaaaggatcaaacattgcattgggacatgaactagacatactgtgaactgttgctataatttataaacactacgcaagtatacgcaatcaagtagtaaaactcacacaggtgaggt

SEQ ID NO: 149185 - DNA, 557 bp, Cannabis sativa
aaaaaaaaaacacttacttaaataataataataacaatcatatttttctataatcattacactatatactcaaatttttaatctttttactattttattgcgagacggaattttttttttaaaaatactataagttttatattgtgtactgcattaagttttcactgtttttctacggttattttttagttgttccacttttgttttaattgttctattttgttgttttacggttgtttataaaaagatagtttttgtaaagaaaattgtgtgacagtaaaattgtaaattttaaattcaatatttttgtaaaaaaactccctatttttctctatataccacctaatttatttatttattttatattaatatttttttaacaaaagcaatttaaaattctatatacgcattaatcataaactttttaataaataaatgatagggtgactattcaatggttacatttttattgtaaccatgtggttacatttttttttacctataatagaaggttaacaataagtaaaaattctatttttagatttaattaattataa

SEQ ID NO: 149186 - DNA, 516 bp, Cannabis sativa
aagtatttacccctaatggagttctcctacaataatagttatcaagccacaatcggaatggcaccatatgagatgttgtatggacgaaaggtaggtcaccgcttcactaggatgaagttggagaaataggtccagaagcagtaagagaagcttcagaagctgtggaaaagatacggcaaaggatgctcaatgcccaaagtagacagaaaagttatgcaaatttgaaaagacaggaggttgagttttccgtaggggacttagtgttcttgaaggtatcacctatgaaggggattatgcgtttcggaaaaaagggaaaagttaagcccaagatttataggtccttttgaaatactggacagagttggtcaggtagcgtaccgttaggccctaccgccaacattaggagaaacgcataatgttttccacatttccatgttatgtaagtatgtacctgatctgacacatgtgcttaagtacgagaacttgaacttatagcaggacatgagctttatggca

SEQ ID NO: 149187 - DNA, 843 bp, Cannabis sativa
atcaggttttttcttttgttttttcgaaatccatcacgtcaatcaagttgagcatcactacataataaataaaggtctagagtgagagtttatttttctctttattactgatatctctttttttatttttgtcttttatatgtttcatattatgagtatgaattaataattttcatctctttaatgtttttcacttttaactttttttttacagatatagttaatcagttgatattttgaaaatagactaattagtttgttattttgtagacatacatgatgatatgtgtttgaaaaaatgaattgttattctaatatacgaaaagtagattaataagtttattggtgtatatcattatatttgatcatagtttactctgtattgaaaaatataaaataatgttccaacaatcaatagtaggtttattgacatatataatggcaggctatatgaaataaaatgaattattgttctaatgtacgaaaaaaaaaatggaaatttatttcaatatgcgaaagtaaaccaatagatttattaacatatacgatagtataggctacacaaaaacgctactaagtaaacaatgaatgaaatccaggtttactatgtaagtctataagacatcttacagtcatgtactttgtatacaaccaaatttgatgtctcatcctggaaaaaaaaaactaattagtttgttattttataggcacacattgtgtttgaaacaaattataataaattgttgttccaatatacggaaaatagactaatacgtttattggcgtatatcattatgtttgattatagtttaatttgtattgaaaaaaaataaaatgttgttc

SEQ ID NO: 149188 - DNA, 953 bp, Cannabis sativa
taaaataatttccaacaataacaacaatcatataaattattattcgaatattatcatttatactcagacaatcagaatcaaacgatcacgcattactcttaaggtgaaacacaaatcactactagcatttgtcacaaataaacattagtatacagatatttggtaatacaaaatcattataccaataatagaaataatattcatttaataatataaattatatatatgttatctcataaagtaaccatctttattacatcacattgcctaatcaggccagtcgattctttaatctgataatcatgtattgcattacctaatcaggcaagctcgtgccatagcctggtactcacatgtcacttcgcctacgctgccagaaaaaaatccaacaatggtttcagtttatgccataacccgacattcacatgtcactaccacccgtacctaataaggtacatcgccaagaaaacccagcaacagtttcaatctatgccatagcctgacattctcatatcactgctgcccgtacctaataaggtatcaccaacaagaatatcgcatcacctaatcaggtgagcccgtatatcacatttatggtatcatcacattatcattgcctaatcaggcaatcttttcattacataataataactgtatcttaatctcaatatcaatcaattctcaacaatattatgttaactcaaactttaggtctccttgttttgatgattaacaaatattttattattatttgttactaatgatttgttgattttgtagcacaattaaaaggtaaaataaatttttttcaaggcaaaatagtaattttaccgaacttctcaaagtgacccaaagtagattcaacaagcaaattaactacttcatacttgataagagcaaaagattcatcaaggtatcaagaattcaagaccctattcaaaagaggtcttcaa

SEQ ID NO: 149189 - DNA, 548 bp, Cannabis sativa
attttatataatttacaaaagttgggttacaccgcgcaaagcgcggcttagttccctagtgtatgatatattaaggcagttctcatcatttttttctagtgttttgatcttgttttgagcttaattatctctttgtgagatatttattagttttttctttttttttttgcaataaagatatttattagttgaagtccggattttggtagagaagaataaaaaattgacttatatattgtcttttaaattttaatagaagaaaagaacactaaattggtgcgattatttttctttaaagaattttctagaagtttatttattttagaaaagaaaaatattggttttttatttttgtcatgaaaaatattggttttttttttttctacatttttacgaaatttcatatagaaactcatatggtaactaacgtagcaatttaaattgaaaccgagattcgtataacaatccacatagaaactaccggagaaactagaaactcaaattgtaaaggctaattagcaattttccctccgaactttgacatatac

SEQ ID NO: 149190 - DNA, 514 bp, Cannabis sativa
  modified_base (466)..(480): a, c, t, g, unknown or other
tattttgatgataaataaatatttgattattatttgttactaatattttcttgattattttacaagcaaatcacaaagtatcaatatttgctcggtaaaatcaaacacaatcaaagaagtagtatcaacaagtatatcaactacttcatacttcataagagcaaaagtttcatcaagagatcaagaattcaagaccctatccaaaagaggacttcaaaagctcaaagtcaacccaaaagtcaaagtcaaagtcaactctcggagaaaaatcaaccttggatcaaaacatgctaatcaagctaggaagctcatctacatcaagactacacacaatcaagtggtataagtttactttagtctttgtcaaagtgatttgcatagtacactagggtttataagtttaaaagtttggctcactaacttgtgcgataagttatttcacaaaaaattgttgggttttgtgccnnnnnnnnnnnnnnnttcaatataatcagattcactaattaataaagat

SEQ ID NO: 149191 - DNA, 647 bp, Cannabis sativa
  modified_base (72)..(75): a, c, t, g, unknown or other
  modified_base (620)..(621): a, c, t, g, unknown or other
tgccctgatatgctaatctaatggctatagatttgcctaacatatatttgatatgttattctgacggcaacnnnnatgtacgctaaacatgtataaacatatggcataaacattatactaatcttaccttgattctgaattcaggtttgccggtcaacctgagtggaacaattgctcggcgaattacaggctcctaaatcacaccaatcacagtagtggtaagtgacacgctaaatcactttctggggacttaaacttgaaactaaaagtttccatatcgataaataacatggcaataccctaaacaacacaaaaatgggaaaaactaaggttctcgaaattgccccaaccggtagaccggttgccaatcggaatttcggttttgaagggtttcttggggaccaacccgaattccagttcctacaggcccctctgaaccggaattccgatttagtgcaggaatgactaaaaattccatatctcaaccaaaacaaccccgatccacaagaaaccttccagacctgctctaagcatcctagagaccattttccaagcaacaaaacacaactacaagcacaggaacaaaacttgccattaaagagccaagcttgagttctaannctcaaagcttgctcaaacatcaaacc

SEQ ID NO: 149192 - DNA, 908 bp, Cannabis sativa
ggccagggggagcctataggctggccatgatctgttcacaagctggccagctaaaaagtgacttctggatccaaggagacttcgttccactaagggaacctaacctcttcaaggaaacaatgtacacagatgtgctcaacttgcaaaaggctggcctccacactcaaaggttggcctcctcttggtggagctatggtaacctgccaggtcttggcagaactatggtcagcgaggattgacgtgtaggaccatggacgaccagactttcttgtaggcctatggatggccaagattgacctggcaagatttcatgtacaactctacacgtggacacaagatatggactgggaattgggacctaaaagtccaacaaactggttgaagaatatctagaatcaagggcatttgatcttttgtaaatatctaactaacaatgatatttttaagggatttgaattgtaaacatagggtttaaggcttcttatataaaggccttaaccctagcctataaacctatgctgcctctaaatcacttagcctccaaatagctctctctctctctctctctctctcatgtacacgcccattagggctctctctctcttctcttcatctctctcacacgcctactctaggctagctaacacctttggctggccactaccctaggttgtccaacaccctagactgtccaacacatgagatctacctctttgtaatctcctaagaagggtgctctataataacagatcccacctatagtgatctagatagtatttccctttgtataatacaacgaaagcaggagtaagtcattacccgctatcacaaggaggccaaatgtaacgccctaactagcataggcgtgttaacgtgattttaaacttactgtgcagctcgttgctaat

SEQ ID NO: 149193 - DNA, 828 bp, Cannabis sativa
aataacactggttgatcttagatcaaaagatcataatcctgacatggtaaggttcgatcttaagagtgttatttgtgttctttaagttgttagtcaaagcttgccatttggttcgattcacatgtacagcttgggaacatgatagtacaattgagtgggagccctaatcatgcatatggaatctgtagcttctatctagacatagatgtgaaatgatgatttcctttgagcttggcttgatagagataaatggaagagctcttatttcagtgataatattagtttactgaaatatcatttatatgaagctaagtgttttaaggataaaatacgttgagggttaaaatgttaaatttggccctacttggtataaatcatatatagaggatctttaattattgggattaaaacgatggtcaaaattttcttagcgtatctatatcgtggaacatatagagtgttctatataattaagtgcttgaattggaaaatatggtattggtggaagaataggataaatagttgtaaaatagcaaaattacaagtgtgggcccacatcctatggccggaaacatgtgcttaattttaccgtttatttatcaatttttaatgccaaataattcaaacctaaacctacttggattcctataaatagagagggatggactcaaaattgacatcctatgttacacttgccttcactaaaatttgagtcttctgtctctctacaattttgaatccttctctctctctctctttctctacaatttttcgaacccttatagtgatagagtacatgcccacatatagcaagttggtactcaatca

SEQ ID NO: 149194 - DNA, 635 bp, Cannabis sativa
acaaggtcaattaagaagaagaattgggcgactgctgggtttcgatatcttatgagctctctacagcggtacaagactaagaacacgaaaaatgtctctggctacaccatatttttacaggtaagttttcaaattttttgtgatggtagtaattattctctcgtgtactgtggtgctaatagatgtatgtatttttgtttagttgcagcttgtatatttgacgcatgttgactggactactagtcacatggaccgcactgtggctccaattgacttttggaccacaaaacagtgcaaatcagtgtacaagtggattcgagaccacggtggtcacacaagtggaaaggtacatttagtacttcaattttctgatgcgttaaaattttatttgggagatatgctaactagtttttttggtgtactaagcatgtgaaattgactaaccatatgtgttagtaccaaattttgaatccggtgcagttgggcaacccacaaatgacgcaatatacaaagctatgtgtgagttgaaagatgagatctttcgccttgatttgaaggtgaacagcacaaaagagctgttactgaaggtagtctcaagttaccttggcaaaggtactatgaatgaagtgttggag

SEQ ID NO: 149195 - DNA, 600 bp, Cannabis sativa
ataccataagttgatttataatttgttgtgggaccaaattagaaatactcaaaactcattatataatgagcctataaataggtactggtacccaagaaaccctaagagtttctgtattctctccttccccatcagagaaaatacctaagaaagtagtgtattctctgaagatcaaaaccttctctgaaatctccaacaatggcttcaggttagtacttccgctcatcttatatcatcatcgtcttctttaattaagcaaaggttatataaatttatgatttagggttttctatattaaaacacttttaggaatatatttagatctctgatatttatatttcttgactgttttataaatcttaacaagtggtattagattcacttttactgaattgattgaaaatccgatgattttattgttcatgaaatttggagattttaaaaaaattaagtttttgatttttttttgaataatactgctgccgcatttttttaagatacaatcatatatatatcgtttgaatgggttgatgggaatatacatatgtgtatatgtattgtatttttggtggactttgatcgatgttaattgttccagag

SEQ ID NO: 149196 - DNA, 620 bp, Cannabis sativa
agggcacaaaacccaacaggtaatttcctcaggttctcaattagaggagatgagagggattttaagatggttacgtatatgaagggccttttgctcttaacgattcattttccgatcccatctctcttgaaattgaggctaaatttgatgcttggattagcaaatgattgctaaaatatcctaggtgatttttttctttattctgttttttaatttttttcattgtttgcatttcgttttatttcgccaattatttgagttcaatattgtttctttgttgtttattttttgatataggccttacaattgttatgaggatggtgcgaagaaaatttcctcggggttcagattaggtgtagattatgttgaagataaaacttggttttatcatttgtcttgttgtgagatgtttatcaatgactcggtaatatttctttttccttttaaatttttttatcattgtatttaagtttagctactgttattaagtttttgtaatatttgttcactatttcttttttgtttctttattgtgttgtttcagcatatgaacactatcttctatcaccttaagaaaaaggggaaatattcttctgctgttacagtgaatttcgcaagaa

SEQ ID NO: 149197 - DNA, 617 bp, Cannabis sativa
ttacttcctcccgaagtaaagcttaaacaaatcttatcctgaacatatatgctcactcctcccaaaatgggacttggaaaggtcttctctcgaagacccacggttgttcaaacaattctttcaataatttttacgaactgtataagaacaaaacaaacaccaattaaacctagctgaacactctaggttctcgcaaaagaaactctctcctcgcatagatgaaattatgaaaaatgaagctagaagaggctagaatcgtttggttgctctctaagtcctatttaaaaaacatacaaaccctagagacaaccacaaacatgattatccagctgtacaaaactttcttaaaaaatttctttatttacagcatcagaatcagattctgatgcatcatattacgaccaaaaaggaaacttttctaaaatgaccaatatcacgatttgaacttcaaaacctgtcaaataaagtttatttgatctgctaaaaatatatcaaaactgaattcattaattagaaaagagttgagatgcaaaatgatcctatatttaaaaactaagttagtaaatgtctattttaaaaaaaaattaagaaaatggtcaaatataataaattagcta

SEQ ID NO: 149198 - DNA, 811 bp, Cannabis sativa
  modified_base (393)..(402): a, c, t, g, unknown or other
caagaaataaaatctataaaagtcgtagttcaagataaaaaattatatttattcttataagtattttaaaaactattaatcactcctaaaagtatttccaatagtgcatcattttacctaattggtatggaattttttacattttttttactccaataacacaccaaaatatgcactaaattggtgtgcaccaaattatacaccattaagaccatctccatgttggaagttattttatcaggatctagatatactaacaagtatgttgattataattctataacctaacatcctaaatatgaattcctaaaacaataaaaataaacacatttaaagtttggaaagcctaacattgatgggagcagaataataatgactccttccattcagatnnnnnnnnnntgttcctttctgtcacagagtaataacaagatctgaacttggatctccttcaggtattggattcttcacagtcttacagtacttgacttgatatgagtgagcatgtactcttaactctggttcgaattgaatgaagaagaagagggagaatgatttcaaaattttatagaagaaggttctcaattttgttatctgatagaaaagtctgaattaggttattagaatgagagccatcttattccttatataagatttcttctagggcttaagatttaaattatatggaataaaaaagataaaataatagcaaaaaatagccatagtggtaggccatacatagtgggcctcactagttacaattttttcattttattcatattttctaatttcaattctataaatgtcaaaa

SEQ ID NO: 149199 - DNA, 654 bp, Cannabis sativa
tccagccagaaaatcacagaacaaaccattgaaactcaacttgccattaaagaccaaagctttgaactcaaagcttaaacttgcacaaaacttaaaacaaacctcaaaatcagctactaggaactaaaatcaatccaaactaaccctaaaattcgaactaaacaagaatcaaaccctaatagcccccaatttacaatatcacaagttcaaactaagtaaaatgcttaaaaacacataatcaagagttctagggttttacctttgctctagtctcacaaacccttgctgaatactcagaaaataccagcttgaagatgatttttcccctggtttttgccccagccgaaagagaatagagagagagttctatttttgattttcttctttttcttaatttttcctcaaatggaaaaggattttccccaattaatccttactaaatattacttgctatgtgtcaaataataaggcagccacctaactcaccatttaaccaaatgaccaaaatgcccttaacccaaaactaaagtttttctagagctaggggtaaaatggtcaaatttcataatcccgctcaatccagatattttattttctcaaaaatatttcccactaagaaataaggttctgaacttacccatgtgatcaaactag

SEQ ID NO: 149200 - DNA, 983 bp, Cannabis sativa
tctgttaaaagattgtgtttcataatgtattaaaccaatctcattgtgacacactaaataaatgaaaaattagttaacatatcggacttatattaagttaacacagtatgatacgcagagatcttcattcattagaatggtaacacaaaagacataagtctcttatatatgccaaggcatgtaaaagagaactattgtaaagccttttggcccaattatatggcaacaaaagtgtaatttttcgagcccattgaaaaagttttaaaaaaagaattttgttatttattgttattattattattattttacagtagagtaaatttgaacttgaaattaaaattttttcttatatatctttaagtagttcttatttggagggaaatgggtcttagagaaaatataaacagcacacattataaacaaagaacaaaattagcaatcctacaaaagaatacaaatttattatatttaaaattattaggggtattcatcaaaccgttcaaattgcccataccgcaaaaaaatgcagtataaaattctttgcgatgcggtcgtaatttgaatttttattaaactgcatggtgcggtttgccgttttgaattgttaatatgcagttcaaacctcaccgcatgtacattataaaaatattttcttttaatatatttatttgggtctaatatatgaatgtccaactcaaaactcactaataattgtattattgaaacttatttttttatatatatatttagtttcaagccttatggtatttttgacaagtgtttatcaaactttgttgtacccccagaaattgcaaaaaccacactgcaccgcactattatttgcgatgcagtttctgctgttttctagtttcgtggtgcgggtgtggtttgagaaattagaaagactacatgtgcgggttagcttgaaaaaatagtcaaaaaccgcactacccgcaccatgaacacccctagaaattatgtct

SEQ ID NO: 149201 - DNA, 1386 bp, Cannabis sativa
  modified_base (936)..(942): a, c, t, g, unknown or other
  modified_base (1355)..(1360): a, c, t, g, unknown or other
ctgaattttatgggtgtgattgggaatgatagggtggcatgtgccacgtttaaattccaggaagatgctttgatatggtgggaaatgatatctctcactaaggatgtggccagaatgacctgggaggaattccaggaattgtttaatgctaaatattataatgaggcagtccgcagtgcaaagcggaaggaatttgttgagttgggagggtatgtcagtgactgaatacacaactaaatttgatcgcttggctaagttagcttctggaatcgtaccaacggattttagcaagaaggaaaagtatttggctagactgaatgcaaagatcaggcatgacctggttattacaacgaatgataccacaacatatgcagaaatggttgataaggctcttcgagctgaaggagcagtgaaatttttgcatgaaacccgagagtcttctagtgtcggtgggaccactactctccctatttctggccctggaaaagagagtggtgattctacttttgagcagaagaaaagaacttttccatcttcgggaagttcagggcaaggaaaaaggtttcgaggaaaccagaatagaggggggcgtcagacttactcctatccagagtgcccgcgctgtaagaagcaccatcccgagacttgtaaccggagagcctgtttccaatgtggttcagtaggacatcttaagaaagattgtccttagttgaagaaagaggaaccaaaacctgaagccaaacctgcacctgcatgtgtatttgctatcacccaagctgatgctcctgccagcccttcagtagttacaggtcagcttctaatcaatgttttgtctatactgttttatttgattcgggtgctactcgatcttatgtgtcattgagagttcttaatcaacttgatagacctagtgatgtttttgagacgggatttggnnnnnnnttgcctaatggggaattaattatatcaagaaaatggattagatcagtgttgattagaattgaaggtagagaattgagtgctgatcttgtggagttaccattggccgagttcgatattatactcggtatggactttttgtccaaatactctgctagtattgattgtaaacgaaaaatggtaacttttgaaccggagaatgaggaaccttttgtctttgttggttcggtccacagttctcgtgttccaagaatctcagcattgaaggccagggatttgttacgcagtggatgtgttggatttctggcagttgtagtggattccagtaaacaggtgttacttggacccgaacaggttagagtagttaaagaattcctggatgtatttccagaggaattactgttgggttttatgcnnnnnntaaaactcatttcaatgtaatcagat

SEQ ID NO: 149202 - DNA, 513 bp, Cannabis sativa
gattacgtatatatatgaatagggttatgcgagcaaggcataatcaggttaggctcggtaaccaaaaccgaggtaaaccctactaaggccttatagtatatagacgtattagagcaacacgtaggtctacgccacgtagacataaataggcatgcgagcgtaacatgcatgtctatagcaaatagacaaatagtgcagtgccaatattaattatgtgttatacatattgagattaagggttatgcgttcaaggcataataaagttggactcggtaaccagaaccaagatgaactattctaaggccttattgtatttagacgtgtgagaacaacacatagatctacgtcacgtagacataaatagacgtgtgagcgcaacacgtaggtctacgccacatagacataaataggcatgtgaacgcaacatacaagtctgtgtcacataggcatatatgaatggcattactgtttatatagtatgataagcatgatattgatattttatactgtctt

SEQ ID NO: 149203 - DNA, 806 bp, Cannabis sativa
  modified_base (491)..(491): a, c, t, g, unknown or other
ctcctgatgaattactagacaaggtctgccgcctaccacttggcccacaagtggaactcgtaactggggattggacggctgaccatttgcagtcggggaagtattcatcgctcgatcttcgtccgtctcacccagggggatgacattcggaggttgctgacctacagttttgtaggcttttcgtatcaacatagtagcttgccgactacaattttcaatctctgtatgatgagcccttaacgcctccatctctccgtctctccactcggtaaagatacgcctttgttcttcgaacgcgagatttaccgcagcacggagttcttcctgatcatgatttagggtattgttatgaccgtgcatgagtccaagagcttcacgtagatcttttgtaactcagtagcatctccgatggttgtctgggtgttggctcctggcggaacggttgtgttatgaatgctctagttgagtgcggaactgttattcccagtctnttgcacactaggcgcgatttcatctataggagtcgttacaccgttacccacgtttgccggctgtccaggattaacagcttgcgaaacctttgtatttcctgggttcggcaatgcaggtgttcttgaaggaattttacaacaccaaaaatgaattataataataatacgaactaatgaacaagtgcgagtattcaacccagaatggcgagtactcaaaccgagaacacaaatactgagctgtaagaaagtgagagaaggatttttacgtggttggggtgttaatgagcgttagtccacgagtctttgttatttatg

SEQ ID NO: 149204 - DNA, 1064 bp, Cannabis sativa
  modified_base (254)..(258): a, c, t, g, unknown or other
gttcccaaaattgccccaaccggtagaccggttccccaaccgaaattctggttcctacaggcctctctgaaccggaattccagatcagtgcagaaatttccaaaaatttcattacttgaccaaatcaaccccaatccaattcaaactttccagacctgttctatacaccctagagaacattttcaaggcaacaaaacatccacccaaacacagaatcaaattccaccattaaagctccaagtttgagttcaaannnnnaacttggttaaatctaactaacaatcaacaaaacctgcttgaatccacataactaaacatatttaagcttcagataacaacattaagaattaacatcagctacaacaagcaaaacctcaaagcatgcaactttcacttacttacaattcaagaaattcaagaagacaaagtcaaaagcttaccaagagttcaagatcccttaaaatatgctggaatcaacaagaagaaggagaacaagacagaaatcccagctggttttaagggtttcgaaagagagagaacttgagagtgaaatgcaagcttttatctaacttttgatttttccataaaatgaataaaagaattgattttccttattttattaaattgtttcagccaaacaaagctagaaaaatcagattaataatttaattaaaaaatccacaaaaatcaaagcacatatgggcaaaatgacccttttgccctctgacattaaattgacataaaagggtactaagggtatttttggaaattctaaattcctagctaatctcaacatttccaatatctaaccatacctccccgctatactaaaataccaagatgtgattctactgagccatacaccgagttccaatgttgccgggcactgaacatgcaaaaatatgaaatttccacatatgacatataaaatgcattctgaattcaaataagtcatcataaattaataattgggaattaataactaatttcataattaaaccttaattatcttctaatttctaaatttaaactaagcggtctttacaactatcccccccttaaaa

SEQ ID NO: 149205 - DNA, 704 bp, Cannabis sativa
  modified_base (671)..(679): a, c, t, g, unknown or other
ttttatctaggatgatccatacttgtttaaatattgccgtgatcaaatagtacgtatatgtatcccaatttgtgatcaaacgttgcatatgcatactgctgcaaaaaatttacaatgttgtttttattggcccataatttttcgtgatacatatgcatactgtaagacctgtgaacgttgtcaaaagttaggaagttcgtccataagaaacatgcctttaaaccctattcttattgttgatgtattgatgtttgcgatattgattttgtgggaccttttcctaactcgtttggaaatttttatattcttgttgggattgattatgtttcaaaatgggtcgaaactatcgcatatcacacaaacgaccacaaagtggcgattcatttcttgtaagaaaatatttttttctgttttggcacaccacgagctatcattagtgttgaaggtacacatttttgtaataagccatttgaacatctcatgaaaaattatgacattacacacaaagtcagtacaccatatcatcctcaaacaagtggtcaaataaagcacatcctagaaaaaaaaacggtaaacccaactataaaagattcgtccctgagactaactaatgctttatgggcacatcgtactgcatggaaaacttgatggaaatattttaccaggatctnnnnnnnnnaccaagtatgttttattaacatcct

SEQ ID NO: 149206 - DNA, 539 bp, Cannabis sativa
cttcttgtattttatttcgctgggcgtccagggcgtccatttaataggacttagcctgggaacctataagccaggcaggtcagacaacaatcataaaaacttaatgccactcttatagattttaaggcaacacattaaaatgaataactataaactaatatgcttcctaacatgctttaatactcatataaaatactaaacaagtacaagcttactgaactgtgagccgagccttctctgatgatgattgtacatgtcttggcgatcttcggtagacaaacctagcggctgtgataccaaaattgtaacgccctaatgctaaacgctacaattatttttcaattgcactgctatctttgctaatcaaagaatttcttgaaaatcatgtcaaattaaaacttttagtattaactatgaaactttataaattttacataatcatttacaaaagccaggatcccatttctaaacttttttacaaaatattccaaagtacattaatcaggccgcacagtgactacaaaatgataaccccagat

SEQ ID NO: 149207 - DNA, 1205 bp, Cannabis sativa
gactgggactgtgacccaagccccgaccccggtctcggtcccaaacctggacccggacacggactaggacccaagatccgaatcggaacgagactgggacctaagattggataaggatcttgacccacaacccagggcttggatacccaacccctagtgggcgtctagatcttggaatcgtaccaagacccgaacttggaaccacttccaaactaggacccaaacccaaacttggatccaagaatcgaaacaagaataagaactggaataaggatcgtggaaccggaattagacctggacccaaaccagacctagacgcaaaaccgaataataagccggatccaagctgggatcaatacacagacccagacccgaacccaaacccagacttgcgccaggacctgcaacccaaattccgtaacccaagacccgtgacccaggactggggccagaatcgagacctgtactagaacccaaacgcagacccaaacctagacccagactaagacccgaacccagacacagactgaaacttggacccagacccagactcggactcgtacaagaactcagactcgaacccgggacggggacctagaccgatatcaagtatgggacctaaacccgaactaggaccaagacctgaactaggactaggattagaacccggattgggaatgggattgagactcgggacctgggaccaagatcgagacctgggaccgagaccgagactgggaccgggacatgggaccgggattgcgacccgggacccgatactcaaacctaggaccttagaactgaaccatgacccaaacctagaccaagccaagacccaagacaaggaccagtactgaacacggaccgggacctaagatcctgccctaaatttgggacctggatccatgactcaggacccaagacccaaacctagacgcaaacatccaccggacacccaaaccatgacccaagacatgagctagaactagacaaggatctgcatttggagttgggacccaggacccaagacctgaggcttagacccaatccataatcggtgtctaaatcaaggaatcggacctggaccaagaccctgaccaggacgagaacccgaatccatacaagaagtcaaactagactaaacatgaggttggagtttggatttgtgaccaagactcggacctgaacccaaacacggacctaga

SEQ ID NO: 149208 - DNA, 538 bp, Cannabis sativa
ttcccaaaatacgtggacatggataagggtgacacatggatctgtaagaacacccacgtattaaaaacgactaagtcttggacaaaaaagaacaccacaaggagtgggcctcccggaggagagcataagacacatatttactcttcgggaggctagagccatgttaaggcatttccgggaggtaaagagattacttgaacaatcacttcgcatttaatgctgcatggggaaaaacatattagaacctccatgaaagatgtgacagatggcgtaagccctttttacggcgattacacaacaatcgatgagtctagtgacgactacattatgaggaatcacatcagtcaaaagatgataaaagattatatccacctaactcctaagatacctacggtataataagtcatgtatttcctattttgtatctactaggaatatgtgcccctatgaagctatcacagaaagaaaagtgatccatttctaaggatccctcaaaaaacactataaataccccacaaacagactggaaaggggtcga

SEQ ID NO: 149209 - DNA, 526 bp, Cannabis sativa
ttcaagaaattctgagtaatttacaatgttgaaaacaagtcttacatattttgatgtatgctcgactgttttttttcttatacgcaggtaagtaactgtctaaatattattttcagcattttaactatccaaacttttctaaaaatttacagttaattttaagtaattacaacatacacgatcatgaaaaaaaaattaaattaaaataattttttagataccaaaataaatagaaaatcttccacgaccctttaagagatttactataaaaaatttcatatatttatatagaaaaataggtggaggaaattacactatttttcattttttatttttttattactataaatatatttagtttatataataaaaaataattatcaactactaaactactttttatcattttgtgaatgttcttttatattcttttcttttgtttgggaaggaattacactttatatcctttttttattgttctcttttatttttacccttttttttaaagtctatcatttttacctct

SEQ ID NO: 149210 - DNA, 528 bp, Cannabis sativa
tctttcttcttaacaaacaatacgggagctccccagcgtgacacactaggtcgtgaaaatactaggtcaagcaacccctaaagctgaattttcattttttttaagttttgctggagccattctataagatgccttagagactggttctgctccaagtgctagatcgatgatgaaattgatttctctctacggtgctaaacccaaaagttcatggggaaaagcatctataaattcccaaacaactctaataccctctagccaaactatctcaggcaatgtggtatccaataccacaacctaaaaccctaaacatccatcttgtaacaattctctagctgttaatactgaaatcactggagccggagatccttgaaccgatcccacaaaaataaacgattcctcgccctagggctggaagatcaccatcttctgtttacagtcaatactggctgagtacttggataagaaatccatttcaagtataatatcaaaatcaactaaacccatttctattaactcagcactcaa

SEQ ID NO: 149211 - DNA, 942 bp, Cannabis sativa
tttttctgattttttaaattttttaatttattttttttaattattaatattaggtggcccaataaaatttcaccacgtgtatacttgtgtacacagtgataggtctatttgacacttaaagctaaaaattaacagaagaagtgctgaccaaaacgattatagagtttggggagtttagccctaattttttcagtatgagggttaaaccgtaacaaacttaaaaatatattaccctttcaaaaattgccaagaaaacttaaaccgtaccaaaaatgagttttatgcaatgaaattaaaaattatttttccagtagttcaaggaagcaaaatgtgaggtttacaaactaacaaaattgaaaaatattaaaaaaatgagaaaatttggtgaaaaatactcttttaggcttaaaaacctataaaatcaacaagtagcgtacaaaaaatttattcatgcatatttcagttaaagcaaacctataggcacactaaatacacttattttgacatgttcaaacatataaatacacaagctaatcgaatatataaaaattcacatgttcacttgtttgaaaacaagtctaaagttcacaaaaaattcatacaatgacctataatattgattttttagcaagtatagttcatgtaggtcaagtatcatgaaattttttcatctacacatataagtcatataaatatcatatttggaacgaatatgcataaataagtgagtaaagagaaatgaaatttccatagcggcaaactttatatttcatttaagtatgtcatgcctagctcacttctaatgaaactaaatctctcatcactaagagccttggtcaatatgtccgctagttggaattcggtgctcacaaagcctaacataatatcacctctttggatatggtctctaacgaaattgtgccttatgtcaatatgcttagc

SEQ ID NO: 149212 - DNA, 1026 bp, Cannabis sativa
tttggaacccaggtgccgcggcatggcctggccatgccgcggcctgcccctttttgtgaaacctgggaattggtcccaggtgtggcggcatggcttttgcatgtcgcggctcgccctcgagtttttaggcagattcaagtgcaaactttgaaaatccataactttgtgatccgaactccgatttgggagttctagataccgttggaaagatcattccgagctctatgtgattatattaattttaaatgccatgatattattttatgaatgtgaaatcagggattaaccctatgtgtgaaaatcccaaaatttgtgtgactaggattaccggtacttgatcaggagcacccaagggatttagaatctctgctattacgggacatcaagtaagacagtagtatgcacgtagagttaagctcagtggcgcttatactgtatgttgtgattgtgattaattaagaatcgggattagggttattaccctgaaatgagcagttatttgatctagggttattaccctagtagttaaaagaagttgaatgttatgccttaataaatacgttgggataaagagttatgcgtctaaggcataattaagctagactcggtaaattagtaccttgagtttaattttaatgtggtctagggtcattaccctaatatattatggaggtaagaaagcgttaatatatggtaatattattaatccagtgaaaacattagttagggttattatcctaagattttatatgatgtggtaaatgttgaatacacgcatatatgttaagagttatgtgtaaaagacataactgggttagaactggtatatatgaccaagataaaccattgaaggaacgtaatgtatggattacgtatatatatatatgtgaatagggttatgcgagcaaggcataacctggttaggctcggtaaccaaaagcgaggtaagccctactaaggccttattgtatatagacgtgtgagagcaacacgtaggtctacaccacgtagacataaataggcatg

SEQ ID NO: 149213 - DNA, 790 bp, Cannabis sativa
aattcctcaattaactcataattatctaattagggttttgctaatccttttcctaattctgggtattacagatgccctgtagttcaccgaaggaaatagaatacccagaacaacctggggtgcgtgcatgtagctcttggagctccttggagctcaagagatgcatgcgcatcactctccgtgcgtgaaacacatctttaaccctccttcccgaagtggattgactacttgaagtcagctttactcccaatgactcttttaccctatgatcttttcaaacgaagtctaagctttaatttttatgaaacttcagcattctttcacggaagccgaagcttgcctcataaaaattgaacgtgagtctcgctggcacgatgtttttcgtgaaagaaagataaccgggggtatggcacatcttcaaccctacttttgagattggaaggattgcttgaagtctgtcttactccccgtggtgctttcacctattgatccttacaatcgaagtctaagcttgaatttttatgcaacttcagccttcattcgtaaaagctgaaccttacctcataaaaattaaacgtgactctaacatgcacgatgttttttgtgtaagaaatatcaatgagggtatggcacgtcttctacccttcttcgtagaatggaaggactacttgaagtctgtcttactccctgcagtgctttctccttttgatcttttcaagcaaagtctaagcttgaatttttatgcgacttcagccttcctttgcagaagccgaagcttgcctgataaaaa

SEQ ID NO: 149214 - DNA, 569 bp, Cannabis sativa
taacttgcattgctgatgtaatattttaaacttcagttatgaataaagtgaatcatttttttgtttaagtaattacaaagtgttactctttaaaattaggtaaggggcaatgtgtatgattaatcgaaatttatctagaaatacatgatatagacgagaaagggatcaaaccatcgtaactttttaatttaacctgtctgacgagaaagaaaaatcgaaagttataaatgagatataactcataactcgcgtgcaaagctaaatattaacggctcgcatataggaaagtattaaatgagacatcaatgtgtcttgataaaagaacttcaacctagtgtatgaatagataatataactattcatgtaaggaatcaaaaatgtacaaagtgataagatcattaaaagtatattcaagtttgcttaagatagattataactgttattgcgaggcagaattgataactgctcacaaatcaaaagcctgacagataacaaactgcccgcgcacgtagtagattactaactacttaaataggaaaaatacgagtgttatcccaaaattggcactc

SEQ ID NO: 149215 - DNA, 550 bp, Cannabis sativa
atcttggtcggtcggagctcgtgatagtcggggcttgaaaggtttggggctggatgggaataacagagagagagaggggggggaagttagatatagagagtgggagaagagagcttttgaattgtaagggtaattttggagttttagggtgtttggagaatatttaaagtatttatttaaaggtggtatattaaaagaatagtctaaatttttaagtatattttaacaaattttcctttacaaattaggatcaggaatattaagtatcggacgacgagacacgagataaaaagagataaaacacgacgacgtgacacatttaaaatgaaattgatttgatacgattttttaaaaataaaataaattaaaaaattattaataataatataatgggaaaatgtttagtaaaaattacattattatactatagtaaaatgtttattctgatgtatttttgttgttttttaaatttctaatagtgaatttgttcattttaaaacataaagagacatgtagatagatttaggtatgtggaaatactgttctgatt

SEQ ID NO: 149216 - DNA, 659 bp, Cannabis sativa
  modified_base (431)..(437): a, c, t, g, unknown or other
cacttttattggacttgcattgtcataagcaagaaaaattaagctcatagtggatccaaacttgtgaaatgagtcataaaattagaagagtaattttagactcaaataaagtgaatcaatgtggattcaaacattatgaaaagataacaaaattggagaagtaattttgaatcttaaataatcaaagtggtgaataaaattgataaattttttgttaacttcggtgtaatatttgggttgatctcattgacgagataacttcaaaataatgggtaaaaataatcacattattttgtaagtggtgatgtgagtttgatattttagttttattgagaaaactaaaaatatcaaatggtattttcaaagtgattttaaagagtcatttcaagagaaatacacataaaaatgatattttatataaactttatggnnnnnnngtgggggtgagccacaaatttaatcaaaatttgtggagacattattgattaatttatttgatttttaattcaaattctaaatcaaatttggttatgtgcatatgcaaaattttgacatattatggtgtcaaattttagtgaaaataatttcaagaaagaaattaaatttaagagaaattatagaaacaaagtggtcttctatatttttttaaaaaaaagata

SEQ ID NO: 149217 - DNA, 616 bp, Cannabis sativa
  modified_base (435)..(435): a, c, t, g, unknown or other
ctcggctggttctttctctttggcggctttgtggagggtattcttagcttcctcttccacccacttctcaaactctctgactatctcctccatggctccatcgccggaacccgtctcaagatcgtcagataccctccgtttagtgatgacctccgccatatgaggactgtcagaagagtcaacccgactcttcgttttagtgcgagccatagcgttcaacatgataggtagttttgtggtggttatagcagtctcggccaagggtaactcccctgacgggccgatgggcacccctactagagtgttgacctcaccaaaaggaagagtgtatgtccactcttggggcaaataagatcgtatccccttttcaagctcccaaatgtgcctgttgtacacttcacctcctattctctctcggtagaggtggtcgggcgnctctgacacactactaagcccctcgtccccagacaagttgtgcgggggcgacgctggacaatcttcaaacaaaagcaaaagaaggtcctcgtctactcggtgttcacctccccaataatcgctataacgcatctgtaaaaaggaaaaagcgaggaggtgagtacaccgagtaatgctagta

SEQ ID NO: 149218 - DNA, 817 bp, Cannabis sativa
ttagaatgatgttatatgatgaatagaagctcaaacaaccttaatttttgagtgaaaaatgagtttacatagtgtaggaatgaaaactagccgtttatagccttggatgcaaaaaatgagactgccactaggcaaatcggttcagcagtttccaaatcggttcaccggtttccaaaccggttcaccgatttttggtgaattggttgacctctttgaaatcagttaacctgattccaggcagtgggaaaaaagtccaattttttgaactaaaatggccataactctctactcgattatctgatttcagaaattctaattttgttatcttagttaaatgaaatgtaatttagaaagtcaatcaaaaaaaaaattgaaccaatgggtgagaaaaattatcgcacaatttagtaagtgggacaaaatttgtacttataaactctagtgtactatgcaaatcactttaacaagactaaagtaaatttatacaatttgattgtgtgtagtctttatgtatatgagcttcctatcttgatttgcatgttttgatccaaagttgacttttctccaagagttcactttgactttgtctttcgagttgacttttgaagtcctcttttggatagagtcttgaattcttgatctcttgatgaaacttttgctcttatgaagtatgaagtagttgatatacttgttgaatctacttctttactttaccgagcaaatattggtactttgtgattttcttgcaaaatgatcaagaaaagattagtaacaaataataatcaaatatttgtttatcatcaaaataaatgagtga

SEQ ID NO: 149219 - DNA, 730 bp, Cannabis sativa
gaacatttccaaaaaaccatgcatgcaagaataacataatgaaactaatcctaccctggtgatcttattctgtcctaacaaaggtatatattaaaagactagtgtcgtcatcccctagaaagctattcgaggggaggaaccaactggaagtcaggtatgaagaatggtccaagaggattagtacgggaggaccagaacaatccaggaccggtccaagaaatgactaaggttggaaaaataaaaacttttggcattataaccccatcgtgaatggggcatccaaaacttatgcaactaaccgtcaaattccacgagccttatgctagcataatcttgaacataaggaacatgatgaataatcgatggagacatacaagttccgaaagtgctggcatcgggagctctagagttgggaacctagaaagggaacttagggcggataggtgcctgttctttcccagcttcctcccgaaggatcctccctaaagtagcttgggcgttgatataggccaactcatgttccttcttgaatttatacttcttatatttgttttctgcggaggagatgatgtcctctcggagcgccttctcggtctcagggttgcgaatatgagggcagagaaccttggacaagttgaagtcatccaccgactagccttcaaaaatcaaattggccatcctgcagttaacggtctgttggaaattattgtaccaggatcttagatctact

SEQ ID NO: 149220 - DNA, 1140 bp, Cannabis sativa
taacgagtataagagaattataacattgagtatttttgcctccaaaaataaagataaggtatttaagtgtataaaatctaaaatattaggtatttatggcacaatttaccccaccctagattttaatacctgttcatttcactttaatctcacttcctcattattctctcttcctattcattatcttcttctttttttcactctttgctttgtcaagttctctatatctttctacattaatatataagtttttttttcttgctcaattcttcttcttcatcttcttttcattttttatttagttttggaagtttttagtcacgtttttggaaaagatatgagttagtgtggttttttattctgattttccagaactgagcttgcaaatatagcctctattgcatctagtactgttgaggctgtgcaaaagatggttagtttttttaattatttttttatttattttagtgttgttttacggttgttttccataatttatttttttgacgtcgatttcactgttcttactccatctcgctggaattaatgattggtttctaggtgttctcgtggtgctgtggtggttctatccgtgggtgtggaagatggaggctataaaatacatttcttcttcattctctatggttattttgtgttttttttaattctggttcttctataaatacatttgacgaactcactagaaaaaaagttttgaggtgtgtgattcttttatgttttttttaagtgattatatctgctaattgttttacatttgtttttgtattgttttagtagtttttttattctgattttctaagattaggcttgcaaatatagttgttattgcatatggtattgacgctatgcagaacattgttagttttttaattctttttttctttcttttatttgatttgttttagtgttgttttacaattggtttgccatgattatttttttgacatcgatttcattgtttttctcaatctcaccggaattaatagttgtttttcgattgttctagtgttcctgtagtgattctgtttgtgggtgtgaaagatagaggtctcatttttttttttggtgtttatagtataaaagaaaaaaaaaaaataggtctggacagtataaaagaaa

SEQ ID NO: 149221 - DNA, 728 bp, Cannabis sativa
gtcttgagttacgaagcccttgaattacagtcagacttatcctactaagaatagcaaattcagatccttgataggaaggaaaaagttcttctaaataagaccatcgctttggtcaaagtgctctagaagaacagcaaggtggaggaaccaccttagagttagattctgacatgaggactcaatatccagagctattgtaatgaccacatttcataatatgaattagtaaaggcaattagcattaattattggtatttttataattacttgtgaatttattttattgtgggtcccattatcaaagtgggcattagagttataatttctcaattccgaagattttattaaactctaggtgtattatttgaattatatatgaattatgttattttacaatttttgctttagggacaacaaaaaatgcgatggatgtctacttttagcacatggggaagtctagaacctttttcttagtgggatgtatgttggagaaaatagaataacgagtttaagcggggttatggtttttgaccattttacccctaagcttaagttagcttttgtttaagctttgagggtatttcagtcattcttaagaggggattaggttgcttttgtgtatgttgacggctgccctttttgatgaataatgaatgcattatgttgggaaattaagaaaaatcaaaattcaaagaaataaacaaaaatagagaactctctctttctct

SEQ ID NO: 149222 - DNA, 525 bp, Cannabis sativa
cccagggtgacacactgggccgagaaaaccctatgtcaagcaacccctggagtgtaattttcaattctttaagttctactggagccattatataaggcgctttagaaactgattctgctccaggtgctaagttaatttcaaaatcaatttctctctgaggtggtaaacccggaagttcgtcgggaaaaatatctagaaattctcgaaccaccttgatgtcttctggccgaagaaagtcaggccgaatggtatccaataccacggccaggaaccctaagcattcctctcgtaacaattgtctagttgttagtactgaaattattgggatccgagatcccagaaccgaaccgacgaagacaaacggttcttcaccttcaggctggaagattaccatcttcctcttatagtcaatattggctgagtacttggacaaaaaatccattcccagtataatatcaaaatcactaatttcatctctatcaaatcagcactcaactctctatcctctattctgatcggcataga

SEQ ID NO: 149223 - DNA, 579 bp, Cannabis sativa
  modified_base (67)..(72): a, c, t, g, unknown or other
  modified_base (532)..(547): a, c, t, g, unknown or other
aagggaccgatattgaaattggattagatatgataaacttaccctaatatctattcaattcaatatnnnnnngttgatcctagatcaaacgatctcaatcttgggatggttaggttttagttcagttgcattatttgtgttctttaacctattagttaaagtcgacaaaatggttcttcctatgacgtataggtttagaacagggtagttcaattaaattggagcgctaatcatagatacagaatctatagcttctattcgaacatagaagtgaaacgatgatttccttcgagctttgctaaatacagataaatgatagagcgctcattttagtgattatattagttcaatgaaatatcattctaggtggctaagtgttttatagatgaaatacattgaaagggtgtaacggtagttttgtccctatgcaatgtaaatcatatatagaggatcactgattattaggattataataatacataattcatagcgtatctatatcgtggaatatatagtgttggaattattttannnnnnnnnnnnnnnnactcacaagtatgtttattaacgtcctaaata

SEQ ID NO: 149224 - DNA, 637 bp, Cannabis sativa
ctcagcatgcccccggctgtactcgtcgagggcgtaattgtatttggctatgtggagattctgcctctcctcgtcacccgggactggagtcaacactatgctgtggggcacagtatattcctccgcctcggagggaatcccggagtcatggctcggggccggagtgtccaccctgcggggccgcttagaaggctcctcctccacaatctttccatttcgcttacgctcgagggcagccgactcctcttcttcaccttcttcaacttcctcaagaacctcctcctcgtccaccaagacaatagtgcccgaaggggcactggaggaagacctctcggagtgaccaactgagaagaagcaagaggtaaggaagcatcaggactgtgggctccagcaagagtggccaagatttcgtccatgggtctagctgctgcacaagaaaataagtcaagtgttagaacattcgcgagagcagcatacacttagcaaaaaaggcaataaagccaatcctaccctgactctgtaactcggccctagcaaaatcccaaatcatagcactggcttcatcatccccgagaaagcttcccgagggaaggaaccaactagaggacaaataggctgaatggtccaagggaatggg

SEQ ID NO: 149225 - DNA, 916 bp, Cannabis sativa
tcattggagatactcttatataactagtatcatacaaggtgacatcttagtcttagagcaccccaaacagctataaactaactttggatattaattttttttgttttttaagtagaaaggtaatttttattaaaaaaaatatatatatattctataatttttttttacattttaattgaaaaataaaaataaaatttttggaaattattaaaaaaagcccctttccaaaaaaatttaaatagattttttttcttaattatagtctttttgtattttctttcatcaatattttggacctagaccctcgacactgacttggaaaatggacccggcccaaactctggatcctggacacgaacccaaactcaagctcgagactcgtacccaattttggccccggttccgatgtcagctccggacctaatcctaaattcagactttaacttgaatctagacataatttaaataaaaacaaaactaaaaataaaatttacgcttttattttaaaattaaaaaacaaaatgagttatagaatatatttttattttttaaaaataaaataatttaaaaaataaaaatattatccaactccaccttattttctaaaatattacaattattccatcaactacttcatcccaatttttctgttttttgacaggcaatatataaattaagattgagcatataatgtatttgcatttatttataccatacaaataattactagcaatgagatttatttattttttttgataaacataagtagaggcactgagtgagttggtaataattcaatgaatgggtccccacttcagctaacccgtcaacgattcaccatcgcttgcattgaataagttcattaaaagaagccattgaggctacctcggtaataaaggagagggatccaaagggt

SEQ ID NO: 149226 - DNA, 518 bp, Cannabis sativa
ttaaataatttccaacactttcttcatggtcacggacttcaaattcctggagcttttgaactatatcattctgcaatacaccaaatggatttgatgatgatggatcagcaggagttaatttctctttaggtttccaaccattcacaacctgtttatagccctcttcatcgactacattcttcatatcatcatttccctgcttttgcttacccttgacaacccactcttgtttctttgcttccttccttctacactcctccgtgggatgccccattcctttgcaatgtttgcaaataatgggcttccactcatatttaactatcattgatatatcttccccatattcattttcaaagtagatcagcccaggaaactcttgttctagtgacacctctatgagaattcggggaaaaaggagcttatccctttcccttgtaacctcatccaccattattggttttcctaactgacctactatcttaaacaatgatttctgcccccaatacttgagctccaaa

SEQ ID NO: 149227 - DNA, 505 bp, Cannabis sativa
attagtaatcctgcttaggggatttgggtgggatttgggtttcataaataacttaagtagcgttaagtagcgtgcctaattatttagggcgttatagtggtattggaggaaatggtttctgatataactctttttaatgttccatcctcttctactcaagtagaggaaaatcccacttcctcggttgaatctttgcaagttgatacaatcgagaaatctaccactaacgttcctgttcagaagatcgcgactccttgtcgtagtgggagggtttctactaaatcatctcattatggcttggatggtgaaatcaatatggtcgttgatgacggtattgatgacgacccattaacctataaacaggttatggcaagtccagaacagaaacaatggtcagccatcatggattccgaaatgagttccatgaaaaagaacaaagtctgggagtatgtagacgcacatgatcactatcgtcaaatttgatgtaagtgggtctacaagaaga

SEQ ID NO: 149228 - DNA, 815 bp, Cannabis sativa
aagtaaggtttaagatcttgatacatcttggtggtgccaggatgtagggaatatggagtagtatgagcttcttcaagaatttcattcctgaggtccgcattattaggaacacaaaccctggtcttgaacaacaacattccactgtctgacactataaaggctgtggcttgtccagctgatacctcttctctgatcttttctaactctggatcagttaactaggcagctttaattcgttctaacagattagattgcaacgtcaagttatgaattttgcctataacaaactcgatgctagatttgaccatgacttctgctaactgaggtgaaatctgaaccatactagtatctgcccgggacccttcctgctcagggcatcaaccactacattggccttcccagggtggtaaaggatctcacagttgtaatctttaactaattctaaccaaaacctctgtctcatattcaaatcattatgggtaaagaaatatttgagacttttatggtcagtataaatttcacatctttctccgtagagataatgccaccaaatcttcaaagcaaacactaccgcggcaagttctaagtcatgagtcgggtatcgctgctcataatccttcaactgacgagaggcataggcaataacccaatgagcttgcatcagctcacaccccagaccctgtctggatgcatcataataaaccacagatttttccttgtcagaaggcagagttaacactggagctgtaattaatctttgcttcagctcttggaagctagcctcacacttgtctgaccacacaaaacgctgattc

SEQ ID NO: 149229 - DNA, 528 bp, Cannabis sativa
  modified_base (27)..(32): a, c, t, g, unknown or other
agaatttatacattaaatataatcatnnnnnnaatcatgtgtaccatgcaacataaaatgcaatttttgatctttatgaatttgtaaatatgattatattgaaatgggttttctttagggcacaaaacccaacaccttttaccacaccaatgcttccattgtcgcatgggaacttcatgcacaagtgtcaaatggtagtcactgcttcgaagttgactagggcgcaacgtcctagaacagcattgtaggcgatggggcagtccaccactatgtatgtgtaatatttgaatgcataggttgtgttgcttctagctacacccccattgaacgtagctgtgttgaatcttccccataggtgataaggaatctctattaaagccctgaagctggatgggcatggcaacaaattagcttcaactagttgaattgcctggaaggtagctgtaacgccctaacaattaggcacgctacccaaaaaatacttatgaaaccttaatcccctaaacaggattactaatcaaaatagcg

SEQ ID NO: 149230 - DNA, 865 bp, Cannabis sativa
  modified_base (303)..(304): a, c, t, g, unknown or other
attttatattttacgtatatttttaaaaaaatcccttttttaattatatacgtaacattataattattaacatatataccattgctaaattaaagtatactattctcgttagtgttacccaatatattaaacaaagtatctaattttttctttgtcacattgcatcttttaattttgttttctttttctttttttaatattttctctgtgtgagtgaccactaatatttgtttttatttttaattttttaataatttttttcttcaattttaaaaaagaaaataacaactacagtattatttnntttaattaaaaaaaataatattattgtgacatatttttcaagttaatcatttaaacatgtgggaaccacactttatacactattaccaaataagatatttgaaattataactaacactttagtttcttttataaattgttaaaaaataaacaaactacggtatcaaaattatttttattgtatttatttatcaaaaaatttaaattttacatttaagatttattagatgttattaaaatataaagcactaactagtttatttatcaacttaaattttaattatattaatatatgagaaacatatatattttttttaactgttattagataagttatccgaaagaaaaaacaatctttagtttattttatatttagttcataaaatttatgtaacttttttacttatttggattggctaactttcgaactatagtttcattttcaagttatataatgttgttgattaagattagagatggaaattgggtggttaatgtacggggaatgcaatccccgcccccatccccgctacctatttatacccccattcccgccccatcc

SEQ ID NO: 149231 - DNA, 526 bp, Cannabis sativa
  modified_base (315)..(319): a, c, t, g, unknown or other
ttcaatgaattgaataaaaattatttaatgttaatgaaatgtaaatgttaaattcctctcttttggaccttgtgtgagaattatggggccattagtagtgagtacgacataccgaatccaaacctttctcacataaacaaccccaattgtgaaggcccatttgacttatttaagtaattacattaggctaaatgttaacgtagattttctttagctaaatttgagcctcatattagtgatttcacaaataataaaaaaaaaaagctaccaaaataaaaaatatgaacacagagttttttacgtggttttgcagtnnnnnttctgcatagtccacgagtcaatcctattcagatttctgattatttttcagggcctctcctgtatgagtttttccgtcccattttttatcttcttgtcactatttataattacatagtgacagtcaattacaatgttgactgtaatatgtttacaataattatccctaaaatcatgggattcagttacatatcacgtagtgtaaatg

SEQ ID NO: 149232 - DNA, 639 bp, Cannabis sativa
tgtgtggttaatctattttaaaactccactcttaatatttgctagtaccccaataataaaaaacaaattaattaattttaaaacatcacttttaatttttttctattttctttctttttttattttttaattaatttttattaatatcaataattatttaaattttattttcatactttcttttgacaacattaatatatatattttttttattttttaatataattttatataattttttattttaatataattaaaatagttttttttttaatatttttacagaattccacacaacctaaatcgcaactaaaatacatatagcaacccacatagaaactactatagaaactactagaataattcaaactataaattttttaaaaattaaaaaattatatatgagataattcccaaaaataatagtataaataaaaagtatatgttttataacaaataaaattcattaaaataaggtgtcgcaaataaaattccataacaattgtaacaattaaatggactttctttgttttttttttttaaaaaaaaaacaaattatattgacttttgaattcaaaataaggacgggggcaggggcggagccagaactaaatagttggggggccaatatcggacaac

SEQ ID NO: 149233 - DNA, 726 bp, Cannabis sativa
  modified_base (161)..(163): a, c, t, g, unknown or other
  modified_base (690)..(694): a, c, t, g, unknown or other
tcaccagtttcttgttagagtatatcttaccgagtgcataggattcattagaaatgtcacacagcttagcatgaaattcttagatggattcatcttcctccattgatagattctcaaaagattttgctaaagaccaaagtcgagcctttttaacagcatcnnntccctcattcttgattttcagcttttcccaagcgtctttagcaacttcgcaatttgaaattaccttaagctggttagtggagacagcattgaagagagcatgtaacgctttggagttgaaattatctcgttccatttctttagtcgtccattcactggatttcttgatcttgtctccttcctcgtcaacactagtaggaggtgaccagccttctgcaacagccatccagactctttcatccatagccttcaagaaagctctcatcttcgtcttccagtagggatagttagacccttctagcatgggaagtctagaagttgatcctccttctctgaacattttcatatcttgatgttctgcacacacttaacaaagaaactatgttgcacaacgagatgagactcgtagtggatcagttttctagaaaatcacacaaagaactggttatcgcaaatcaagcagagggaattaatagatgagcagaaattaggaacaaatccaagatcacaatttctttacatgaaaannnnngctctgataccaattgaaagtcctaattacta

SEQ ID NO: 149234 - DNA, 604 bp, Cannabis sativa
gcacttaaactggatatgagtaaaacatttgatagggttgaatggtctttcattgcaacagtcatggggaaaatagggtttaatgtttggtggatctctctcataatgacttgccttcatacaacccaattttcttttctcataaatggggttgtatcaggtttagtcactcctcaacggggtctacgtcaaggcgacccattattcccatatttgtttcttatctgttcagaagccttatctcgattattgaggtttgaagaatccattggtcgacttaaaggattatcagtatctcgccatgccccagttgtcactcacttattcttcgcggatgatagtcttttattttaccaagcggatggttggtcttgtgatgccttaaagcgtgttttggatatatatcatagggcttttagacaacaattcaatatagataaatctgttatgtcattctccccgaataccacaaaagcagcaaaacaatcctttcaataaatcttgggtatgcccatttgtgaatgccatgaaaagtatttgggtctccctgcttactctgaatgagataagaaacatttattcaacaacattaaggatcgaatct

SEQ ID NO: 149235 - DNA, 629 bp, Cannabis sativa
ttaatgagatattcattaaaaaaatctgcaacattcaagtgcgtaataaccaaaggctctttgagaaaaccatcatcttgataggcaaaatttgcttctactttctcattttccttcacagatgcttgaaaaagatcaacaaggtgttttgccatacgacaggtacgtgcacggtgtctttttattccacatctgaaacataagttttcataatttttacgattattattttgaggatcttttccctcattctcagtagttgtgtttttcattagtatacaattttttattctggttattacgatgtcaaatattgcttcgactacgaccacgatcacgactttgattatggtcgcgaccatgtctattactttaattatgatcacgaccacgactatgattatgatgttagaaattgtagcattcacttcagggaatggggcagacccagttgggcgagatatattcatgatttttttttatcaaaagttcattattttgttcagctactagatgacatgaaatcaattctgagtattttttaaaatttcgctctctatattgctgctgcaggagcacattagaggcatgaaaagtagtatatgttttttctaacatttcatagtcag

SEQ ID NO: 149236 - DNA, 1645 bp, Cannabis sativa
aatgaatcataaaaatgtctgtgaagaattcattggaagaaaagaagtttaatgtgaaaagaaaagtaagagcaaccccttaatacttaccctgtggagatctcttgaagatgagaatataaatactccaaaattcgtcataatatttctttgtaaattttggcagttttcttttctttcttttctccttctctcttttgtctgatttttttctttttttatagacccttttgtacgatatattgatcagagaatggataggtgagtggtgggcagttaaaagttagtggagagaaaagtgggaaaatattattaattaataatattttttttccttctttatgttgctgaacgagtcattctctttattattattattattattttttttgttataataattaataataaaaaatggtttaacaatttttattcattatgttacagaattggttatatttcaattataaccgatttgaggtattttgtgttatttatttttattcattatgttatagaattggttctatttttgcttatatttgagacatctacttctagtgactttttctagcgatggtgactttttcgataacactaacttttctagcgacgatgacctttcctgcgactttacggtgtcggcgactttttcagcaaaacttattattgtttacaaatatgggattttcatcatttttttacaaaaatatggcataaaaaagctcatataaatgtaagaaaaaaacaaaaaaacccataatcccttagcattatttatttatgccataaaaaagtaaactcttacaattttcccatatattgtgtaatttctactttaatatactaaataaataaattttcttattttatgataaaataataataaacaaataagaaagagaagatgtaaaggatgctatagtatgacattctttttcattctaatggtaacatcaattaaaaaaatgttttttttttcagttttaacccaaaaagtaacaatttacaaaaatacttctagttggccaaataaacaagtatacaacccaaataaaaaaaaaatacacaaataccacttacacacaccttcaacctaggatccatgcttcctcggcaaccatcgcgcaaccatgcgataacccaacgcaaccgaaacaaaaattcaaccaaaaagagagccatcattaatttcggcgacttcacctgagaaaacgatcagaatcaatcaaaacatgggctatttcaaattcatgaaaaaattgtagaaatacttttaatttgcataaaactaatgtcttgacttgaatttttagatccatgaaatgcagatctcaaaaagttgaattggagttcccaaacaatccaactcaagtataatctaaaaaaaattacatcaatactatagtaaaatgtttattctggtatatttttgttgttttccaaatttttaatggtgaatttgttcatattaaattatgaagagacatgtctagatagagttacgtacgtggaaatactgttttgtttttaatgttttcataacagttgcattacaattgtgttgcccctgattttgcccaatatatgtggaccaaccagaaaggacacgtggatcaaacaacttatcattcaaactatttgc

SEQ ID NO: 149237 - DNA, 590 bp, Cannabis sativa
acatacaagaagatcaccttctttgaaaaggaattctacaatatcttaaaaaggaagtttaagtgagtcatgagatattggagagaacagaaaaacttgaattgtaaaagctagcaaacaagctaacagaaagcttgaaaattcttgcacaattatttttgaggtcagcaaagccatggacgactgtggtggtacgaccacaatgatcaagttgtggaaaaactattcattttaaaaaatatgactaaatagaattaaaatctctacgattttctagtgtatgttttctatgtaacttgtaataatagcattgagtatcattaaggaaacccaagaataacatataacaacatatatataaatatatatagtaccaaagagagagatccacaaaggagagacaagtggtcggcgaagcgagctaaggttcatcaacatccttgcgtacggtcgaacttatgctgaacaaagagagatctaagaaagagaagaaatccatgaaatttgaagagaatagaatcctgttgggatttttgttgaaacccatcaaagaagagaagagaaagggggaaagacaagagacttaccga

SEQ ID NO: 149238 - DNA, 606 bp, Cannabis sativa
  modified_base (417)..(432): a, c, t, g, unknown or other
tcaaagtccttcattttaagaaaagaattacatacatagtcttgttgtgtttcattccacataacactcactttgtttaagaaaggtgattggctaatacataaacgatcacggttgttcatcaaaccgctcaaatcgctcaaactatctacaccgctacgtaccacaaaaaaagtgcagtttaaaattcttaacagtacggtcgcgatttgaatttttcctaaactgcactgtgcgatgcagtttgcagttttgaattgttaatatgcagttcaaatcgtaccgcacggtacattataaaaatacaaatttttatatttatttaggtctaatatgtcaaggtccaacccaaagcacactaattattataagactaattaagaatttttccacccgaactttgacatgtactaaatnnnnnnnnnnnnnnnnttaaggtcgttaaaaattccctctgaactattgagattgttatatttaaggacttttgtctaattttagtaaaataattctaacacagataaaaatttaaagggcatgatttagtacatattaaagtttgaggggcatgatttggtagacatcaaagtttggggagcatggttt

SEQ ID NO: 149239 - DNA, 684 bp, Cannabis sativa
gctcttatttttgtggcatttttaattttttagatggaaacttgcaaaaataccgaattttagataaatatttacaattttattgtcacacggcaaaaattacttttatactgtcttagactttttttttcttttatacagtatataccgaatatcaagaacaatgcctccatcttccacacccatgcacagaaccaccatagcaacacgaaaatactaagaaaacaactattaattccggcgagattgaacaaaaacagtgaaatcgacgttaaataaataatcatgccaaaataactgtaaaataatactaaaataaatcaaacaaaacaaaaagacaaaaagataaaaaaaattaactatcttctgcacagtctcaacactagatacaatagtggctatatttgtaagttcggtcttcaatttaggtgaataaattgaaattaagttatttatttttatgattttaagtataaaattatttataatgaaaataattaatttaatctaattttgtgacaatattcaggaagcaagtggtcgtataaataacaatagaagaaagaagatgaggaaattacactctataccctttttatattgtcctcttttatttttacactcttttttaaagtctatcatttttacctcttttttaaaacattgtaccaattttgcccctgt

SEQ ID NO: 149240 - DNA, 548 bp, Cannabis sativa
  modified_base (494)..(494): a, c, t, g, unknown or other
aagatataatcaaattttaaaaataagataataaattaagcaaaaagatagatttttacctatttcaaattcaagtaacactaatatcttaaataaatttttaaaaatactaattaatttaattctgataattagatttgaaatatgaaaaggaaaaatcaaaatacaaaactacacaaaaaatctgaagttaattccatgaaatagcatgaaaaatcaaagaaaaacaaaaaatttgcgagctgtacggatggtatgcacagcataccatccgcgcgcggatctcagggaccttgaccgagaaaactcggtgctggaggctgcatgcagcctctccgtgcgtgcacgaggtcgttcagacatcccacaagcgagaaacttcggacagaaagctgtcctaacgcgtgtgcacacgggtgatcacccgtgttcgcgcgcgcacgtggggttgtcaccacccttgatttttttcaattttcaaaaattcataactnattcaaataaaattgaaatcaagttctgtaaaaaagctaattgcttaatttttt

SEQ ID NO: 149241 - DNA, 1923 bp, Cannabis sativa
ctttcccgcacagtagagcacccgtgagccaagcccagcaagacagtataaaatatagacaatcataattatcacattatttaaacatttatgccattcacaattacatgtatgacacagacctacatgttacgctcacatgcgtatttatgtctatgtgagatagaactacgtgttgcggtcacacgcctatttatgtctatgtgacatagacctacgtgttgtgctcacacgtctatatacaataaggccttagaacggttcatctcagttcaagttatcgagtccaacccggttatgcctttcacgcataaccctaattctcaatatactcatataattatcatggcaaagcatatacacatcacataatactaagataataaccctaggccgctaaaccgcttatgttagtgtaataaccctaatccggtttctaattactcacctataatatttcagcataagtgccaccacgcataactctacgtgcaactactgtcttacctgatgtcccgaaagtgaagagattccaaatcccccgagtgctcctgaccaagtaccggtaatcctagtcacaaattattgagatttacaagcatagggttaatccctaaatccactttcacatattataaacatggcattcaaaatacagataattaaatagagctcaaaacaagctttcgaacgatataaagaacgtcccaaacggattcccgagtcaaaagttatggctaaaacaaaatcaggaaaaacagactttctcactcccaaacccagtcgcgacggccaaaatctcgtcgcggggactgggttcagaacacccaaaaactccattttaaggcctaaaaatgctaaattttccataaattcgaacctcaatcaaaccattcccaaaattcaaccaaacccattcataaactcagatttttaaatcaaaataaacctagctaactttgataccaaagatacacaaaaaggaaatatcaagcaatctcaccataatcaccaagttgaacatcaattatcaaagcatttaaatcaataatatttgcccagatatttcagaacacaacccctgaaattaaagcatgaaatcacaccttaaccaatcaaaataataaatatcatcataaaagtgcctagcatgaatctactaacattaatctaatcaaaaacaccaaaaattaagcatttctcaaccacatggatttcatcaagtatgaacatcaaacacaactccaagaacattcaaatatcataaattgacaatccaaacaaaggaggattaagagcttaccacaaactcacaagtcccaagccacaaattacaccaactcaagcttgattccaagattgttgaaaatgacaagcaaatagaaatggaaagtaagggggtcggctagggctggaagtaaccggaaaatgagttttaatttcccaaaaaaaataatttttgttgaaaaaaagaataattggtcatatgaccaaaatttccccgaagaccaatatatcacaaatatgaaaacaaggacaacatagtcatttaaaatcacacatataaaactcattattttcaggttttcatacttatcaaataattccaaattttaaatcccgaaaatgtattttgggtcgcgaactcggttcggcacaaaatacccggttgtgactataccgtgccaacttgtcagaaaacacctgcaaaggacaaaacaagtatactatataataatatagtcccataagaacgtaaatatattaattttaggattttactcttctcgggtcaaaattaccaaaatgcccctggcttacaacagggtcttaacatgttataaatcatataaattctcacatatgaaattatataataatataattccacaataatacataattaactagttagggttttgc

SEQ ID NO: 149242 - DNA, 1002 bp, Cannabis sativa
ctcgacacgacacgaatacgacccgcgaacacgaattgccacccctagtgtgcttatattattttttttttcttcttgatcaatatataagtggagtgaaatctaatgatttttagaatcttatggatcaatgcatttcatataatttttaaaagcacgtgatcttcaaatataatttatataaattattttttaatatcaaaattgaaaataattttagtcaaacttgatatatatatcatgattatataaagtactaattattgataggaggcatatatactacactaattaataccacattagttaaaaaaaattctcaaaaattaaaatctcaaatctcatttcaaattttttaaaaaatacattatttaattaaaaaaaattaaatatacatatattgcacttaacgtcatctaattaaacttaattgaaaagaaaactaattatacaggcattgcacgtaacatcaatctagttaaatatatatataatatttttatatttaataaccatattcaaatcttgttaatttctaatctacaattgaattaattgaaggcgaccacggcaatctacacatgttcgcagtgcgggtagtgtaggtttagattaattttccaaatcaaattgtatatatgcgatttttataattttttaaaaccacaatcgcaccgcaagaccttaaaactataaaaattatactgcaaaaatacggcgccgtgatgcgatgtgatttatgcggtttacactctcatcattatcaaacattaaaataaacattgaaagtttagtctgctagagttttaacaattaaaaaagtaaaaaaatattttatcaaacttttaacgttataatattatactaatcaagttattgtattgaattatctctaaaaaaattagataatatacatatatgggtgcactcttaatgggtattacccatgaatggataaaattagaaaattttgagtttttatgcttagtttttatatctaat

SEQ ID NO: 149243 - DNA, 654 bp, Cannabis sativa
agaaaaacacagaaaagaaagatcgagtgaatatcaaaaataccagtcaagtttgtgacttagatttctcacctgtttgtaatattcttctccaatagtgcagatcctaagaaacgtcttcaaggcgagctcataaagaggatgtacccctgatttagggcgaacctctataaactctgtgttctatctctttattttctctctttattgtctgtgtatgttgatctatgtgtttgtgtgtttatggtgttgtttgatcatggattctgggtaagatcgatctgttgatcgaggaagatctctggttctagggtttgagaaccagagagaaagagagagagtttgagaaactctcgaatgttcgaatgagggaaatgagctagggttagctctgatttcacttggttctgttcaaggcagaacgacaaatcgtttgattgaaacgatttgtcgtgcaggggaatacggcagagtttctttatcgtttggtacacatctttaattgatttttctgggacaattttgtccctgtcgttttttataaaagcttgagttggtgtagggcatttgtaacgccctaatctatagggacgccacgtgtgtgattttataaactagtttaatgctaatagaataattagttattaaaaactg

SEQ ID NO: 149244 - DNA, 856 bp, Cannabis sativa
aacccttgtatcctttctctagcacagtatcaccaagatctgagcccgattctctttcagttgattggattattcacagtcttacacactatgattgaatatcaacttgctatgcgtgagtatgtactctatcactataggatttgaaaatttagaagagagaaagagagcaaggattcgaattttgagaagatacactactacaaacaaaggcctttaatcccggtttttaaggccttttatctcggtttttcgctaaaataaaaaccgagatatatgccagtgggataaaaagtctttgaaaaactgggataaaaactttatcccagttatttcataaaaaccgggatagaaggggaactttttatcccagtttttatgaaataaccgggattaaaagtaaaaaatataataagaaaataaacctaaaaatattatatcagttctttgaaataatttttacaattagattccaaaaatttatatcaaaatatacaaattaatacaccatcaagggttcactgcacaaaaaaaaactcatcaaggaccaccaatgacgaagcttcgtgcaccacaaaacgccatgagcctacaagcactgtggccgacgaatggccacagatcagctctatttacctaagaaaagaaagaaggagatacatccagaatgatgaccgagaatcagagttttagcaaaaaaaataaaataagaacaagataaaataatacctgaaggttttggagggtatgaggctcaaatttgccctccgttgggtcgtccgtggctggagaaaggcggttggacaagctggtccttcatgcagcagaagagataacatagagagagagagagaga

SEQ ID NO: 149245 - DNA, 747 bp, Cannabis sativa
atgaaaagatccagcatttgacacagcagggtgctcctgcaatccctgcttcaaaaatacatgtagctcctgtccctgctgtgcaggcaggatctgtagctgcagtgaaccgaatggaacccctgtatgaaaggtttcgtaaggaggcacctccagcttcctgggaggtcccgatgtcatgaaagccgagcagtggctaactgtgattactagaattttgaattttatgggcgtcactaaaaagaatagggtggcctgtgtcaccttccaattttaagaagacgctctggtatggtgggacatggtgtccctgactcagaatgttaccacaatgacctgggagaagttccaggaactatttaatgcaaagtattacaatgaggcagtcaaaagcagattaagaaaagaattcacctaggtgactcagaaggaaaacatgagtgttactgaatacacgactcagtttgatcgtttggcaagattggcctcaagaatcgtgccaaccaatttcaacaagaaagagaaatacctggacgggttgcatgcgaagatcagacacggcttaatgataactactgattacaataccacctatgcagatatggtgggtaaggtactgtgagctgagggcgcagtggagtgcaccttagagtcactacaagaaaatcatctttgcaaaagtaccctaaatgcgccggcaaaagcttatctgggaagcttggtcggtaaaggactttttaccggcgc

SEQ ID NO: 149246 - DNA, 683 bp, Cannabis sativa
gcagggcacgtggccggggtgatgctaacccgccacaggctgcccaagctgcccatgattgggaaaatcagtttgtagaaatgcaagctagcattattgaacaagatgaggagattcagcggttgagatagcagggtgctcttacagttcccgctccagaaataccagtggcacctgcccttgctgtgcaggccgaacctgtggttacagtgaaccgaatggaacccctgtatgaaaggttccgtaagcaggcacctctagttttcctgggaggtcccgatgtcatgaaagtcgagcaatggctaacagtgattaccagaatcttgaattttatgggcgtcaccggtaatgatagggtggcttgtgccactttccaatttcaagaagacgcattgatttggtgggacatggtgtctatgatacatgatgttactacaatgacctaggagaagttttaagagctgtttaatgccaaatattacaatgaggcagtcagaagtgctaaaagaaaagaattcacccagctgactgagaaagaaaacatgagtgttactgcatacacgactcaatttgatctcttggcaaggttggctttgggaatcgtgccaaccgatttcaataagaaagaaaagtacttggacgggttgaatgcaaagatcaaacatgacttgatgatcactact

SEQ ID NO: 149247 - DNA, 540 bp, Cannabis sativa
ataaatagatttgattttttcaaaattttagaagaatattttattcaattaatatttataaacttaataaaaaataaaaaaaagaatgagagaattaaggagagaagagatagtactatttgaagtgattttagaccgtcacatcactgcctcatacatctcctttatatatacatagatatatagattttatatgaaaaaaaaatatttactttttgctcatctaacaaatctataataatttataattataatttactaattgtactaactggttattgagattttaactttttcacttgttctttcattgttgtgtgaatgtaaatatatatttatttaatatactcgttagaagttacgtgccgaggcacgtaaatattaattttatttaaagtttagttctttattttttttttttatttagattgtatctaaatgtatgatcctacgaatgatttattttattaaaataatatgtgtgctatatatttggttagttaaatataattgggtatatttaagtcataacaaaataat

SEQ ID NO: 149248 - DNA, 539 bp, Cannabis sativa
aacctcgcttaagatagaattagcaagaggcagcgagcatgaccaaagtctaatcgcattcgagacaagagagtagctcgcatatatcgaactatatgcgagtatcctcgccgtgtccgtgtgtaaaccaggacaccgactttctataaatgcgagttagtcctaggaacccagcagccttgataaaaaaatatagacttgcatgtctaggttctatcagctcgttatgcgatgtcaacaaaaggcgactatctaaaggatgcagacatcctaaacataatgctaaacctgcgaagttaatatcagattgtgaacaagtcaacccgcagatttggaggacgcatacgttgatgagcttagtaactgccgttcatttattaatattaacgttgtttagttaattattgtaattcaatgtgtaaaaacggattgataacgtatgtaatccttgtataactgatcggacacctgctttgtaaataaaggggtgattcaccgtgaaatggcacctacgaaactcttgctatagtggactaagc

SEQ ID NO: 149249 - DNA, 567 bp, Cannabis sativa
actaagtattagacaacagaggagtgtctctgggaaggtggctcccggaggagacataagagggatctttatgctcccggaggccagggacatactaaggcaattcggggaggtaatagaatctattaaacaagcacctcgcatttaatgccgcatagggaaagacgtattgaaatcaccataaatgacatgacagatggcgtaaccctcctttttcagctattacactatgatcaataaggctagtgacgactactttatgaggaatcacattaatcaagaggggataaaagattatatccacctaactcctaagatacctacggtataggtcatgtatttcccattttgtatctgctgggaatatgtccccctatgaagcctgcacggaaagacaagtgatccattcctagggatcaccccataaaaacactatacatacccccacaaacatactgagaaggggttgaggattctgggaaaaaaggaatcaaagagagaaaataggagagaaattcaccaagaatgttctctgtaataaatactctcattaataacaaagactcg

SEQ ID NO: 149250 - DNA, 1344 bp, Cannabis sativa
  modified_base (63)..(66): a, c, t, g, unknown or other
  modified_base (848)..(851): a, c, t, g, unknown or other
atataaaaatatgatatataattcaatttaatataatacaatataatacaatacgacctaatnnnncgttccaaacgagccctaaatgtgttattttgtgattggttaacaatactctttaaaagctattacattaaactatatgagacccgatacttaattacaccaatagtgatgagggtgctaggcaccattagtgccttttagtatttctctatttagtattggtttccatatattttacattaataaagattatcaaatttttttaaccaattataaattgtcactttatagtggtgctaggtatcttagagcatcttcaataggtctgggccacattttacaaagatgtatcactattaaaaatgtgatttttttactatttcgattaggatgattattagtgcttgaaaactacattttctctctatgtcaccaatagaaaagtgatgaaacacagtcttggttttcttcttgtgaaatttcacgatttttcaagatgtgtagggagagattttaagaaaacacttacgagtgtaaaagtaagaaaaaaattgttaaaatttatcttcaaaagaataatattttcaatttttgaatttgggggcaatttaaactaactttaacacaaaaagtatctacatattcaaatctcagtagtagaaatttattgtgactagtggaaaaaaatatttcgagatgagttcgggtcacatttcacaaaggagtacctattgggattttatgctctaaataaaactcatttgaatataatcagatttactaattaataaaatatatgaaattattttatgttgcatggttcacatgattactttcatgannnnatgtttaatatataaattctattatatcctgaatatataattattcatgattatagtattatctacacagtaaaaaataatcatgattatatgcttcaaagtatttagtcccataatttatcaatgcactaaatttacactaacgtgataatcaacgataaagtttacttatacaattatatgtggaatatcttttctagggcattagcaaagtatactagtatcagatgtattggctatacaacggactaaactgatattgatagtggaaaagatatcataaatttattgtcgtatcttttataagtcaatatcacttagttgatcttagattaatagatcttaatcttaagatgattagaatctggcttaaatgtatttcaaatgttctttgacttgtttgttaaagctgaccacttagatcagcctaatacttacatcttgggaacatggtagtgcaattaagtgggaacactaattatagatatggaat

SEQ ID NO: 149251 - DNA, 1452 bp, Cannabis sativa
ttttcataccgagaaaaaaaaacttaatttttactaccaaaaaattctactgcaatatctattttcaaggtgtattcgacggttcactaattttattaaataaatatcacataagaaattttttagtactgaaaattgaattttttttctcacactttattctttttgaaaatttatttaataaaataattattttttattatttaatttatttgagaaacgtgtttaattaaaattgattacttatttcattagtctatgtaatgcgattgaattaacaggagaaacacatcttttcataccgaaaaaaaaacttcgtttttactactaaaaaattccatctgtgatatctattttcatggtgtattcgacggtttgctaaatttattaaatagatatcacagatagaattttttggtagagaaaactgagttttttttctcggtatgaaaagatgtgtttctcccgttaattcaattgcattatatagtgcagtggtgctccaatacagtgtacaacaactaggttgttttctcccgctactgtgtagtggtgattcgaggttggttggtgtggtgtgacactttatttttttttagaaatttatttaataaaataattattttatgatttaatatatttgagaaacgtgtttaattaaaactgattacttatttcattagtctatgtaatacgattgaattaactggagaaacacatcttttcataccgaaaaaaaaacttcgctttcactactaaaaaattccatctatgatatctattttcatggtgtattcgacggtttgctaattttattaaatagatatcgcagatggaattttttggtagagaaaactgagttttttttctcagtatgaaaagatgtgtttctcccgttaattcaatcgcattatatagtgtagtggtgttccaatacagtgtacaacaactaggttgttttctcccgctacggtgtagtggtgattcgaggttggttggtgtggtgtgacactttattttttctagaaattgatttaataaaataattattttatgatttaatttatttgagaaacatgtttaattaaaactgattacttattacttgttaaaaaaaaaattgattacttattctattagtttatataatgcgattgaattaacaggagaaacaatttccataccaagaaaaaaaactcaatttttactaccaaaaaattacatctgcgatatctatttttagggtgtattcgacggttcgctaattttattaaatagatatcacagatggagttttttagtagtgaaaactgagttttttttctcaatatgaaaagatgtgtttcttccgttaattcaatcgcattatatagactaatgaaataagtaatcagtttcaattaaacacatttctcaaataaattaaataataaaaagaattattttattaaa

SEQ ID NO: 149252 - DNA, 644 bp, Cannabis sativa
cttgttagagcaacttttttttttttatcttcactactttcagaatcatcactccaagtaacatttaatccctttttatttttctttaaggtattggcacattaggattgattataaccaaatccttcagactctctgcattgaataccttttttaatgttagatgaaaaaggtttagagggattgttacctgaaaagttaccttttgagttctttgaaaagttctttttatttccaacagatttcatgtatctttggaaattttttgccaacaaggccatttcatcatcattttcatcatcagaaataatatttttaaaagcattgaaagcaatacctttgcttttctcattcgagaacctttgcttactctttttcttgatttgttaatttaactcaaaagttcttaaagaacccatgagttccttaactttcattttgccaaagccttttgcctcttccattgctagcaattttgtgtcaaacctgtcaggaagcatacgagcaatttttcgaaccaggatagattcatctaatttttctcccaaggcaaaaaactcattagaaatatcagataatctttcataaaaatcagacaaagtttcagtttctgacattcacaattcatcaaatctagtttgtaa

SEQ ID NO: 149253 - DNA, 675 bp, Cannabis sativa
ttcaaatattaatgggaaacacaatgatgattagaaatcatctaactcatcattacttattttttcttgttttagattattttttgttgttattaataactttaaagtttttgagaatgttcaattgtagtcgttatgttgcgaaattttagtagaattaggataaaattatttgatataagtttttcttaaactttgttgtcaagatttttttgttaattttcgttatggataaattatggatgcgtgaggagcgttagttattatatagttagtaatttagagtaaaattaattactagtcagttataaatgatatttagtatactatagttagttactaactagtaatttagcaggttctgcgatatattgtattgcagtcagatcaatgggtggaataatatgcatgttagatgagtttgaatatcttaaatattcatctttagtgaagtaggttctgcaaatacatatactgctgtcggatggatggtaaaattttgtattgctaaatattgttgtgattttttttatattattttattcgtgtttttttgttattaatagctttaaatgtttttgaaaacattcaattacagatgttatgttgctgaaatttcggtagaattaggtatgctatctttatcctacttttataagaattaacaaatacatc

SEQ ID NO: 149254 - DNA, 1111 bp, Cannabis sativa
taataaatgctctgacaattgataattcaaaatccaattttctctctccacggctaacggctgcacttgattatttttgatttcccaaattttcttttaaggcgggaagttgagtcgtctgaggttcctttgagacagttacctcttttcgtgacttgcctataaataccaacaacattggcacataaactcatttcatcacccttctttgctagttaagcttcagagcgaaaagagaaattcttgacttcgaagttgccgaagtgccttcataaactgcttgttggattgacattgctcgaacccagacaattgaatcttgagtaagtttcggattcccctttatgcttatctttgcatgtttacattttgaatgcgccttcaactgtgctgtagaaaaatgtttaggaaaccctaggcttagaaacctctgcgattcttcttgatcatgtcttcatgcggttttacagccataatgcttgtttctgaactgcataacgtctgtctttcatcttgctgattctaagcttcatgaactttttgccctaactcaagaaaatttttgacttcttgagttctgacttttctttaaacatagtcgttctttaatctgttgactactcctggtcggcatatttgcttatttatcgtctgatattccgaccaaacactcctctcgtgtgttttcttttgtagatgaaatcaggtgagtcttgggaaaacggacatcgaatcgaccagaacctacttcaacttctgcacgaggaccatcctcgtctttgttgaagtcctccttcccctagtgaaggacattcttctaaccctgtacccagccatagaatgatggttcgtacaaagaaaactacgcatctggctaacgtgtctgacccctaagtggctcggcacaccgctttgcctagcactgaaaaggatccagccgtctagatggagggggatcatgaaggggacgctgaggttcatgagattgaggggcaggacaatgtacgtgctgacagttcgtccgaggcagaggaagaggtggaggttgaacccccaaattacggggagtacaacgaggctggggagccagtcgatgctgacggagacgtcc

SEQ ID NO: 149255 - DNA, 838 bp, Cannabis sativa
tgtagctgcactaatcgcatcttccgatattgccaaatacagaaacagcgtttctccagttattagtttcgccaaaattggaggcgtcgctagaggcctttatatgttctgaaaggcctctttgcactcttttgtccactcacactttttgttgcctcgcaatatattgaagaacgacagacacttattagttgacttcgaaatgaatctgttaagtgcatccattcttcctgtcagggcttgtacttccttaggctttttcggtgatggcatgtctattaatgccttgattttttcgggatttgcttcaatacccctcgtgttaactatgaatcccaaaaaatttcctgaggaaactccaaaggaacattttttagggtttagcttcatgttatacttccttaatatcttaaagcatttcgcgaggtctgtggtatgatccctactttttattgattttaccagcatatcatcgacgtaaacctccatgttctggcctatttggtttgtgaacatttcatttattaatcgctgatatgttgccccaacattttttggtccgaacgacatgactttataacattagagtcccatgttggttacgaagcttgtatgctcttgatctggttcatacatttttatcttgttatatctagaatatgcgtccataaatgacataagctcgtgcccagtagttgcacccactaactggtcgataatgggaggatgaaaataatcttttgggcatgccttattcagaccagagaaatcaatacaagttctccaggttctgttaggcttcgggatgagaacgtgattggctatccacgagggataa

SEQ ID NO: 149256 - DNA, 970 bp, Cannabis sativa
actattgagtttgtttgaggactttcatgccatctctgtccttgaccttttttctacgagtttcctctgacttcatcctctcacaaaaatccttgctacgttcgaagatttgtagacggagtagctagtcatttcccctagccctaactccaaaaagtaagttgctttcttctttctcatgcttgttacattgtgcggatttgctacttagtttgtttgtatcgctgtcatctcatctggttttggtagttttttagggttaaactgtatctagttccatactagggttcatgcaatatgtaggttgttttaagatctccaactcattaccttcgggtttgataaaattctctccaaggattgggactaatttttgcctgcaacaatgtcccactctggttcaggaatttatcgtccagaagttttagaatttgagtttgctacagaatcagccatcccgtataaacccatcccttcaaaacccacttccaaattagagttgaacgatgctagggttagggaacacgtagtgagaacccaccaggaagatattgctagtcgctacatgcatttcttgcaagaaatatccaaaggcaaacgccgattcttacgagaagcaaccaggccagaaccttccagcatttcttttattcctgtggcaaagcctttgtttttacccaacgtcacgattgcttctgaaccaggtgacttggattttgaaattatacctcccaagacacgtacatcaaagactcttcatgaccccaacgtcacctttgaggttgagttgatagaatcgaaggtgcgatctatctcaggctacacgggtgacatgctgaaaacctgcgagatcgaacttgggaagtcatgccaagttagatcagtacgagagggtgagtttagttgtttccctcctgtgcatttttcaagcagtaacccggggaccaatggtgagactagtactagtggt

SEQ ID NO: 149257 - DNA, 678 bp, Cannabis sativa
ttctatttatggaaaataaggtataaaaggtaagtttgatgacttatcctttctctaactaaccagctgtattaatctaatcttgtgtgatttcttaatatgtttgatcagatttcttatagagaaaaccgaagcaagactttcattttttataaaaggaaattcacacttactgctcacgattctataggtacagaaatataaattcgtggactgattgaagatttattttaggaaattgtctagcaagttgtggtcttgttcagaccgtttgtgagctggaaataaggtgtatattgattataaatacaccttatagtagctagatcttgtacctctttgacatctttgtattttactcatatctttagaagaaagcgtctttgttttgtagattagtgttcgtctcttactctatttacatgtattttgtattgtcttgagtctgtattcaagtctgcaaaaaaagaaaaatagcaatgctacctttaggagaaggttctacaaagctttcgggagattgtttttcaagtcttgcctcgggaggaagtaagatctcttcaaggagatagaaaggagttcgagcacttgaagtttcaacaagattcgattagaaggtggaatacatcaagcttgcgacatacaataagagggattctatttatgcataagtcaatt

SEQ ID NO: 149258 - DNA, 519 bp, Cannabis sativa
atccataaccaataacaattaataactttaaaatttttaataatacatattcaagatcaataactaataataattattaactttcaaactttttgaataaaacgtattcaagatcaataatcggtaacattaataactttcaaacattttaataatctatattcaagatcaataaccaataatgattaattatttttaaatttttgcaattttttttatgattttactacaatcaattaatacatatataatatatttagaactacaaagaaggaagaataaatcaacttcatctctctgaagaaaaaaaaaaggattacatgacagatggtggaatgaagtacatatgtgtcgagtgcagctaaaaaaattatttttaattttgtaaatgttattatattttaatttttattttatttttcttttggaaaaaaactaaatcaattgaaccaaccacagattgacacacttatttggcacttaatgttatattatttataataatataatatatagatt

SEQ ID NO: 149259 - DNA, 617 bp, Cannabis sativa
  modified_base (92)..(115): a, c, t, g, unknown or other
ctctctcaaacaacttacattgataaagttttagagagattctccatgaccaacaccaaaggggcgattatgccttctagatatggtatccnnnnnnnnnnnnnnnnnnnnnnnnctgatcctcaagagatagaagacttgggaaaagttccttatgcttctccagttggaagtctaatgtatgcaatgttgtgcactagacctgacatctgctatgtagtaggaatcgtgagcaggtatctgacaaatccatgtcaggaacattggaatgttgttaagtattttctgaaatacttgaagagtacaagacattatgtgttagtctacaagggtggtgctttaaatccaataggctataccgactaggatttccaggcatgtcttgatgacaggaaatctacatcaagaatggtgtttaccattgggggtggagcagttgtttggagaagtgctaaacaaaccgcgattttagattctaccatggaggcagaatacatagctgctgtagaggctgccaaagaactagtctggctgagaaagttcttcactgttgtaggtgttgtacttggagtggaaaagcctctagttttacattgtgataatactggagcaatagc

SEQ ID NO: 149260 - DNA, 689 bp, Cannabis sativa
catattcatcttgcattgttttgagccattgggggcttttgattgcagcagcagtattctttggctcagagggaatgagagcttcaggaagaggaaatttcgtggctaggtatgattttggtttagttatcccattttggcttctggttttcataggatgagtcctaatatttatggtagatggtgagggagagacattggtggcagtgcatggttgcaacacctgtgtagaaggttgagtggatatatcaggtggcaaggtttggttatttgtgattggtataggtggctggggagagtcatttgtggtttctattggttgaatggttggtggagttgatatatgtggtgggatagtggtggaactgatgttggtgtttctggtttgtgggaggctgtcaaccgtgtgtaggacagttgttggattgtggagaactcgggttgatggagcagtgggagcatgcacattagaggaaatattaggattagattgagagccatgggaagtgtgaaaagtaaatgaaggagatgagtgagaatcatgtacctgctggttgtcagctactggagactcaagttgggctggataatttgtttcattgaaggaaacatgtcgagaaatgatgattctcccatcagggtgttcacacaagtaccctttgtggtgagttgaataacccaaaaacaag

SEQ ID NO: 149261 - DNA, 753 bp, Cannabis sativa
  modified_base (190)..(192): a, c, t, g, unknown or other
tcaatggaaagcaaaaattctaattagcctaatagatattattaacctttaggattattataaaggggaaatttacatggtatactaacttttggtatttttttacaaaaatattaccaggcggtattttttttactttttttactgttttttttataagtttcatactgcaatatactgtgttaagttnnnactggtgttctactggtgttttttagttgttctactgttgttttgttttgtgttctactcgtgttttataaaaatactatatttttgaaattttttccgtgtgacagtatttttataaaagttaactcattccagtatttttgtaagtttcccattataaagtgcatcatagtattttgatagaccacctacttatttcgatatcaaagtttttttttttttttttcataattacatacgttgtaactatttaggaccactttaatacaacaataattttttggagatagaacaaatctcttttcaagataataccaatctttcaattgaactaaagttctattttttcattttcatatctattattgactatccaattacatatttgaaggttttacacaccaattacaaattactaataagcccccatactatttcatagtgtaacacacttgtaaatttttaaaaaattctgaatagtttacaatactaaaaataaaattatgtattttggtacacacatgactatttttcttatacgtatggtaaataattgtttaa

SEQ ID NO: 149262 - DNA, 1019 bp, Cannabis sativa
ggtggatcctacactgcggaatccaaagaacgcaagggttccaccaaccacgaatcttgaacaaccatcaactgtaggtcacagtgtgacgactcctgtaactggaatcgtgcctggtgtgcaagagattggaaataccagttcagcagccaatcagggcattcctaacattgtcattccgcccgtaacaaatgtttgaacaaccattggagatgacacagagatctagaacctctgtgatgctctggtaatcatgctgggtcataccaacaccttacatcatgatcgggaagaactccgtgctgcagtgaatctcgcatttgaagagcaaagatgcacgttcgctgaatggagagataaagagatggaaatgttaagggctcaacaagttgccattgacgaccgaagcagacaggccaccgtgttaatacaaaaaacctattaggcaaccagtcaacaacctgcaaccgtcattcctctgggtgagacagacgaagatcctgttgtgaacacctctcaaactctaaatggtcagccgtcccgtccaatccctggtcataggttaggttctacctgtgggccaagcggtaggcgggcagactctatctaaaaattgatcaggagaagtcacacctaataactctgcacaagtaaatggttccgaccagttgattggccaaaccaactaatcacagagacacccgggtgtttctatatttaatcgattgggaatggttcatgatctcagagatgatctgaacagaaggagagggttagacgagcaacatgacgcgccagtcgttcagctcggggcttgtgctcaaaatctcgctcaatgagatgttgacgtaactctagtcggccaagaggctgaacatgttaatccagccgtgcaggcacagttagatgagctaaaaagtatgttccacgacctggccggtcagaaaaaaaatgaccttgagttggaccgagcacgtggatcccccttctccctagagattaatgtcttataattgcct

SEQ ID NO: 149263 - DNA, 554 bp, Cannabis sativa
  modified_base (27)..(47): a, c, t, g, unknown or other
  modified_base (186)..(202): a, c, t, g, unknown or other
atctaaggccaaaagcaaacatatagnnnnnnnnnnnnnnnnnnnnntggatggaccctatcatgttactatgtttacacaaatgaaagatgtacaagatttaagtgtcacaaattatttataggatctactgacaattggactatgattaaaattaaatcattagatctgtcaacaagttaatcnnnnnnnnnnnnnnnnnataaataataggtttgttaaatattttttttttgaataaataatataaataaacaaacaatgttcatgtaacagattgtgaaataaaatattaatataattaaattattattttacactaaccaactaaattttgaatatttatggttgttaaaacaaaccttaaatttgtcatcaaaatttaaaattcaaaaatgaaaaactaatttaaaatatgtaggtgtatttgaatcattaaatcaaattaaattaaatatcaaataagataaatgatttgaaaaacaaaatttcaatatcattttctaatcttataatttaataaaataaaaataataaaataaactaattttaaa

SEQ ID NO: 149264 - DNA, 736 bp, Cannabis sativa
  modified_base (274)..(276): a, c, t, g, unknown or other
ctctagaccagctagggttgggtgttttgctttgtgattcaggtattttccagcagctctttgtgttactcaagccaaggtaaaacctttagcaactccctcttaagcttctgaattgaaagaaatgaacttttgcatgaaatgttgtttttgctgttgtggttgctgtagttgttagatgttgatttctgcagttaaaatatgatttattatgttgaattaagcatgaattagtggttgtttgaaggtttaaccaagctttgagttttagaannnaaacttggagctttaatggtgaaatttgattctgagctttgattgttgttttattgcatggaaatggtttattggggtataatattcaggtctggaaagttcggttcagtttggaaacgatttggttaggctttgttggtttttgggttttctgggtaaaaccggttacccggattttgtagcagggaatccctaaaaccggttacccggagtttggattaaattggggttgatttgcatgagttgtgattttttttagtcattcctgcactgaaccagaattcaagttgagagaggcctgtaggaaccagaattctggttggcctccaagaatttttcccagaaccgaaatttcggtaggggaaccggtcaccggttggggcaattttgggaaccctagtttttcctatttttgtgttatttagggtattgccaagttattcatcgatagggaaacttt

SEQ ID NO: 149265 - DNA, 602 bp, Cannabis sativa
  modified_base (519)..(519): a, c, t, g, unknown or other
taaataattttaatctctgtgggattgaattattggccatgtacgtaattgtttttcatctgagtaaagcataccatttcaatttgtttcaaatttttcattaattttagagagacacgatgggatcgtttctgtaactagataaccagcaccaaaaaacgtctttacattgcatggtttggtgttttgatgatccctaccttattgactgcaaattctgcatttattattactttcattggtgccaggatctctactttacacattaatcacataaacaagcaatgactttggaagtccaccaccaccaccccgtaaattaaagaaattacaattttatattttttgtaaaaaaaattaaatttctaagtttaaagaaattttttatatttttacagttttctataaaaataacacgaaaacaataaaaaaaaactacataaaagtaacataaaaataacttttaaataataccaaaacaacaaaaaaaaaataacatacagataataaaaaatcaanaacaaattaacaagaatacaacataaaataaaaaccctattttttttgtaaataaaatcaaaaaattataaaaatatttaaaa

SEQ ID NO: 149266 - DNA, 500 bp, Cannabis sativa
  modified_base (59)..(69): a, c, t, g, unknown or other
ggattagcaaaactctaattagataattatgtattattgagaaattatattattatatnnnnnnnnnnntgagaatttatatgatttatgctatgttatgaccccgttggcgagcaaggggcattttagtagttttgaccagagaagggtaaaatagtgaaattaatttatttacgtgcttatggaactatattattatatagtatgcctgtgttgtcttttttaggtgtgttctgacaggctggcgcggtatagtcacaactgcgtattacgggccgaattgggtacgggcttgaaatgcaatttggaatagaattattggcattttaattattgatgaataatctgaaaatttaattggagttatgtttatgtgaaatgacctaaatacccttgtgtatgtgtgtgcatgctttatagccctaggggcaaaatagtcattttgacccttatttcacaaataataaaagagttggattttgagaattgaaaagggattt

SEQ ID NO: 149267 - DNA, 571 bp, Cannabis sativa
  modified_base (28)..(47): a, c, t, g, unknown or other
ttaattaatcacgatttccataaacctnnnnnnnnnnnnnnnnnnnncacagtacgtttaaaaatcacgttaacacgcatatgctagttaggatgttacagtaggatagagtctatctttgtcggatcatcaatgataccatcttgagaaattacatttgccaagaattttacttcagacatccagaagccacagttctctttcttagcataaaattaatgatccctcaaggtctgtaacaccattgacaagtgttcatcatgatcatcacgtgtcttagaatacacaaagataacatcaatgaatacaaccataaatttatccaagtatggtctgaaaactctgttcatgagatacataaatgcagcaggtgccttctttaagccaaataatataaccaaaaactcaaagtgtccataacgtgtcctgaaagcaatcttagggatattttcttctctaatcctcaattgatgatagtctgttctcaagtcaatctttgaacaaccaagtgttgggttttgtgccctaaataaaacccatttcaacataatcagatttattagttaataaa

SEQ ID NO: 149268 - DNA, 817 bp, Cannabis sativa
cccaaatcatgacctaggacccacctcgggacttgggatccgggactcgatgcttggacttgacccgtagtcagtgtttggatctaggaattagaatagcacccgaacccaaactcgaactcaaaccaagactcggacacataccaggacccagacccacactcgggaaccaaaactgaaacttaaactggaaccagactgggatctttgaaagggattggggcttcgacccagatcagaaccgaataccgtacccaatctcagaccctaaccgagaccgaaatacggacctgtacctccccccaaacccaaatcaagattcgaaccaagactcagacccaaactcaacccgaactcgtactgtgtgacttgaaattggaaccgaaccagaagcaggacccaaacccagaccctgaccaaaatttgagacccgaaactagaaactgaaaaagaaccgcaagacaaggacccggacccaaacctagaacaaaactcagacctagccccagacccaaaccgagaccaaaactcgggcccaaacacattcgtgtacccagaatgggaccgagacctggaccagaacccagaccaggacctaaacctgggacccgatcccaaaccctgactctgacctagatagggatttggacacgaacctggactcaaacccaaacaagccctagaccgagattgaaacgcgagaccttgattcggatcgagaccctgacccagaccaaaatttcatatcttaataaaataaagtaatcaccagccctatcatgcttgaatcaacattttaaatcataaataaacctct

SEQ ID NO: 149269 - DNA, 684 bp, Cannabis sativa
taagatactggtaaaataatttccaacagtatctcacccgttgtcatcactgtatcacatcccttgtcattaccgtagttcacttgtagtcgtgactattgtatttcccaaatatatatcttaatcttaaattttatctcgaattttaaatattttttaatatttttaagatattagagtaaactcattagtttgttcttttattattaactaatatgttttgaaaaaatgattattattttttaaatatcttaattgaaaaaagaaaaaatataaataatgtgttattttagttatgagaaaagaaaaatagttttaaataaattttagagtaccatgtaaccgctttatgtctctactatatatatagatatatagatatagatttatatatattgattgatattttatgtgtgtatataaacgaaatttacgattaattagatttaatttaagttttaatattttttttggaatttattttttatcttctaacttttttaaaaatattttatattttttttatagaaaattaaaataatagtataatatcaatttgtagaattatgttttttttatagacaaattatttaaataatagtaaaatattaatttgtaatttattttttattttctaacttttttaaaaaatattttatatttgtatagaaaattaaaataata

SEQ ID NO: 149270 - DNA, 805 bp, Cannabis sativa
ggctaggagccaacctaatttaacgagcaaacagaaattgatgtccttggctcgtctaaagcccaatccgccacatgacttaggtttacagaggctatcccaggccttcaaagataaatatcttccctttttacaatggccagtccaccaaaactttcttataatggcatcaatgctatcagtagtctttttggggagtaagaaagttgacattgtatagataggaatagaagcaagaacacttttaattagagtcatccgcccagcttgtgaaagcatattagccctccaaccttccagccgagagcttatcttgtcaatagcaaaatcaaaatcagagcttcgccttccattaaaaatgattgggttacccagaaatttttcctcccccaacatctcttcaaaacccagctcctgaaggaattcctcacggcatctgtcagggcagttcttcgagaagaaaaccttggatttggccacattaattctttgccttgaccaacgacagtatttatcaagagaatgggtgattgtctcacgattaccttgatcagccttaaggaaaatgagaaggtcatcagcatacatcaaatgggaaatagaaggaccttcccgagagaaagaaaaaccacacaaactgccattgccttcttccctcaaaagaattctagtgagcacttccgcacctattatgaataggtagggcgacagcggatcgccctgtctaaggcctctcttaggagcaaaggacttagttaatccaccattgatcaaaagttgaaagttgactgaagaaatacagcag

SEQ ID NO: 149271 - DNA, 643 bp, Cannabis sativa
  modified_base (420)..(435): a, c, t, g, unknown or other
  modified_base (497)..(500): a, c, t, g, unknown or other
atgattaaaaataaataaattagaaaacctgaaagaaagaaagaattaagaatgaaactcatatataatgccatgtcatcaccattaacaaaaagaattatatatatatagatagattaggattaatagatatggatgcactcttaatgggtattacccatgaatgagtaatattagaaaattttgagtttttatgattaattattctatttaattagaagaatttctcatttttacattatatgggctgacattggtctatcagctgaaaaaaaaataataaaaaaaaaagttttttggcaaaaaaatgataaaaaaagttgaattcgacctaaatatttttcatataaacatattttttttatatagtgtaaaaaagaggtatttttcgatataatttttttttaattaagtagctannnnnnnnnnnnnnnntcaaatttctcttttattattctttatcggaccaagatctaatggtttaatatttttaaaannnntatttatagttaaatttatttacccactaatgggtaatacccattaagaagtattcctaatagatatataactatatataatttatgtgtgtatattattataccagatagatgttacgtaccaagtcacgtatgttaatttt

SEQ ID NO: 149272 - DNA, 596 bp, Cannabis sativa
  modified_base (33)..(55): a, c, t, g, unknown or other
aaaattccccccgaattattgagattgttaaannnnnnnnnnnnnnnnnnnnnnnattcaattttactgttttagtaattgtttatgtactaattccctagacattgatatctatcaaatcatacgttggttcaaactcatcgcttgccatgcttgaaggcaagtacaacaacaattttcatgttgtcttacatgacgcttattatgggcgtcaaccgcttattgatgtggcgctcaggtaagtttcctttcttttttctttaatatctcattggggacaaagtgtcactttagtttgggtggtgaacttaaatttttaatttaatttttttttattttttgagttctaaaattaagtttttgtatgagttaatttgcttaatgtaagttaatttgaaagtaggtagatagcatgatttgaaaagtttatttattttgaaaaatccgtgtttttagtgatattacattcttgactaatttcaattttgtgccgtaaaataacatggaaacatattaggtaattttctagtaattgaattggtttatgtatgctaattgggacatgtggaaagttatttgaaataaattctagaact

SEQ ID NO: 149273 - DNA, 554 bp, Cannabis sativa
acattaggtacttatgccactaaaaataagagtttatgccacttataaacataaaactttaagtacttatatcgctatttatcattttatttaaagataaaagaaaaagttagtgctattattaatgaagtgaatctattacagcaacaatatgaagcatcgtctattaaatcataaaaacttcgtatacatgatgatctagagtttaaagtattagaaaccaatagtgaattagattcaactagtgtgatcgttaacgcctggttgagcaaccatcttaatgcagcagaaaagtatcacaacttctatttatttcggtacaaacctttcttgtattgatttggacaaggcaacctttatatgtccatcactatctctaacaatggcaccaattctaattgtactcgtcttttcaagaacgcagcatcaacattcaatttataacatctcctcgaaagagctttctaatgatgcttgattgtaggggtgttcataaaataaccgatctaatccaatccaatccgcacttatgcggattggatgttgattgacat

SEQ ID NO: 149274 - DNA, 579 bp, Cannabis sativa
attgtaatgggttttatttaaggcataaaacccaacaataacacctatcgcaacttacctccaaacaaagatcttgctagagagcagggcctgggaggacggctacaaggtgtccaatcctggaaagcataacacatataagtggtactccaacaccaccaaggagcatttctaagaaaaaagttgtatagttaatgacagaagtgcagaaaggctctacgtcaattacaccagggggcaaagccaatcaaatgtagacgggatccaaccacagcattgattgggactttagaaggctggccaaccatgtcctcagtaagctggtcgtccatagaatccacattctggctgatcaccaccttcacatgctggccagccatggcctcatccaatcgcctaggcagtgctccctcaatatggctggccacttgtcttgcctgttgggattttatgccctaaataaaacacatttcaatataatatgatttgttattaattgaagattagaagtcatttatgtttacatgtagttttcatatttatggtttaatatactatttctgttaaatctagaacata

SEQ ID NO: 149275 - DNA, 1109 bp, Cannabis sativa
aaatcacagcattgtatgccgagtgttggccgataaccgcgaagtcagccatcgacttggccaccacaggtgcggttcccaaagtaattgggagtttgatcattcccttcaacgcaatggtgtctccagtaaaactatagatactcgacacgacgggtcgcagatccttctcttgtagtcccatctgcttaaaggcctgaaagttcaggagattcacggaacttccattgtccacaagtatgcagtggacattatctcctccaatattagtgacgatgactagtgcgtcggaatgtgggtggtggacccatctggcatcgctttccataaatgtgatatcattacattcctttttgaactgttttgctggccgctcactcagatttttcacattggtgagcggcttctctttggcttctttggcatatctctcctgcgatttcctagaatctcctgcgatgtggggtccgccaataatggtcactatattgagaggagttcttgaaccactcgcataatgattctcttctttgtcatccgcttggggatgaatttcctcattcttcttatatttgttgaacttttcccgcctgattaattcttcaatttcatcttgcaaaaaccaacattccagagtagtgtgaccaatatccttgtggtacttacagaattttttcgggtctctcttgtcgcggtttcccctgattgggggaggctttttgaagaccccgttcttctcttcaatggcatagatatggtccggagggactgccaactctgtgtaattcacaaagcgtggaccacccttcctcttcggagacgactccttctttggaggggatttggccaacttcggacttctttgtctttgtggactgcgtcttctgggactccttcccctggaattttttcctctaggactgcgggatcgtgaccgcgacactggaaacttgcgtttatcctttcttttctctaattcggctagagagttttcaatcctcttatgcagctccgccatagcgaaaaactcgactagtgattcaggtcttcgagcttgtagttccttccagaaatcggttcttggaaggacacctgttatcaacatacat

SEQ ID NO: 149276 - DNA, 501 bp, Cannabis sativa
catgacaatgatgggcaagacgggtcgcccaatattctgcaccgatgtgaaatcaacccggtagcaaaaacctggttatactttgtgagtgctcggttggtgccgagcaaacatttctctgatgtccaaatggatagactaaaatatgtgtacgccatcatgaaggggtacaatattaatattggacaagtcatctgagggagcatcgaacatattgttcagggagccacgggtggtggccttggtttggcgggtgtcatcactgagctttgcggggcgtatgatgtgccacagctggaatatgacaatactgtggtaccgctaagaaaaagggacatcaatatggtcaacaggctaaaagagcctcatccttaaggacaacccccagctgatgagcaacaacagggccgaaggcggcaaagagagcctagtgtcgaagaagaggaggacgagcccccacaactgcttgggcctattgatccggcgatgcagtatactcat

SEQ ID NO: 149277 - DNA, 973 bp, Cannabis sativa
ctgacgcaggcgttcgggacaccaaatcatcctggacgtggcagggctgctgtgtatgctagtacttgagaaatgttgttttcttagttatataaaaaatcataacttattttatttcatgatttgcaggttcctgacaagtgcatctaaactgtttggcaggaagaaaagggaagttttttatgttgtggctcgacaacagaaagagattgataaattaaaagccgaaatcaaatcccttaaacagaagaaaaacactgcccaataagaggaagaatgagaggtggctgatcaggcgtacgttccacaacaatacgctcgtgaggatgagggttgaccaaaaatttatcctgaggagtttgtttccctcaacgagccacctttcctatacaatttcgatgaatagagggcccttgatcaacaagtatatctctgctcaaccagtatcgacaatattgtagcccgagcgtatttgtacgagcatgagggtccaatcaaagttcactataaagactacgatgattcacatgcctaggttcgaatttcgaaaatgctacaagaggatgttggaatcacaatctcaattgaagggtgcagatatgttagggaagtatcaaatatgttccttagttagcctaaatacctaattgcagatatgttagggaagtatcaaatatcgtcgcacgtgcaaactccaaccgttacatacaagatcaaaaagttataagttttcattattgattatagtatttattataataacaaataataatatatataaactaatataaatttttattttttttacagtttggagataaaacaacattacaatccaaaaactgaattattaccaatacaacgacaaaagatagaacagttgatggcggtgattcacgaaggcttggacgattgatgttgaaaggcctaagaatttttcttccctagcttattttttttagattaacttgta

SEQ ID NO: 149278 - DNA, 645 bp, Cannabis sativa
ggtgtaatttctctctaattacttggtttatgctaggtaaaagtttggtatgattgtgggttgatatagcatgaaaaattggaatttttggttggattttcgtagctggaaactgggtttcctgtggttttaaacccagtagtcgcgacaatgttatggcagcatgttgtgtttttttcggatttttgttttggtcataacttttgactcgggaccctgtttgggatgttctttatatcgttggaaagctctttccgatctctatgtgaatatctaaaatttaaatgccaattttataatttgtagaaatgaatttaggagttaaccctatacttgtgtatttcgggtttgtgactaggattaccgtcacttggtcaggagcactgggggatttggaatctccatatttgtaggacatcaggtaagataatagttagcacgtagagatatgcacaatggcacttatatggaatgtgatatatatgagaaactagaaactgggattagagttattactttaaaatgatcggtttattggcttagaattattacccaagtaaattattaatatgtaattgttataccatgatgtatattgaagtaaagggttatgtgttcaagacataatctggttggactcggtaa

SEQ ID NO: 149279 - DNA, 825 bp, Cannabis sativa
  modified_base (683)..(684): a, c, t, g, unknown or other
ataatgccacaaaatcgtcaaagccaaaaccaccgcagcaagttctaaatcatgagttgggtatcgctgttcataatctttcaactgacaagaggcataggcaatgacccgattggcttgcatcaatacacaccccaaaccatgtttggatgcatcacagtaaactacgaacttttcattatctcatggtagggctaataccgaagttgtaatcaatctctattttagctcatgagagcttgcttcacacttatctgtccacacaaaccgttgattcttttttgtgagcatggttaacggtgttgaaatcttagaaaatccctctacaaaccgatggtaataaccagtcagacctaggaaacttctaactttcctaactgtctttggtcttagcaaatccctgacagattcaatcttccctagattaaccttgatcccatcttcactcaaaatgtgcccaaggaaagacatttgagatagccaaaattctcacttcttaaatttggcagacaacttatgttcgcgtagtcgttgtaaaaccatccaaagttgttgctcgtgctcctcttctcattgagagtacacaatgacatcgtcgatgaaatcaattacacaaatagtgaggaaatccttgaataccctattcattagatccataaaagttgcaggagcattggttagtnnaaaagacataaccagaaattcatagtgcccatacctagtttggaaaccagtatttggaatgtcctctcggattctcaattgatgagagcccgatcggagatcaatctttgagaagaccatctttgtaacgccctaatgcta

SEQ ID NO: 149280 - DNA, 674 bp, Cannabis sativa
tgccgccattacagtagaagcgacatccccttaattcgataaaagcagatgccctagaaaaagaggtagacaagctgctgaccaacggcctgatctgggacgtgtactacctggaatggctagctaatccggtactagtgccaaaacaaaatgggacatggcgggtgtgcatcgatttcaccgatctgaataaggcctgcccgaaagatcgcttccctttacctcggattgaccagatggtagacgccacctaagggttcaagctactgtctttcatagatgcctactccagatacagccaaattaagatgcatgttgcagatcaagagtgcactaacttcaagaccgacaagggggtatactgctactttgttatgccctttggattaaaaaacgttggtgcaacttatcagagaatggtgaacccgatgtttaagggcctcctgggaagaaatatagaggtttacgtggacgacatgctagtcaaatccaagacatgcatggaccatgcggacgacctcacagaatgcttcgaggtggtccggaggtacggaatgaaacttaacccaaagaagtgtacttttggagtcaagtcaagaaattttttgggatttattgtcagccaaagaggaatagaggcaaacccagacaaaattcaggctttactaaacatg

SEQ ID NO: 149281 - DNA, 623 bp, Cannabis sativa
catatgctcttcgctgatgatagttatgtcttctgtagagctaatacttgggaagctgattttattatggagttactacatcttgatgagcaagcttcgggtcaaagagtgaattttgagaaatcatctgttttcttcagttctaatactgaagcttctgtgagggattttctctgtggacagttagggatttatgaagtcgatgataacaccacctatctgggtctgccaaatatcatgggccgaaagaaaactaccattttaggttttcttaaggacaaattacaaaagtgtattcaagggtgggaaggtcgcttactctctcgtgcagggaaggaggtcttactaaaaactgttgcacaagctattcctaactatgcaatgagtgtctttctgcttccggttgaaaccagtaaggaattagaaggtattatggctaaattctggtggagaacaggctcttcgaatacaaggaatattagttggatgagctgggggtgcatgtgtagacacaaacatgcaggtggattgggcttcagaagccttcatgattttaatttatctttactgggaaagcaagagtggcagctccttacaaatgaatcttctttgattggaaaggt

SEQ ID NO: 149282 - DNA, 709 bp, Cannabis sativa
  modified_base (35)..(46): a, c, t, g, unknown or other
ttttgatgtcatttaaatgttattttcatgttacnnnnnnnnnnnnttcttgttgttttcatgttatttttatggaaaactgtaaaaatgtaaaaaaaaaaatctttaaatgtaataatgtaattttgttttttttgcaaaaaatagtgcattatgtaattatcccttttgaaattgggattttttctcatgtagctttattttagtaaaactttatttttttactctcatatagaaaattaaacaaaaaaggaaaactcaaagttttttttttcaaaaatacggtctctacaacgaccttcccaaaataactttttcaaatattttagatatgaaatcatcactagctcacccaaacaatctaatatctactccatatcgatgtaacttctccaaacaacaccaccaataatgtagaagcttttgctgatcaccatgaatgccgacgagaaagttttaccgatcaccatgaactccggcaagaagctttttccgatcagccatggcaacacgaccagcaatagagatctccatgaaaagttgacaagagtaggtcacgtttgaggcaaatctccataaacgcttaattacttgacaaattttctgggtttatcttagtaaaaacaaatctgattttgattagtatgtttgctttaattatttttttaatcaattgttgtttagttgattcacatatattggtggtttt

SEQ ID NO: 149283 - DNA, 782 bp, Cannabis sativa
  modified_base (419)..(421): a, c, t, g, unknown or other
caatagttggagatacacatattcgatcatttatttgtatgttcaattcataaatttattttgcatacatacataggattcttcatatgcatatagttttatatttatctaacataaagttcaaagataaaaaacaaagtaaattatatctctacaaaagtaaaaaattatatattttaaagacatttaaattttaaataaagaaataatacaatttgcatgttaagatagtgagatcaaatatagatagagtatactacattaaaatttgtgagagtggatgaactctcaatccatttgcaaagtttcttgaaaagcatgggttcgttgcccaatacatatgcctggtacacctaaataatagtgtgtgataggcttaagaaactaagcactgttagacatggggtggagcctgcatnnnaaactccaaactttcttaaatctttgtcggttgacactcttcaacgatagtgtgcgtatcgaattgtgtcctaaccaacgttctttctcaaacatattttgagttgtaataaggttagaaaccgaatttataacatggacacattttagaaatacatgtatacagttagagtacaattgtcaaaggatagaactgagccaaaacacaataaataagcatttcattagaaattctacaaggtttaagggttacatattttttttatccatgttacaacactagaattgtgaaattaagaattgacttgatcaatgagagtgatcgatccaggaacattatttttgagaaagatcattcataa

SEQ ID NO: 149284 - DNA, 995 bp, Cannabis sativa
attctccattttcccctcttttctcttcaaaactcaaaccctaatttctcatcccctattcggccgcccattcttcttcttcttgttcttcttcctcaaaagtcttccaaggtatgtgtattttattactctgctcattcttcttcttgtattatttgatttttgttgaagattgatatgttttatttgattttattactccgccccccattccgtttttttttttttttgctttctttattttcgaacctagcaccggccaaagacggaggagggctgatttcgtgtaaacactcaaaataaatggccccaaagtcccagacaactcactgtaagtcatctccaatctccattgtttttaacattttttctatgaaaattttgtttgtttgtttcaagatcactgtaaatgatttagggtttgggttcttaatttttgggttttttttttgttgatctgctctgtctgtgtatatatatttttttttctgttctgtgtatatatattatatctgtatatatttttgaagtataatgtgttttttgtgtattatatacatagattatttaaatataatataaaatacatatgttttttttatttatatgtatatataaggtatatatagttgtgatagatttatttgtattctaaatatattttatgcagtttatttatatatattttgttgcatgttatttttattttttaaatttatttctatcattaaaactattttttttttttgttattttttcagattcaatataaagatctttagcagtttcaaggaggtggacacaaaatttcttttgtgaaatgtatgtttttattaatgtgtatctttttttttgtattattttttatttttattgggtttgctaaagatgtaatatcttaaaaagaatgagaataatgaaaatattaaaaaaaatataatctaaaataaatttattttataaagataaatttttaagtttgtgaattgaataaa

SEQ ID NO: 149285 - DNA, 1167 bp, Cannabis sativa
tactcaaacgttttctaccgccttgatgagtgtttattccaactgttggatctgtagaatttgaatcgattgccctcctgaccgtacgatgatggttgttcacagctatctcacacctgttctggcctataaaagccagctctcttacttcatttggttactttcagcattttaccaaactttcttagagttttctcagagagaaaagaagcttcaaacaccatagatttcttgcttttattcctttgacgttgccagtcttcgttctaccggcgatcaacaccaacccccagccttcaaactttatgtaagttcatcatatgccttatacttgcttattgtccgtttatatggcatgttttatgatttctaagttggatgtcgagcttctaggaatgaattcccctgagtttactgtatgatgcattaaattcctcttctttgtgtttctattgctccttgttattacatttctgtttgaggaatcatccccatcttgcgtaataacgcctttagggcttagattagatcttgctttttcggatttgcccttttttccttttctcttcttttttctttttttttgtgcaatgttactgcctttgggatttttgcacccgattcttgccaaggaaagcctcttgggattttcttatttggcaagtgtccggagggggcctctttccagtggttaggggacccccactcccttttcagaacattaaggtttggtttggggcctaactgctggattttctcgattttttcagaactaaaatgtttgcttccgcatccggttctaaaccttccaagaaaggagaagttcatctagccaccctggaggaggtcatgcagggccccgtggcccaagagaactataagtcccgtgctaacggatgggaggcggacgagctccactccaccctgacctgcgctcaccagcttgaaaagattgtggtggtggtaggcatcaaaccttcggtctctgagacctaccaccggctgcctcgcgacgaggactattttgtcaattttcttatttttgttggcgttgcgtcgtaccaactaatccttcaagcttaccgcctactttcaggcttatttattttgtatgccgcccggagctggggttcgcccagtccggctgaaattttgtatttttacgaa

SEQ ID NO: 149286 - DNA, 2649 bp, Cannabis sativa
  modified_base (2587)..(2587): a, c, t, g, unknown or other
atcccacttgaccttccccaggcggtgtgagattgcatcgcttacctggtatttcccccttatggatcacgggactacggactgtcataattaaataagctcaaactaattcggcctaaataaaactatcaatgtgataattttattttagtaacctagtccatttaaatattaaatgggcttcctatatgcatctaagcccaataacaaacatataggctcacacataacaaataatttggatgagtcctatcatgttattagatttatcatagatgaaagaaattacaaaattaacctattacaaattatttatgtgatctattgatatctggactatgattaaaatttgatcattggatctgtcaacaagttaatcatagcaattaagattaaataagtaataggttagttaaaaaattttgaaaaaatattttaaaaacaaacaatcaaatatgtaacaatatctggaaagtaggttaagatatttctattttaaaatatatatttaaaaaatatcttaacttaaattcaaattaggttttagaaaatatttgaaaaatacttaaagtctagcaaactcctaattatcttaaattcaaatttgaaattcaaatatccaactaattttcaaacatctagtttatttaaaattaatataaacatctaataagataattaatataatatcttaatttaaaaattaaaataattctaatattatatttcaaatcttataatttaataaattaaatttgaataaaataataaatttaaaaataggatatttagatggttaggatattatcaattttatttaaaaattaaataaaatatctaaatttgaaaattttatggttagaaaaccttaaaatatatatccaaatcaaaattaacaacttttcaaaatttcatgttattttaacaaaaatataaatttaaattaagataaaatgtcaaaattaatatttttctaatcttataattcaaattaataaaatatattttaaaaataacaaattttgaaaatctaatatgattagcaatttgaaattctatttagatcatctttaaattttattaatattttaatgtcaaaataagatcatttcaaattattttaataaaataagtaaatatctgattttataattaaaattaataaaaccaccaaaaatagtcaaatttcaaaaaataaccataaaagcaagtttgtggaaaaattaatttttcaaattcaaaggctactagtatctaaaactaatttaaattaattaaaaaaaataataaaaaattaattttattctaattattagatttttatttgaaaaataagattctacacaaaattctaccaaaatttgaattatgtttcattgaaaaacgatttttgaaacttgaaatatcacaaaaaatggtgcaacacattgcatactccccgtgcatgcaagggggctgctcggcgagaaacaggctgcattgcagccttcttggggggcatttcttggtcagttggggcttcggacagcccttgtctgagataactcgatcatgggcttgtctgaagcttggtcatgaccgagtgacacccatacccgcgcgcgtccaagtgtaatcctaggctagatatttattaatgtttaaaaaatcatgacaaattcaataaaaaccccaattaagttcaataaaagccctaattcattaatatttcatctactttctagaaaaaaaaatacttctagtatgaaactaaaaatagttctagtcaaaaatatgtaattcacaaacattcatcaaataagcacataaaccaacatgaacacatcgaaatcatcacaatcattgttttaaatccatatttcatgaaaatcattaccatggctctgaggctagttgttagaaattattttaccagaatctagatttactaacatgtatgttgattaacaccctgaacatgaattctctaaaataatagaattaaacacatataaagtttaggaaaccttatattggtgggagtaaaataatatgtctccttcgactcagatctctaacccttgttcctttttgtcgtagagtaataacaagatctgagtttcgttctccttcaggtgttggattcttcacagtcttccacattatgattgagtacttgacttgatgttggtggacatgtactctatcactatagggctcaaaatttatgaagaaaaagagagaaggagattcaaattctataaaaggaggctctcaagtttctagttgtttgacagagttagaaaacaaggttattaggttggttggatgagaatgagagccatcttattccctatatatgatttttcctagaattagatttaaattatatggaattaaaaaagataaaaaaaaaattggctaaaaatactcttaagtggccaactatacaatgggttccactagttagaattttaccattttattcaataatttatcttttctttcactaatgtcatattttctaattttaatgcttttaatgtcataactattcatttaataatcaaacttaattatcaaataaaattgtcatttaatttatttnttaattagacttaataaagtctattaattaataaataaaccctaaaacatcttttcttcaca

SEQ ID NO: 149287 - DNA, 580 bp, Cannabis sativa
  modified_base (519)..(549): a, c, t, g, unknown or other
ctctctctctctctctcttgtgttcactgccgccgactgctcactgccgccgactgccacctccaccatattcaccgtcaacgatcccagccgactgccacctccaccattttcaccctcaacgtccaccacactcaacaaaccaatgggtaagtatttttcttagtagttattgttgttttttgttgtattgtatggatctgaacattgttagttgtaatttgtggcttttgtgtccttgaaatggagttagagtttgttccgaacaccctgtgattttctaggttttttttggcgattttatgcgacattgtacgatgttttgtgcaatgtcataagaaatctgaggttagggataacatgattaatttaggcaacaattaacgatttttgtgcgattttgtttgtgattttgttgttgggcgatttgtgtgcgatatttttgcggcattatgcgattttgttatgtatgttatctcgtgcgacattatgcgatatttgttggaattattttaccannnnnnnnnnnnnnnnnnnnnnnnnnnnnnntaacatcctaaatatgaacttcttaaacaat

SEQ ID NO: 149288 - DNA, 1110 bp, Cannabis sativa
ttgggaatgtcgggaatagtcaagattttagaatttaccaaaaatacccctaagtgattttatgatggtttagtgtgggcaaggacaatttggtcttttttcccatctgtgttttttcctttagtggacttaattttaattgataattttaatttttatgagttataagctgattttatttggttataaagcaaccttttatcaattttacaaaaaataaaaaatttgaaaaaaagaaagcattttctctctcaactatctctctctctttcgaatccacatagaagcagctagggtttgctatatttttcctccattcaagctagtttgagcaggatttgagtgttcttaagctctaggtaaactcttgtcttcattttcttaagttccttaaattttttgaaatggattatgcatgtttttaagtttatagctgctgtagttgctgttagtgtttattattgatttcaaaagttaaattatgtttagaaatattgatttaagcttggttcaatggttgttagtaagtttaatcatgttttgagttttagaactcaaacttggagctttaatggtaaattcatttatgagcttgggtattagttttattgcttgctttacgtctattgggatatattatgcaggtctggaaggtttggtaaggtatggaaacgatttggttaggggttgtaattgtttggtttttctggggaaaactggctaaccggtattacaggtacctctaaaatcggctaaccggtttttgcagcagggttcccgaaaaatgtaggttgtcgtcgcgttagtttcaagtttctggtttgttagttccatgctagtttagggtattgccatattaagttgttgtggataggttttcggtttaaaacctaagtcctggttttgatttaggatgtcacttatgcatgttgttatcgatgtgatttaggagcctgtaattcaccgagcagttgctccactcaagttgaccgacacacttgaattcgacattgagttaagattagtataatgtcatgcatatgttattacacgtttagcgtacatgttgtttatgcctgttagattccattgatagcagtaatagtatac

SEQ ID NO: 149289 - DNA, 582 bp, Cannabis sativa
gaccagacattgcctttgctgttaataagcttagtcaatttctgagatgtccaaccacaatacactggagtgttgtgaaaagagtactgcgttatctgaaaggcactatttaccatggaattcacatcaagtacagtgacaaattgcctcttgtggggtactgtgacgtagactgggcctgctgtccagatgatagaaagtcgatagccagttactgtgtgtatctcggagactctctgattgcttggtcatccaagaagcaatcggtggtggcacgttctagtacagagtcagaataccgatctcttgcacaactcactacagaagttacttggctcgagtctctcctcaaagaaatacacttcaacttacctgctacaccagtcatttggtgcgacaatatgagtgcaaaagctctagcctctaatccagtttaccacgctcgaacaaagcacatagagcttgacatacatttcatcagagacaaggttttacagaggaaaatcgagatcagatatattccttctcaagagcagattgttgattgctttacaaagagcctcactcatcctaagttccagt

SEQ ID NO: 149290 - DNA, 503 bp, Cannabis sativa
attttaaattttgtatttttcaaccacggtttttaatagtcattgagttgcaaaaaaaggaaaaaaaaataaaaaatttctacttttttctcttgcatttattaatttacacattgtcactaattagttaaggtaaagtataaacataaattgaaaatgaacaaaattgaaatatatacaaactatgtactcaaatataaagtataaatattaattaatctttaactggttatagtgtaaagtataaacaaaaacaaaaactaatcatcatataaagttttaggccagtgttcccgcaagaaataatatcaccactgtcgtgaactttcctgcgaacccataacttgctctcaacactatagccaatgttgcaaatcaaactataaaaactctttatgtagagacaatgaaggaaaataaaattaattaggcatgaaatgcagggtattccattaactagcatatagagtagggatgcgcattttccccatggggatgggttc

SEQ ID NO: 149291 - DNA, 817 bp, Cannabis sativa
  modified_base (57)..(58): a, c, t, g, unknown or other
ttttatgtagtttaatatttttgtttattaaaatttttattataaactttatatttnnattaggggattccccgccccatctccgatgaggaattagcggggatggggattaaaatcctaactaactaaaataacaatcagtagcaaccaaaaatattattattattaataacaatcgaaaaaaatatttattaaaaaaataaataaattctctaaactaataaagagaaaaagataggtagcaatcaaaaaaaatatttttattattattattaaaaataatatatatgtgtatagtaaaaaaaaaaatgtatttaaaagtattagaaagatattgtgtcaaaaaataaaattcaaatacaactcatgtagctcgtttataaatggtagagtgaaatacgatgatgacaataataaatttgaatatattgacaagatacggtgataataacagttttgaattaacgaagccccgactacaagacaatgatacaaaaattttgagatcatatatatagtcaatatttttctatagatttattaattatctttttttagacctcaattttgtgtaaaggttcttcaaattttcttttacactataatgtttgaagatatatctttatttcttttatttattaaggaggaggtttcaatagttacatcaaatatgtaacaatcatggttacatttattgttaaccattaatagagtattgttgaatgattgtaattaatttagaaattaaaagaaaaataaataataaataacttgtaacttgatactttattttcttataaaaacttaattatattta

SEQ ID NO: 149292 - DNA, 897 bp, Cannabis sativa
  modified_base (48)..(56): a, c, t, g, unknown or other
  modified_base (303)..(319): a, c, t, g, unknown or other
  modified_base (456)..(456): a, c, t, g, unknown or other
cctattattgtttgatctaaattgccatggttaacttattgacagatnnnnnnnnntgattttaaccaatggttcaattgccaataggtcaaataaataatttgtaggaggtaaattttacagtcttgtttcatctctgtataaacctagtaacatgatatgatccatccaaatttgtgtacctatgtgggcctatatgtttgctttgggcttagatgcatataggtggcccatttaattttttaattacaacggactaggttgctaaataaaattatcacacttgatagattttatttaggnnnnnnnnnnnnnnnnncctattcaattaataatagttgtttaaattaaggttaaattcctcttttttgggccttgtgtgagagttagggggtcatagaactgtgaaggcccatttgcctgatttgaataaatgtactaggttaattaaactantttaacctaataaaattgattagccacataattaatttcaaaatatatgaaattaatttttcatttgattaattagaaattaatttaagaaaaacacacttagtttaatgaaactttttcaagataaactatatgtattttttttgtatttaattaaataaagaattataactaattagatttttctagaaacttaattatttaatatttttctaaaatatatttaagttaacaatcagttatttataactaattttagttcaacttgaatttgaatatttttgaaattcataattaagttgaaagattctaggaaatcagttattgaaatattctataaatattgttttaagttgaaaatttgttaattttggatcaacttaaaatggaatatttttcaaattaagtaattagttaaagatacttaatttgttatttaat

SEQ ID NO: 149293 - DNA, 666 bp, Cannabis sativa
  modified_base (346)..(346): a, c, t, g, unknown or other
  modified_base (505)..(513): a, c, t, g, unknown or other
ctaggttcaagttcgtgtctaggttgggtactaggtcccggtcctagttctgtttcccaagttcctatccagattctgggtccaggtcccggttatcaggtgggtttgggtcccgctctaggttccggttcaagtcctagtctcggttcgggtttaggtctctgtctgagttttgatcttggttcgggtttgggtgtaggtcttggtcctggtcctagtcctaattatgttgtagttccatttgcaattctgagttcgagtttcggtttcagttcgggtcgagttcgagttctggtctgagtttaggttcgggtccggatttaagtctaggtcaagatcaggctcngggtgtggtttcgcgtcctgggtcttggtctaggttgggtcccagtcccaagttccaaccccgatctgagtctggattcaatttcgggtctaagtccttggttctgatgctggtctgggttcgagtttgggtctttgtccgggtccgggtctagctttnnnnnnnnntctaggtgtgggtttgagtttgggtcctagtctgtgtccgtgtttgtgttcagtccttgaccccgttctaggtctaggtttaggtccaggtccaagttcgggtcccgaatgcgggtccaagtttttgtctgggtccagcatttcgatcccagt

SEQ ID NO: 149294 - DNA, 889 bp, Cannabis sativa
  modified_base (148)..(148): a, c, t, g, unknown or other
ttaccttcaggaaaacatgccatagggtgcaaatgggtgttcatggttaaattcaatcaagatggaacaattgctcgcttaaaggcccttcttatttccaagggtcatgctcaaacctatgaagtggactattgtgatactttttctnctgttgctaaactcacatctgttcgactatttatttccatggcagctactcatcattggcctttgcatcagcttgatattagaaatgattttcttcatggagatcttgaggaagaagtgtatatggtgaaacctcctgggtttgttgctcagggagagttagggcaagtttgtcgtctttgcaaatctttatatggactaaaacaaaattctcatgcttggtttggtaaatttagtcagactgttaagaaatttggcttgttgaaaagtaagtcagatcattctgtgttctataaaagatcaattgttggtgtcattttgtttgtggtgtatgttgatgacattgttattactcgaaatgatactggaggcatctcagcccttaagtcattcattcatacccagtttcttacgaaggatttaggggtgctcaagtatttcttggtgttgaagtttctcggaataaataaggtatttttctgtctcaaaggaagtatgtacttaatttgttaattgagacaggaaaattgagagtaaaaccatgtaatgctccaatgaatccagttgtgcgtcttacacgtgatggggaattatttgaagatcctgagaaatatcgcaaattgattggaaagttgaattatctaattgtgactcgtttaaatattgcattcccagttagtgtcattagtcagtttatgtcttctccaacaattcatcattgggcagcattagagcaaatttt

SEQ ID NO: 149295 - DNA, 525 bp, Cannabis sativa
tacacatatatattttgagtgggtataaaacaataaataaaagtatcatattattctaatgtatcagaaataaaatattaaagaataaactcaaactatctaacattcacctttttttggagtatgcttgtgatattaacttgagtcttgacatgtccaacaatttgaatatataaacctgcaaaattaaatagttagaaaaaaaaaattagagatagaattttattgtacacttattttggattggaccagtaattttaataaattataataatcttaaatttgtaccataaagtgtgaaaaggaaagtcatgatcagttaaactattttttcataataaactgttttctttctagactcgcctttatcttctcatatctgccataaaaaaaatcagaatacacattttaactaactattatctcaatttttgcactctgacgtggcatcacatgaatggtgacatgtagaatccacttggaacatctactcgggaagcatagtcctagcaggatgcctcgctg

SEQ ID NO: 149296 - DNA, 770 bp, Cannabis sativa
atttaatgttcacttaataatttattaaaaaaatataaaataatataataatacaaaagtaaatataaaatttaataataataataatgcaagttgtttaatgaaaaagaacatgctaacaaaaatttaatgatataatggtaaatataaaaggagcattgttattgggcatcagtggtgtcaagcacccctaggcatgtcgtcttgcgattggctagcgatactcctaaaagttattgcattaaactatatgagacacgatacttaattagaccaataacgataatgacacattccaaatttaatggctgcatttaatttgggcatttgagtaattgaaggaagcgtcctaggttgattgtacacttgggcgctgggcccatttccagggactcaagttgtggtttcctctctgagtttgtttgaatcttcattattttttattatgataaaaaaaatttccagaacactttttgatgaacttaatcgaaacagcccaggttggcaatacgtcaacctgggcattgggcccaactccaagtgttaacctgggtgttaggtcctaattttaccccttcaaaaatttcatttggcccctgaaaatagttgaatctcaatattttctatttttggagaatatgctaaaaaaaaatcttagaaaacaccatcgaaaatggcccaggttaacaaagattgaaaacttaggtgttgggtgctaaaaaatgagccttctccaattctgattatgatgcctcaaatacgtcagtggt

SEQ ID NO: 149297 - DNA, 829 bp, Cannabis sativa
aacacttgacttattttcttgttgcagcagtcagacccatggatgaactcttagccactcttgctggagcccacagtcccgatgcttccccacctccagatgcttctcagttggtcactcccaggaggtcctcttccaatgccccttcgggcaccattgtgttggtggacgtggaggagggagttgagaaagttgaagaaggtgaagaagcagatccgactgccctcgagcgcaagcgcaagggcaagatggtggaggaggagccttctaagcggccccgtagggtggacactccggcccccagccatgactctgggattccttccgaggcggaggaatacactgtgcctcacggcatagtgttgactccgatcctgggtgatgaggagacgtagaatctccgggtggccaatacaattacgccctcgacaagtatagccgggggcatgctgaggtggaggccttgaagagaatcttacgggaggagcagcaaaacactctgaacgaggaggccttctggaatccctgggatctgaacatggatccgctgacggattggttcaatcgcttcctcgggcccaacttggctccctttgcctcggagatgaccagcgagtatgtctcccatctgactcagttcccgcctaagcgatatgccgcatgtgcatccttgaactccgtttaccaggttcaagacatcagcaacgccatggctgtggtatgtacttgcggtttatctcttcccttgatattttgtccaaggcattcgatcttactcttgtctcctttttcagattactgcggagaccagccgcctttccaagaccat

SEQ ID NO: 149298 - DNA, 619 bp, Cannabis sativa
ttaatacgcaagtatacacaatcgaatcaagtaatataataatagatatagtatcattctcatgagaatttattatcaattaccaatcaattattctttggttctatttgattaataaaaattattggaaaaaaagtaaataaaacaagacaataattaaaaattaaagaaataagacaagtattattatgatctccaactatcctttattttacctcctaatacaattacccagtttcccttcttcctattcaattgacaagttgagttaagtagtttataatctggttaagacttataaacccaatctatgtgaaaactttatatattcttatagtaaagtttaatcagaaagataacattaagcaaaacaactaataaaattatacaaataacttaggtactttcatcctaaattaatttgtatccataacaattagagcatattcaaatctcacctttcagaatttttattcaaattcatagataacaattatagctagatgaccagtaaataattacaaaattaaaatagattgtacaaaattgaattaaaagaaaaaaataaaattgaacaattacattaatccataaaataaattcaagtggttcatataat

SEQ ID NO: 149299 - DNA, 607 bp, Cannabis sativa
  modified_base (576)..(578): a, c, t, g, unknown or other
ttttttttcttttttttttacttcctcacttttgatttgatgctattgattgaccaaaaattgtaaaacaaagcattcatactatccggactttaataacaattttattcgttaatcttttaatcccaaacctaaaaataaaatttgaatttataaaattttgtttttaaaaaataaaaatatattttgtaacttttatattttaattttaaaaacagaaaataaaattgtgttttataacttatttttttttttattttttgattttatttacgttgggttcaagtcaaggtctgagaatagagtcggggtcgtggtctgtccgggattagggtcgtggtcagagtttgagtcccaaggtccaggttgggatcagaatctaaaatattgataaaaaaaatatttaaaaaaatgtttaaagtaatttttttattttcaaaattttaattcttaattaaaaaattgaaaaagtaaaaacagttttatataacatgtttttggaaaatatttttacttttctaattgaaaaaatgaatttttgtttttttattatttttatacttcaaaacagttttnnnttttttttttgcatttttttttttttttt

SEQ ID NO: 149300 - DNA, 904 bp, Cannabis sativa
  modified_base (305)..(307): a, c, t, g, unknown or other
  modified_base (724)..(733): a, c, t, g, unknown or other
tttatctaaggaaaagtttaaactattccagaaaagataaatgtcaatgaaagaattccttaggatcaagagtgagaggtcttagatatgctttgctatgcactggaccggacacctgctgttgagtggaagtaatgagttggtatcagattaatccaagaaatgaacattggaggaaaatcaagtaaggcttaagatcaagaaaaggaactatatgttagtcgataagggtggtattttaatactcttagactacaccaaattagggtactagacttgtcttagtgctagaaagtctactgatnnnatggtgattactctaggggtggagcagtgattttggagaagtgtaaaaaccgatcctgagtttctaactctaccagtgagattgaatgttaaagttccagaaaagatacttattaagtctatggaaagttctatacaatttttgcattgtaccaacaatttattaactactagtgttacttcctgagtaacacagaagtagttgcgaaaaagtaaagaatccagtatccctagaggagtagacatataaagaggaatttcggaatatcaaagattttgtgattaaggaaatgtaatggtggaggaaaggttgtgttggttacaacctgtaagatcctattacagtagaatactacatactacacttgatctgaatatcaaggtgttgagattatttaaaatgcactttttgttttannnnnnnnnnagtgggagtttgttgggttttgtaccctaaagaaaacccacttcaatatattctggataactaataatataagataagaagtcgcattttatgttgcatgattcacatgatttatttcatgattatagtgtcgtcagcacagtggaatataatcatgattatattttcaaa

SEQ ID NO: 149301 - DNA, 577 bp, Cannabis sativa
  modified_base (517)..(537): a, c, t, g, unknown or other
ttaatcaattataattccaaaattagactatgtctagtttatgaattttcactaaataagggcaaaataatgaagaaatagtttctaggattcatttgttaattaagacactttgattagtctaattaataaatatattaaatgactatattatttaataattaatttttagttattaaataattggaaaattggcatttttgagaaaatgagaaggaaaaatgacaaaatggcaaaattgtaaagtggggctcattatcctatctatgcccggccactatgtagtctatttatcatttatttttttcattattttaatggaaaaataaatctaacctaacgctagatggttaactataaataggtagtgatggcttgaggaaaaagaagacgcatctcattccttcagagtaaaagtcaaagccttcttcctatacctagtttccaccttctctctcttcctctcttctgaaaaacgatgcctatagtgagtgcgtgagtgcccacacacatcaannnnnnnnnnnnnnnnnnnnngtaaggctgtgaagaatccagattgaagagaaggacattc

SEQ ID NO: 149302 - DNA, 818 bp, Cannabis sativa
ttctggaagattgataaaatggtcgattgaactggggcagttcgacataacataccatcctcaaacatccatcaagggccaagccttggctcacttctcgatagaaggtataactccagaagaaaatccaccggatcagcgagatgcaaaaacttggaggttctacgttgatggcacatccaacaagcaaggtttgggtgcatgggtaatatcaagatcgccataaggctttaagtttcactatgctcagaggttcaaatttgacgcatccaataacgaggcggaatatgaacttgatctctggcttaaagatagcagaggcattgaatgtaaaaaatctcatttatcatagtgattcgcagctggtcgtgaaccaggtcctcgaggaataccaggccaaaggcttaaacatggcgaagtatttagagaaatttcggaagaacttgaaaagattcaattactttaaaatcaaaaaaaaattgatagaacaaaactccaacgtcgatgccttaggaaaactagcctcgcagaatgacttggatgaatcgaacttagttccggtagagatgctcggcgagccaaatatatgtgaaactgaagacgtcaggatgatagatatctctccaacatggatgacacctactataaattatttactcgatagacaacttcctaatgacaaaaacaaggtgcgaaaactattgtattcaatgcttcgctacataatgatcaaaggaaaactatatagaagagggtattcaatgcccctacttcggtgtgttcttcctgcagaagcaaatgaaatcatcagagaaatt

SEQ ID NO: 149303 - DNA, 762 bp, Cannabis sativa
catgcaaacatcaatcacttcaattttcttatattgataactaatcagatttttaaagagttttatttagggcataaaacccaacagaaataaccaaaaatgaaggaaaccctctccttcccttctctctcttcgaaccagccaagagcaagggggtttgttgctgaactttggtgatttcaacaagggattcaaggaggttcaagctaaggtaaccctagttattttctagttgtgttttctcaagatttttattagtttcaagtagtgattttgcaaattggtggctgttagggttaggttgagttgtagttcgaattttagggttcatttgagttgaatatagctttttacatctggtttttgtatatgggattgaatttatgcaagtttgagcttagaaactcaaagcttaggtctttaatggcatgtttgtttatactgactttttctgtgaaatactggttagaaaatgttgtctatgcatggtttaggtactcttgaaggctggttgtatttggtgaaggattgagcaacaaatggaaattttggggtgaactggtgcaaactggctatccagtttcgacacggtccccaaatgcttcattttctcgattctcgtccatttcagtgccatagttgggtgtttcattttttctagagttagagtaacccgtagagagtataacagaaccaagggttgtgggttcgggtttctcagattagggtttttgatcgtgtgatttacctggtttcattatg

SEQ ID NO: 149304 - DNA, 728 bp, Cannabis sativa
acggacatgggtctctactgctacaaagtcatgccgtttggtctaaaaaatgctggagctacgtaccaaagattggtaaacaagatgtttaaggactagatctggcgaaatatggaagtgtatgtggatgacatgctcgtcaaatccagaaaggctaggggcacatagacgacctggacgaatgtttcaaagtcctcaggaaatacaacatgaaactaaatcccttaaagttctcctttggagttagctcgggaaagtttctaggctttattgtcaatgcccgaggaattgaagccaatccaaaaaattcaagccctcttggatatgaactcgccaataaaaaccaaagaggtgcaaagcctaacttgtcgaattgccgcacttagcagattcgtgtcaaaatcaacggataaatgttttccattcttcaaaatcctgcgaggaaacaaaaacttcgagtggacaaaagaatgtgaaagagctttttaagatttaaaggtacagctcgtaaaacctcccgtactttctaaacctctagacggtgaggagctggggatatacctagctgtcacggagcatgccgtaagtgtcgtggtaatcagagaagagaacaacgcacaacacctagtctattaaattactaagagactcatcgaggccgagggccgatatccgttgatagaaaagctcgcctactgccttaatctagcaacaaggaagttgaggcc

SEQ ID NO: 149305 - DNA, 907 bp, Cannabis sativa
aacatggctctcatcagtataaccaaagcatacaattaataagaataacaaaagatcatattcctttttattttctagaaaatttgacagcataacagctatattttggataaacccaaaattataacttgcatagatatttgtacacaaaaatatgtttggcactcagtgccccaaagcaatccagaaaaatgtgcaggttatgttttcaatttttcaaacaattagcaaatcataaaattttagaatatatatgcctaatgttatacaacacatataaaaatcaagtccaataatcaaattgagtctctacctctcccaagtcgttaaactttgtccaaaagacgatcttaagctctcaagtctcgagctcctattgtttagtccaatcttagatattactctcacctataccattaaatggttaaataattatcatcatcgcattctacattcaaaatcgagtccaacgacatataatatgactatatttaaaattttgggttccgaagcctcacctaagcggtgcacattaactatcagtggcggtaaaaattagtgtaccagaaacgtcgccgaaaataggggtagtatatatcaaaatgaccatctcaacgagtaggtcccacccatgccaattgtttgtcaaaacggtacacgatatcgctaaaaagttgtcaaaaaggggcagagctacaaaaatgtcgtcgaaaaaagtagtgagttgggcaaaatagcttagtgtagttgttctcctcgacaagttgagtctagtggtgaagacagctcgtcaaacgaacaatggaggtgatcgaaaaatctgttcaaagtttgaaccgccaaactttgacttacgatcccgagctaacggcggtgaaagaagcggcactgcttggggggtgaggtc

SEQ ID NO: 149306 - DNA, 947 bp, Cannabis sativa
tagaaccaaaatggaaccaaatcggcaatcgagatcgggatccggatctggacctagggcttggactgaacccgtagtcggtgtctagatctgggacccagccccagactcgaacccagacccagacccagacctgaacctagtcccacacccaaacctagacccgaacccataccttgtgacctaaaattggaatcgaaatcggatgtagactgggacatgggaagaggtaagaaacaaagacttggacctggacctcgaaccataactagacttggaccaagacccggaaccgtaactagaccaggacccatactcccaacccagacctggactcgggacccgaacttggacccaaactaagacctaaacatggaaccaaacttaagacacaaaactgggaccgggacctagaactgcaccccaatctcagtctcgaacccaaacttgaacttgggacccgagacctaaacgagaaccagatcgggacacgtgagagggatctagatcctggactcaaaccaggacccaaacccggaccaagacccaaatcggaccctgacccagacccgggacccgaaactataacctgaacaaaaactgccttacaaggaccctcgaacaagcctaggaccgtgaccaggacccaaacctagacccagacctagaacggaactcggacctagccccagacccaaatcgagaccagaactcaggctcagacacggtcgtttaccctgaccaggaccgagacccgaacccaaaacccagacccgaacctagacctagacttgggacccgatcccaaacccagactcaaacttagatagggatccaaatattaacctagactcgaacctagacctagacccacaccgggatcgaaacttaggacctagatctagaccgagaccctgacccagaccctgacttggacccgcacccgg

SEQ ID NO: 149307 - DNA, 683 bp, Cannabis sativa
tctctctctctcgatgatgcaggtctaggaccaggacccagttgtcgtcgacgaggaccactgagccattggccgttgacgaggaccccgacctaggtaagtcgatcgatcacttctctcttagccctattctctttctctctctgtctataccgatttcctctctctctttctctctctcatttaagggttttccataatttttctttgcaatcttgttaatacttcttgtgtataaatattcctttttgggtattattgtgatttttattttcagatctgtggaaaagataatatggttgtggagaaataaatttaggattttaaagtttgagtttttgggactaaaattttgtatatatatatttgtgtgtttgtttgttgaatttagatttatttaaatttggtttaagtttggtttgagctttgtttaatttttttgtgcgatatggatttgaaaaataggttgtggtggtagtatcggtaatggtgagtggtggtgtttacggtggctatgcatggttgatggtggttttggtagtgggtggagtggttacaatggttatggatggtattggtaatgacagtatatagattgaagaagaagaataaaaaaaatatttttttaacaaatatatgatatggtagaaaaaaaaaatatatcttttttattttaatttttt

SEQ ID NO: 149308 - DNA, 545 bp, Cannabis sativa
caagtcactaaattgccacctcatcaatttttttagtacccattaatggatattacccattaagaaatcatcaatatatatatatatatttaaaacatgtatacattgatgaactggtgcgatattttctctctcctagtgcaattttttttctctctccagtacgttgaataacctgctgcgatattggaacgtttctgtttgtttccgttagtctttgtttcacttattaattccccttttattagtttaattccatttagtatttttatggggttagaattataaggagtactttctttatttgattttatatgttgtgatcgtgtttatatgttggaactaattaagttttccattagtcttgtcttttgacatggttctttagtctttccctttagtttttctggttcgattcttgttggttcttgttagtttttgattatgtggggcactttggcatgggttgtgtagcttggaatcatcatggtgctatggtagaagcattcaagaaggggaagattggttgtgttcaacccgaaatt

SEQ ID NO: 149309 - DNA, 507 bp, Cannabis sativa
taataatgaggtgtatttataatttggtggggtgcaaataaaagtccccatataaaataaatgaatttacttaaatatccttcaaaaattcaaagatatatttaatatttagtaagggtatttatccaatacaattcgtattattttactcatgttacatttgatttgcactaagttgcgaattttatattttagattcattcaattcatgtcatatctcaaatccaatctaatctaatttgtaaaagtgcgaatttgatcaattattttattttaattactttttaatattaaattatttatatctattttaaaatatatttttttacataactaacaacaaaataaaataaattaatgttgttttatgtttaaacaaaaaaattatataaaaataaatgtttaagtttgttttaaattatatttttcttatatataataatagaatatacattttatctattaagttttaaaatatatttgtagggaccggatttcgtcccgtta

SEQ ID NO: 149310 - DNA, 502 bp, Cannabis sativa
  modified_base (34)..(34): a, c, t, g, unknown or other
cttccgatcttcataagatagaatagccttgacnctcgcctaaacgggacaacgctgggttcgggtttggttatgactcccaaatccaaataccgactacgagtcgggtccaagctccgggtctcgagtcccgaatcctgagtccatatttgaatgccagttttgagtcctagtctagttccggtttaagtcccaagtcccagtacgggtcctaaatcttggtctacgttcgagaccagggttcggtttcgagtcccagacctggttctaggtttgggtctgggtccccatggtcaagtcttacatttaagtctaggtctaggtccaaattcgaattcaggttcgagtattgggtctcggtctacatttggatctagaacggggtccttatccttatgtgtgtccagttttggatctggatctaggttcgggtcctggtccgattctagtttaagtcaaggtttggctcctagtccagtcccacggtcttaggtcctagtcc

SEQ ID NO: 149311 - DNA, 782 bp, Cannabis sativa
  modified_base (613)..(616): a, c, t, g, unknown or other
aagggagacacccagagatatactcaaaactcttaagagatgcaacttaaggaaattgaggaaaatctagggatgcagcctgggatatgtggaacatcggacggaaatcgccaaccctctcttcaagttcataagaaaggaactgacacaaacccctatagggggaacaaggtgaatcagaccttaagaggaagagaaaaacgagaagaggcgaggggtaccaagaggcgtacagtatctcataatcgacgtgggaggagaagagaacactcgtcatagtaataatcaaaaaggcataatatagcatgtaagacgagtaaggtccgacagcagtcatgaccactgtgacctacgagaacatttgaacttgagaaaaccggatcttcatcaacgactcgatccaaaacaaagggatttactccatttgcgaatggacgagttggagaataagttcagaaaatatcaaattagggaacccagaagacaaccggggtatgattctattaaagagttcgggtaagaagcctcacgatcaaaaagaaaagacgattcgaaaaggctgcccaaggataagaaacagaagaaacacaacaaatatatccctctttatgcnnnntataccgagctcaatgaaactcgaaaagatatctacctcgcacatatacaggaagtcgctttttagcaagccaaagcctatgaaacatgcgagacgtaaaagggacccaactaaacggtgtgaatatcatggggatattggtcatacaacggaagagtgtcgtcag

SEQ ID NO: 149312 - DNA, 517 bp, Cannabis sativa
aaattaaagcctggagagactattcgattcgtatatgctgaaggcaccataagaaattcacttttctattcttctagatcaaatcatatatatacctgttagattttatatctatgccgtaatatatatatgctattttctttaaagagatttgatttgtgtaataactgacaacgacaggtatatacacatacatatatattcatgcatttacttcattttttttacacttttctatggctatgtaggtgtatatgtttgttcacatatatgtatctcttgaattatacatatcatgcgatcacaatatctgcatagatatattttgtaatcctcaaacgccaaagaatcaattaatcataggtcaatgatatttttcttactgcgtagttgatcgacttcacaacacacagtagactatcttatcattcccttatcaagatatattattgtatatatataatataataaatatatgcggcggaaaattttcgcaaagaaggaaaaagaagcgaaa

SEQ ID NO: 149313 - DNA, 842 bp, Cannabis sativa
  modified_base (91)..(114): a, c, t, g, unknown or other
  modified_base (726)..(728): a, c, t, g, unknown or other
aagagtacaatataaaaagactgtattttcagtaaataaaatcaaaaaaatcataaaaatgtttaaaattctgtgaaactgtatttttgtnnnnnnnnnnnnnnnnnnnnnnnnttgtgaaataatccctatttttaaagagtaagcccgacacggcccgtaaatgcagtatttttatgtcgtgttcgaattcgtgtcatactttgcttgtatctacccgtatttcttaaacaagtcagcccgttttcatatccagatttaaattcatgctttattttttcatatttcttatatgtgaatgcattctaatacctttaaatacaaaatttctatttattattatttttgtaacctttcctctttaacgatacatacaataaataaaaatctcaatactgtagaagatttaaattcaaaaaaggagtggtattattgtgttgattttgattttcattatttagctggttaattcatttgtgtggtgtcagattgttctttaattaattatagttattttatgtttgtcgggggatctttttgattttgtttttgtaaaggtctaatgatcacaaataatgcttacgaatttggaatcaattaatattgttattgaaaaatggataaattgacgagggagagctatctgccacagctaaaaattttacttttaattacaataaaatttgtaactgaaagtaaaaaaactgtgactaattataaattatnnntcctatgttgtgactaaaaagtctgtgtgactaattaataatattattcacaaaaattacaatttgttgtgactaaatatgtttttgtcacaatacttgttgtgactaaaacta

SEQ ID NO: 149314 - DNA, 624 bp, Cannabis sativa
  modified_base (481)..(493): a, c, t, g, unknown or other
ttgccttctatgaggaaccgtagctgtaagttcctcactaacgtagtccacaccctaaaccaagacgtccccatcagcatcgactggctccccagcctcattgtatcccccataatttggcggtgcaatctcttcctccgcctcagacggactgctaggacagacatcgtcctgctccttaatttcctggacctcagcgtccccttcatgatccccttcctcatggacggttggatcttgttcggcactgggcaaagtggcgtgccgagccacttaagggtcagatgcatcgaccatgcgctttgtctttctggtgcgagccatcattctatggctgggcaaaagattcaagggagaatgtctttcactggaagaaagtgggctagaatagagacgagggtggtcctcgtctaagagttgaagcaagtcctggtcgattcaatgttcgctctcccaaaactcacctgggttcatctacaannnnnnnnnnnnnagatgagtgtttggtcggaatatcaaacgttaaaactagcaaatataccgaccatgagtactcaacagattaaagaataagaatgttcaacgaaaagtcaaaactcaggaagtttgaaattcctcgagtta

SEQ ID NO: 149315 - DNA, 660 bp, Cannabis sativa
  modified_base (554)..(560): a, c, t, g, unknown or other
ttttttttttttttttactttaggtacttttaaatttttgggaacgtccaattacaggcgttatgctgccgaaatttcagtaaaattagaataaattttactaaaaaaacataaatattaaaggaaaagtacataacataaataactagttaattacttgctagttgtaagaaattaggtgacataacaaatttatataaactttttaattataaatgacaaaccaaacaaatgaatggattcacttaaggaaaagtcattccaattctaccaatattccaatcaactagcctagttagttaattacaacttttacaacttatacaacttaataacatgaatcaaactaaaataagaattttagtaatatataaattaatatgaattaattgtgagaaacttagttagttacattgtgtaagtagttactagttatacttagttaatgaatactgaatttttttagttaggatatttgttatggataaatcatgaatgcgtgaggagagagacacactacgatttcatgaagtagggttcgatgcatttttagnnnnnnncttaaagaattctaaaaatcctgaacgtatttattgtctgtgtgtagattgttgtaatggatgtaaaggaaatattacaatgattaaggaccatgtgtat

SEQ ID NO: 149316 - DNA, 531 bp, Cannabis sativa
  modified_base (150)..(164): a, c, t, g, unknown or other
aaacattaaaaatcagaatagtgtttctacatacgtaactctatctacatgtatctttatgatttatatgaacagattcaccattagaaatttagaaaacaacgaaaatacactaggaaaatatttaactatagtattgatgtaattttnnnnnnnnnnnnnnnagttggattgtttgggaactccagctcaattttttgagatatgcttttcatggatctgaaaattgaagtcaaaaaattagttttatccaaattaaacttgttttacagttgaattttagtttcgtagtagtttttctacacttttttttttcatgaattcgaaacagcccctgttttaattgattctagtcatcttctcaggtgaagtcgtcagaataaatggtggttctctttctggttgaatttttatttttgttgcgttgggttcctgcgtggttgcgcgatggttgcccaggaagcatgtatcctgggttgaaggtgtgtgtaagtggtatttgtgtaatttttttatgtgggatgtatattt

SEQ ID NO: 149317 - DNA, 616 bp, Cannabis sativa
tgattatggtctctccgtttggtaattacattgaggagtgcaaaggtcctctttctagtttgaacaatgttaattttcgttttgttaaacgatctgccaaccgtgttgctcatgctcttgctcgagaatcatagttatatgctgatcgtagttatttgagtagttctatcccgagtaacatttttgatgtaatcgtgcaggaaatggtttaataaaattcatcttttattcaaaaaaaaaaaatattgtaatcaataacaagccgcctaattttcaaattgtttgataaaaaaactaattagataaaaaaaagagtgctaattataatcaactattataaaaacttagtcaacttctacgctcaaaattacataggatagaatatctttttaattttttatctattcgtttagtattcgttatagttgtaataccatctttctaaattttttaaaattttcgaagaaattataatagggttatttttataaatatggcttttttgtaagtggtttagaaatatatggagaaataaagaaattttataaaacctggaaaaatgaataaaaaattttaaatatggaaataactaattgttgctcctaaaatcgcccaa

SEQ ID NO: 149318 - DNA, 1017 bp, Cannabis sativa
tctcgcaatcaacagagggatcctacatgggttcctcttcttcagaacttgaagaaatcgaggggggattcaatttcagcttcttggctagaggagctagtttgtcatggcttcgtttcatgaaaatttccttctcgatagatgctttctgggcacgactgtgagtggaaggaccagttggagttgatgtagcaactcccttcactattgcaggaagaagcgatatcgtagcaggtggaggagatcccttcaaatatgaagacaatgaagtccaacatttgtagggtcgcacagattttctaaccacttgtttagggattcttttcggcttgggcttcacgggctgagattcacgctgaggaagcaatgaatctcctgggttcgaagcagttgcagcagcaggcagcaaaatcggagcagcaggaggagcattcgagggggtagcatcggattcttccacccatttttgttgccctaaattttttgttttagccatggtaatctgaaagagagaatgaacaacatggaagcaagaaaacaaagaaagagaatcatgtacgtggtgagaataaatgacaagtagttggtttaaataatcatgtgagagagaaacacaaaaggaaaccaatttcaaaaattgagtaaccacctccccacgaacaccaaagggaaaccgccccactctttttccaaaattattttttaacaaaaaaaataaaaggaaactagaattaccaagatattttccaaagatagccaatataagaaaatccttcaagacaacatacaatggatatgatatcaaactttaaaaggaaacatatcaaaataaaccaatttcgaataaatgttgaaactttccaaacaaagcacaaaattttcttagcccatgattcaagtcaccaacgcctccctttttttatttttattatttttttttaatttttctaaaactgaaaataatacaaaacaatatgtacaatagatataagatattctaaagcaagcaatttaatc

SEQ ID NO: 149319 - DNA, 783 bp, Cannabis sativa
aagggaaactcgaagaacgtaaggggacctggccagatgagctctcgcaagttctttggtcttacaatacaactcctcgctccacgactggtgaaacaactttctcgctttcctatgggtgcaaggccatgataccagtcgagattggggcaggctccctacgaagagatgttttcaacatcttgcaaaataaaaaaaaacagtcactctacctcgatcttctggaagaaaaacgcgaacaggcgtacttaaaaaatgcggcttaccagcggcgaaccacaagatacttcaattccaaggtcaaggcaaaagtcctacgaacaggagacttggtccttcgaagaataatgccaaataccaagaacccagcgcatggggtcttcggggataattgggaaggaccatatctcatcgtggaaaagattggtgatgcaacataccggctcgcagcactcgatggtactgcgattccacgagcttagaatggcgaaagcctaaaattctattatcaatagtgctcgcattatctaatctgtattcgacttgtacttatacttagtcattttttttttaaaaaaaaaatcctgagtatagggggtatatataccataatgtacaattgattatataaaggaaattcttcgaaattcttcaagtaattcttcaagtttaaatttcaagtttaaaaattttctaagtcttatgagattttctacttattacacaaggctgtaattaaagtcgaagtattatagatattaaagcgcgagtacccgtgtactg

SEQ ID NO: 149320 - DNA, 646 bp, Cannabis sativa
atttttacaaaggctttgaaggggtgcaggttgattatctgtttaacaagctggacatgattaacatttatcctctcgcttgagggagagtgttagaatattatagttgtaaaaatttgggggtaacttgtatttagtagttttctattttgtagttagtagttttacatttagtctcctagctttatatataaatatatactattttattgaatacaacatataattctattcaccattttcaatatatatatatatacatatatatatgtatatattgtagacaaaaattaattaaattttctttcggctttttatttatgcatgcatatgtttttatttaaaaaaaaaatattaaataaataaataaaacaatgtatgatatatgatgtgatggtgatagtgatcatgattatgatcatatatataaataaaagatactatatacattatatatatatatatatatataacataaaagagaaaaaatgattatcatgttaatggtgatgttacagagaaaaaatgagaaaatgagaaagataaaaaaaaactaacctggatggtgatcttgcagcagatatgaggccaacccaagcattttgggggccttgtgcgaaattttaaaattgggccctttagaaaa

SEQ ID NO: 149321 - DNA, 609 bp, Cannabis sativa
tgatacttacaaacccaaagaagctttactccaccttcattgttgaatgttcttgaaagcttgaggttgaagatgaagacaatggtaatttttggatttgcggtattatggatgatttttggtatggtttttgatggtatgtgtagattgatgagtgaaattgggtttttgaatggattgggtttaagaaattaaagaaaagatgaaaagattgaagattgatgatgaaaatttgaatttttgagagaaaaagggtgagggttcggctgagaagagtttgaaaagatttgaattgggtttagggttgaatgatggggaaaataggatatttacgattgaatttttggcttctctggaaaatagggaagttgtgactggggttgcgacttaggttggccctagtcgcgacttctggaaccaaaaaatttcacgaggttctgttaaaacccaggtcgcgacccaggaacctggtggtcgcgaccactgggctccagtccgaaaactaaaacttttttttcacgtttttcacgattcaactgaaaaaaaaataatgtctggtactaagctaaaaattgaaaatactaaaaatactaaagcatagactaaaaa

SEQ ID NO: 149322 - DNA, 565 bp, Cannabis sativa
aagtttttcgaccctttgccaagtaagaatagatcactatttatagggctataagctttgagagaaaagtttcccttctgtttacaaaagatataattggcaagattacacattaaatatagactacactaatcaagagatttggacagcttgccatatctctgttatatgatcccgaaattgtacggattgtctctgtgattcacgatgcgagtgttgaaactgttaagtgttggcttgctgttcggactgtccactgcctggttaagaaggcttcgtccgtgcaaatatatgtggtgctctgttcggcatatccctcgcgaacaaatatgcgaagctgattccacgtgttaccattgtgcgattccacgtcagagtgcgaaaattgggataacaatatgacagtataatatttcaatatactacattaatagtgaggtaaattatttttatgtcaggtgatatatgaagaacgaaagacaacttatattttttttgatgaataagaaatttttttgctcaaaccaaactttacatcacagcaatttacatctcaacaagctat

SEQ ID NO: 149323 - DNA, 507 bp, Cannabis sativa
  modified_base (438)..(461): a, c, t, g, unknown or other
aaaaaaaacatgtttaaagtgataacaaataactctttactcaagagttatcaatgctctaggtctaaccgtcttgatatgtacaatcttcaccattaactttagactcattccggttcggttctagctcttatctacacatacccgtaataactgtgagtcgtcagactcagtaagaaaagtataatcataaaataaacttaaactggattataactaggcgcccatacacccaattataaccttattctgcgtcccacgcttactgagtctagatcgttcgtacgacagtactattgaccataatatcaacctatactcggtactctagttgtaccgatgtaataacatcaatcaatacttatgccaaatatatatccatcggtgttcagtataactctatgtacactatattagattttgtgccctaaataaaannnnnnnnnnnnnnnnnnnnnnnnctaattaataaaagatcagaattcattctatgttgcatggttcaca

SEQ ID NO: 149324 - DNA, 502 bp, Cannabis sativa
  modified_base (35)..(71): a, c, t, g, unknown or other
aaattgtaccaaaataattatttaaataattaatnnnnnnnnnnnnnnnnnnnnnnnnnnnnnnnnnnnnnataataagtagtctagaaataaatttggtatacgtagaatttaggtctcctgcgatttttgctcttgcagctgatgcagctggcgccatggcaaaaacaagatcaagaactcaaaggaaacctaattcgactgctaagatttctaagaagaaggaagtgaaattcggtactgatgcaattcgtgaatcgatggaggatggtttttctgcaattcaacctttggagatgttggatgaggagtttttggtggaagatgatccagcactcaaggatatcttgcaaactttattatctcccaaatcttcattggaagcaattcggaagcaggaggaggtgcaacatgactttatcaattttttgagggcaaatgatcaatgtaacagtgcgattttgcaaggtaaggctccgactccccctattttacgatctgg

SEQ ID NO: 149325 - DNA, 788 bp, Cannabis sativa
  modified_base (27)..(29): a, c, t, g, unknown or other
actaatcagattgtaaagagttttatnnngggcataaaacccaacaggatgatgacctcgccttacccatttgctacatgggggattaatctaattgggacattacccactgggtgaggaggagctaagtacgcggtagtagcagttgacttcttcactaaatggactgaggctgagtctcttgtttccataacctgcaagacagtcctcgactttgtcgtcaagaaaattttaagtaggtttggaattcccatgaagatagtatccgataatggaacccagttccatggcgacttcttcactgagttctgcgagaggaacaaaataattaagagcttctcgtcagtatccaggccttaggcgaatggacaagtggaagctgttaataaaaccttgaagggtactatcaagaataagttagacgttgccaaaggcaggtgggtcgacgagctaccacaaatactttgggctcactgaactaccgagaagacgacaacaagacacactcccttcttgctagcattcagctcagaagcaatgctacctgttgaagtgaacatatcgactcacagacaagagttttatagttaagaagaaaaccaagaacttccaaaattttccttggatctgcttgatgaaaaacgaactaagtcgcaaatcactaatgcaacgtatcaacacgaagttacaagatacttcaacaaaagagtcaagaaaagactattcaatgttggagacttggtgctaaggcgagtatttacaaacacgagagatgcatctacaggagt

SEQ ID NO: 149326 - DNA, 765 bp, Cannabis sativa
  modified_base (65)..(67): a, c, t, g, unknown or other
gtccaagtccgtgtctcagttccggtctgggtacacgactgtgtccgggcccgagttctagtctnnntttgggtctgaggctaggtctatgtttggttctacgtctcgatcagggtcctggtcgcggtcctagttttgttctagggtcgttgttcagcgattcttgttcaggttctaaatttgggtccctggtctaggtctgggttcgggttttgttcttcatctgggttatggtcctagtttgagtcccagatctagacaccgactccttgtctgttccaggccctgttgcccgaatcccgagtcaagagctagatcactgtcacgggtctcggttttgttctggttcaggtcccaagtcccatttctgagtttgggttcgtgatcgagactggggtgcagttctaggtctcgtccctggttctgtgtccctagtgtggttccatgtttgggtctgagttcaggttcgggtttgggtcccgagtacaggtttgggtggggatctgggtccggctcccaattcgggtctaggtctgattttgagtccgattcctcgtccggttattattctggatctaggtccaatttcagttataattccaagtcaaagtcctagttcaagtcctggtcaacttctacttttggttccaatttcgggtcagagggtgcgggtttgggtccacttttgggtttgggactgtgttgaggtgcgggtgtgggttcgggtccttgtcagggttagggtccagaggtgggtcaaaaatc

SEQ ID NO: 149327 - DNA, 569 bp, Cannabis sativa
  modified_base (168)..(168): a, c, t, g, unknown or other
  modified_base (354)..(357): a, c, t, g, unknown or other
ccttatgcgaattgcatgttcaataggcctgggcgaagccaggagtttcttcttcctcttcagtggagtcacctgctcttcctcagcttcatccttgagattcaagggctcctgagcatactgctcagcccttgaacctcccttcaacttagcttcgcgcttaagttnatgagttcattctcctgatgagcttgttcggttcagcccgcaccagatttcctcttcttccctgtcatggacttagaagtaaagtccttgggatagagcccgtaccttagaaagttatctttggaggtcaactggataatattccggtcttcccctggaagccgggcaagtttttgagctctatcnnnnagagcaagagtgaggggagggcggtgataggtcggaatctgttggaaccgagtgcgagtgatgctcctgccatccaccatgaagtacttatcagcaaagcacccaatcttattgatggtcttatcgttcgtgcccgtcaaccacttgaagcctggttgagagaagtagaagtaccccgacctgccttgcttaggggtggacttcaaatcgaa

SEQ ID NO: 149328 - DNA, 1059 bp, Cannabis sativa
aacagaactagggtttaggtagttgtgctgccaaaattttggtttttgtggttaagtgttacaaaacgtaaagttcaggtagtttagtcgccaatatccctatgtcaaatatgagtccaggtcctcactgggttgttttcaatggcccgaacgaaggtatttatagtagttacgaagatgctatgaagaaaaaccgtaattcacattcctcaatcaaaatatgtcgatatgattctttcatagaagccttttctactgcgtgtctacatggagagacgggacaatgcttcacagggcaacaagttaatgaactttgttgtgttaatgatttcccatgcatgtgggagtcagatgatgataaggatgacgaagcaatccttaattgtatttggtcattatttgatgagggtgagagctctggtgttaaaaaatcacccgaaggagacaatgtaaaagatttgagtgagaaaggcaaggagccaaatggagatgatatacaagggggagacaaaggaggaatggatccttctccccaaaacagcaactgatgtactctgttggtttccagtttctgtaattgtttaagcttttatgtattgtacgtgtttgtagtaaaattttgaatttggtttactttgaagtactaatgtgactttcctctttaattaattttggaattaaaacttaagtaaataatttagacatgactaataagttcaaaatgaaaatagacttcttatattataatactaacatttacattaacgtaatagtaaaacgatagagcaaagttcttgaatctcattaaatgacataacagaaagttgtccaacaaccatatgagatgagttttaaaataataacaatatatatatatatataaaatacaactaaatgaaactcaacggatgttcaatcaagttgtataacttgagggaacttccgttgagttgcaaggctaatatctcggtacggggacttgggtcgcgaaggacttccccttagagtattgtttgatggttcttcttttggattgattgggtaatggggtatggagac

SEQ ID NO: 149329 - DNA, 660 bp, Cannabis sativa
actttcacattttttataacaaaattgggcctctttggcctgggggcctagggcagtggcccttgctgtcccacccttcagctggtattggattgtcactgtgtacacttttctatatgtgagttattttttttgactttaaagttttactgtcacatatatacatgtatatagaatgacaatcacagttaatatttgacagtaaaattgtattggtaactcaaatatgcaaagaaaactgaagttagggggtattactaccaaaaaaaaaaataattaagtgtataaaaataacataaaaaaatttcgccactaattaccatttttattttagtaaacaatagagtatgaattattatcataatatgatttccattctaagtaaatattactaatcctaatactttttggtctattctcataaatatatatatggaagagattttaatggttacatttttattgcaaccatcatggttacatttttttaagtcattggataattacaattaaattgttgtgattaatttggaaaataaataaaaaaataacttgtaacctgaaagtaacctaataatttatatccttataaaactttaataattttaaaattaaattaattataattatttattaattttttgcaatttattactatat

SEQ ID NO: 149330 - DNA, 502 bp, Cannabis sativa
cataataaacaaaaataaaaaagagcatatcacaaaagtcaaaattatctctcttaattcattaaggtaatataaaactaatagtaattaaatctataaataaaaaattatttactaataaagccttacagatgtgtatctaagtcaatataaaatcaaactaacataggtatatgtatggttcaaagaataaagaaatactaaaaagaacaatacaataataaaattaccatcttatatgaattatattgtatattgtaatccaatgagagaataaaaatgagagagataaatatatacatatatagattaggaaaagtgatgccaattatgcatcatttagaattaatgtatatatatatatatagataattattaatattattttagagtttggtaggtgattttttaaaaaaaaacaataaaataatttaaaaaataaaatggtaggatatagattttttaatatattaaatgtatattatttttaaaattttaattt

SEQ ID NO: 149331 - DNA, 504 bp, Cannabis sativa
gtcccaggtctaggtttcggttcgtgtttagttcttcgtctgggttctggtgctagactgagtcccacatctagacaccgactactgttctgttccaggtctcattacacaaatctcgagtcaagatctggatcactttcacgggtctcggtctggttctggttcaggtctcattacccaaatcccgagtttggcttcgagatcgagacaggggtgcggttctaggtccccaccctggttctgtgtccctagactggttccatgtttgggtctgagttcaggtcttggttcgggtcccgagtcaaggtttgggttgggttctgggttcggctcccaattcgggtctaggtgtgatttgtagtccgggacctgctccggttacggtttctgatctaggtccaatttcagttacgattacaagtccaagtcctagttccagtcacggtcaacttcatgttttgattccaatttagggtcacagggtacggcttcgagtccactttt

SEQ ID NO: 149332 - DNA, 889 bp, Cannabis sativa
cacggaatacattccgtgaaagtaaacaaaatcatatccctatattattaatattattattagaacattttattaaaccaaaataaagaaaaataaaaaaactacactgcctagttcaaaaaagcaacaaagagtctgacctccctaaaagaaagacatattacttattataaaaaccaaaaaaatattagaaaaaattaacttgacatatttttacatttagttacatacacattcaataattaagactttctagtctctatattgtctttatatatgtgtaattatattttttgctaaaggtatataattgttgagttaaagaattattaaggtaatcctgttacaaaaaaaatacaagattaaatatttaatgatacaaaatttaattaagtgttgtatgttattttatatttttttatattttatattatatatagaaggaaaaaacagttatctcttaaaatagaaatacttgctcataaaataatatattttattttcttatatatagtctaggaaaaaaaataaaaaaaaaagtatattcaacattgttaaatagtagaattaaatgaataaactttaatataaaaataccaaattaagcaaagtattctaaattgtatataaaatttaaaataaatcttcataaaaaagttattattaaaataaaatttaggataatttaatttaatttttagatattaaagtttaaactatatatatgtacaaattatgaaagaaaaatgcataaattagttcatttaatcattagtttttacaaaataaaaaaaaaatcaacacttcaaaataataattttaaaatatcactacactcatcactaatttttagatattgaagtttaaactatatgtacaaattatacaa

SEQ ID NO: 149333 - DNA, 734 bp, Cannabis sativa
tttggaaagagtggtataaatatagtcagagaccgcctggtcatactgcttcttcccgttctccttctcgacctctaagtcacgagacatctccttgaccttcatttgagcgctcttggcttcaagctcgacttgctccttggccttgcgaagttcctcgacctctttgtccttggaagtcgcatcttgtttcagcttcttgatgtcctcctgaagctgaacattctcacaagtttgacttccttagatccagtgacaaaggccctcgaaaacatggcaataaattgtgaagccaactccgcagaacgaggcagcagttcttccgcaggggtcttgtcgacctttcatataaattcatcacccacgaacttctcttggagagtcaagatgttgcgagctcggatagtcggatcgatcacgactttcttccccttttcttacgtgcccttagttggcctcttggaggaatccgcgacaagggtgaccaccacgtcgctcttcatcttttgaggaacgataggagaagtcgtcgctgttccagattttggcttgcggttgaggaccggtgcggacttaaaaaaagtcatctctgcgaggacaaataaagataagtataaataaatttcaaggaagcagtttgtaacatgcgatatgttacctgacgttggccgagaagtttgcttggaaaggcgtttgtctattcgctcttgttgcttctcagatggctccttgta

SEQ ID NO: 149334 - DNA, 956 bp, Cannabis sativa
tttttttgaaacaacaagaggctgacaacaacgaaacaagaaaagcgcaaacagcctaaaggggttaagaaaaccgcctagtcttcatctctcggcctgagggctaactttgcaagggagtgagctttatcattgtgctgacgaggaacatgcagcaaagtagcttcagggaatctggagaggaaggttctaatctgatgaacaagagaagatagtggggaatactcatgccaattaccattcaccttagagatgaggttaatgcaatctgaaaagacaaaccgaggttgtaaattggaagaaacacaccaattcagtccttcataaagggcttgagcttcagcaaaaaggggagatgatgcccctggcttgaaaatccttgcagaatgctgaatatgagatagaccctgcataaaaaccattccaatgcctgtggcaggggtattagtgttaagagcagcatcaacaaaaagagccgtagttaagggggtcaaaatatgatccaaaacaacagggcaatgattagtagtcggtgttgagcctgaagaatgggcttgagcatcctggtagtcctgcaaataacttgcaacagtatcttgaacattagtcattggggtaggtttttgaaagaggtgggcatttctaatgttccaaatttgccaaatgataccaagaaataagggaagatgatttctgggaattaaggaaaggctaagtagatagaaatctttaatgtccagcctatgatggtcaacaaaaaactgcttaaagttggaatgatgccaaattgatttaactctggtacagtgaaggagagcatgagaaaccgactctgcatttcccccacaaatgtagtagtagttgattgttaaagtacatgaacaaaagatgaggtggctcttcattaaatgaggtggcaattttggggatgacatggcgttctaggagtggtggct

SEQ ID NO: 149335 - DNA, 644 bp, Cannabis sativa
  modified_base (385)..(386): a, c, t, g, unknown or other
agttatgaattttggaaatttcggatgccatgggtgtcgagatggtgctcaatcgcaccaggcacttggacaacaccccttgtgcgcgcgcgtgccttggacacatccagtctgaagcacacgccttaggacacgatcccgcccatgtgcctcacccagatgctgcaaatcctgctccaggaggctgcaagcgccgagaaacctcgatagaacaccctgcaactctccttcttgtgcgcgcatgagggctgctggcagtctctcgagggttgcacgtgcagcctgggcagccaacacccaaaaatccaaattttgtgggatttttccattttttttcgatttattccaattttcaaacctaaaaaatcaaaataaaatattattnntaatatatttaaacttaaatattaattttgaattaataatatttaatttttaatagattattatctattctttgatattttgagattcaaatttaaaaattaaatattttatttttttaattatggtcagatttcaaaaaagatttgttaatatgttaatatttatatattatttaattataagatccgatattttaatatcagctatattttaaattaaaagataactttatccttttaatttaaaatattatatta

SEQ ID NO: 149336 - DNA, 631 bp, Cannabis sativa
tattcgctatcggactaaaatttattggtttaacatttttaaaattaatatttatagttaaatttgtttagtacccatcaatgagtaatacccattaatatagcatattaaatttttaattttcaaaaagaaaaaaatatgacaccaaataaaaaaaaaaagaaaaaaaaaaaaaaacttgtattggttattaaataaattaaaactaaaattatccttatattttgaaaaaaaaaataatttaatttttcatcatcatcgcaaatctccatttctcacatttttcctcacaccaaatacaaatataagcaatctcttccctctcatttctatccgatctagttgtgggaaaaagcttgtatagggacaaaaaaatttcttcttcaatctcaaaagtcccctttcctttctacaaaaaaaaaaaaaaaaacaaagaaagaaagcttattgaggtcgaggatggtgtagcggctgacaatggaggaattggtagtgtggtaaatgagttctttcacaatcactttctctgtgcctaatcctcatttatagtatttggtacatattctcatgtttatcaaaattgtagataaaaaagagaagaattttcttaagagtaatttgcggtaaaaat

SEQ ID NO: 149337 - DNA, 616 bp, Cannabis sativa
gagttgcaccaggcggacttgcagtccaaggccaacttggccgtggagttgaaggagctgaaggacttcagataccaggtcttaagaagactaaaaaagatgagctcctatcccccgtctcctgcaagcgctgcgtcaagcgcttcgacgacggcgtctacatggcctagcagacaaatggacaaagcatcaagctcgacttctatcctaagcctgaggaggttattgccaaattttgggagaagaagaagaagcttgatgccatgcttgaggcgcgtctcggtcctcgccttcctcctcgtattgactaggcttcggagtccagcccatttcaccaagattatctctttttctcttcttttttttgttttttatttacagctatttttcttttctttgagacaatcgtaattagatagctgctttatttactaaggggagacaattattaaggcctgtccccgggccctttgtatatatatattttttttgacctgcccttagggccaggatattttagatatatgatccttttaatgcatattctttttgactttgtttttacttttggcttgttttacatctgtccgtatggtatgccttagtacccccctga

SEQ ID NO: 149338 - DNA, 557 bp, Cannabis sativa
gtagtttactttatcttactgctactcgacatgttattatagtgttggtgtttgtgcccgttatcagggaaatcccatggaatctcatatttctacggtgaaaagaatcattcgatatgtaaatagtactgttgattttgggatttagttttctaaagacactaatctaatctggtttattttaatgatgctgattgggcaggtaatgcatatgatagaaaaagcactagtgggggatgtatctatcttggaaacaatctcgtttcatggaacagtaagaagcaaaactcaatctctctgtctactacaaaggctaagtacattacaatgggtaattattgtacccaactattatgggtaaaataaatgatggaagattatgggttatttgaaaactttaaccattttctgtgataattagtgctataaatatttcaaaaaatcttggtcaacattcttgcactaagcacattgacatacaacatcactttattagagagcttctagaaataaaattcttgtcttagaatatattgaaactagcaaacaaattgcag

SEQ ID NO: 149339 - DNA, 587 bp, Cannabis sativa
tctctctttatttgtttatatcaaaaaaaaaaaaaaaaaaacttttagttaaaatagtataatttagtttttctttcaaataaaaaagtatcactatatattattattttttttctcttctttactcttttagtaaaaacaaaaataagtagtttaattattttttgtttagtttatttgttagttgtatttattattttgctaatatattagggtgttagtttttttttacattcttttattttgtacactcttttttttttcttttaagattaaacacttatcttttttttaggttagttgtagactttatcctttaggctattttttttttcttttttgcataaaattttagttcataagatattttccaaaaaataaaaaaaaaaatatttagtgtcaagaataattatgtaataataaaagtggtaaaaattgagaatattctgtctaaaaaagattggctttaaaggtttgtggtagagtaccctctacaatttctagtaacctcggggagttctagtaaagtgtgggacgaagcggtaccttggcaacctttccaatcggcctgggaatatctcatgtat

SEQ ID NO: 149340 - DNA, 790 bp, Cannabis sativa
cgaagaggaagaagagaaggagaatctttttggtgccttagcttataagttatcccatatataggtttttcttttcttttcttttcttttttttttcttttaaaataagggtcagcccacaaaattcaaaagggatataaaaaaaaaactaacctacttctctaaaacttagactcttaaaaaaaaaataacctaggggcattatggtaatttaataatccattaaaccgacgttctaaaattctaaactagtccagaatatcctcaaaataattcatccattaatgtcatgatatttctaaccacatcgtcaaattccacagtcgccaggcccaaaaaatatttttatttcaaaaatggtatcgtcgatacccacataacccaatataacctccgtaattaataaattacgctttatataatcatttaataaaacctcactaattatcccaagtaagatcataatcttacttcattaccaaaataattacataattaataaaatatgtctatttaaatatcattttattttcaaggatattacagtttttattttttctgtgttgaattatcattgtgaggctcaaatttggttaacaaaaatctgcgataacagtttggtgctttcattgagagcctctgtgaaaaagcttagaaaaagccttcccttctttttaaagaaaaaccttctcctttatggctaaaaatctagagaatattaccatcctacatgaggaaactaaccatcgttctggaaaagagcccatgggctctagaagatctaccaatc

SEQ ID NO: 149341 - DNA, 517 bp, Cannabis sativa
  modified_base (442)..(449): a, c, t, g, unknown or other
atccatgacttatccattttaaaaataaaaataaaattcctaacaaacaagaatgaaaaagaaaacttaaaagttgctaaaaaaaaattctaagcacgcttagtaattaaatattaaaaaacatgttcatttaagaatcctaaaaaaaattgcccagagtttctcctatttttacaacattttccaagttaataactatctaacaatgcactcaagtaaatcagataataagaaaaaaataatcagaataacatttaacaatataataattgtcacccatccgaccacagtacatttatgtcacagaacctacttcactacggaaaaatatctaacatattcaaactcctctaatagctttataattagtaaaaatttgttggtcaataatgtatctatagctagcaatcaagaatcaccgatattttgattcattttctannnnnnnnccacaacctacaatattaaatgcaattcaaaaaaagttcaaatataaaattaagtgagaatagtaaca

SEQ ID NO: 149342 - DNA, 563 bp, Cannabis sativa
aatttttaatttctttgtaataatacttagatattaaattttttaaaaaaaaaattaattttttcaaaaaaatattaaattaaaaatctaattatttaacatattttttcaaaatataaaattactcttttttaattaaattacttagttttaaattatttaataatcaaattgtttaaatttaaaataatttcatgcaattttcaaaaaataaattatctaaataataatccattttaaaattttatttttcaataatttcttataaatttactaatttaatttttaaattataaattaacatatattttataattatctcaaaattctactaatatttcggtagcataacaattacattttaacctatctaaaaacttttaaatttgtcctagacactccaacaatattctttttttttttttgagataaactccaataatataaatacattataaattcacactatttctacatacacaaaacttacatataactaaaaaaaattaaacaattagtaacacttaaaaaaactacataaaatttatttattttaaactata

SEQ ID NO: 149343 - DNA, 659 bp, Cannabis sativa
ttttactcatggctatgaggtgcctagtattggtttaagtggaggcctttatgttgctttgggattcttcagtgaaagtttctataattgatgctaaacagaattatattagttgtcggctaaccttgtctgatggatcttcttcatttcaattttgtgggttttacggcgaaccagccccttcaaatagacattttacgtggatattacttagacaattgagtgattctatatctggatcttggctttgtatgggagattttaatgaaattttaggattaagtgacaaagtgggtggagtcactcgttgagaatctcagatgaaccaatttcgtcaagccatagaagagagctctttgaaccctttagactatgcagggcctcgatttacttggaagtatagcaatcaatcgaatactattgaggaacgattggattgggctttagttaatgaagattggagtgctaattttcctgaggcaaggttaactcacctagacttctttggttcggatcatagagtgcttagtcttgagtttggataatcctcggtttcttcttcaaattcatataaaaaacgtaaaaggtttcactatgaagctctatggaaagatgattcggaatgtcaacatataatagctaactcatggttacctaca

SEQ ID NO: 149344 - DNA, 553 bp, Cannabis sativa
caggttggccttagactgcaagtctgcctggtgcaactcctctagggacttcaccttggcagccatttcttccatggcctccttagcctcccgaagctcacgtctatcccgggcagcggcctcaccctccaccttcagcgcctcctggtgcctcacttccacctcggcctccttctgcctagcctcctctcagagctgcgcctccacttgggcttccctctgtttagcctcctccttgagcttcgcctccgagggcctcccttcgatcagcctcctcttggatcgcccgcctttcgacagacaagtcccgcaggatcctcacggcctcgtctatgcccccaaattctgacatgacgaagccatggttaattaaggtcttggaaaggcggttgtctccgcagtaatctgaaaaaggagacaagagtaagatcgaatgccttagacaaagtatcaggggaagaaataaaccacaagtacctaccacaaccatggcagagctgatgtcttgaacctggtagatggagttcagggaggcacaagcggcatatctttt

SEQ ID NO: 149345 - DNA, 849 bp, Cannabis sativa
  modified_base (60)..(62): a, c, t, g, unknown or other
ggacaatttctcttcatatgaccaaccaccccacagtggaaacaggccctggcctgacannngccctggtggcgccttttacatctcggacattcaggaaaagtccaccaattttcgttcacaccagaacagaaaccttgattaccctggaaccttttatttgggtctgtagctaataattcactaggtcttttcttgcggtcaccgggatcagtacccctaccagaaccagcacctaatgtttgcttccatgaatctcttcttgcaatatttttctttcgtatctgagcttctgcaccctcagaaactagggtcagttcaactatctgagcataatttcgagcaacccccagttgtttagaagcaacaatcacatctcgtgcgatatgctcatccaacccttgaatgaacttttctttcctagcagcttcagtagccacctcatctgaagcaaactttgccagtcaatcaaacttagtggcatactctgtcacagtcatgctgccctgagtcaaacgtataaactcttctgccttttccgcctaaatagactcattataatacttctcataaaataaggcccgaaaggcttcccaggtcatgttatttaggtcatgaccctgagacacaatctcccacaaaatatgggcatcatgtcgcaacatataagtagcacacctgacccggtcattatcttcaacccgcataaaataaaaaatggatgttatcacaatcatccattgctccgccttgagtggatcagcaccaccctcaaaaactggcagaatctgcttctggaaccactcatacaatagttctaaacggttccctgcatccagtggcactacc

SEQ ID NO: 149346 - DNA, 1009 bp, Cannabis sativa
tttagaactagttttgtaataaattatttattcgactatgcaatatatatatatttttagaagtatatttttaaaaatatgttatttataaatagttttaataattttttttgtatttagtttcaatatgtcagcagatgtaggttcttaccatggtggagatggtggcagagaagatccccccgatccttctaggaatcctactgcgtacaaggatgactctggtaatttatattgatattaatatttttgaaaataaaaaatattatatgttgattatagttttcttcttcttattcaaaacataagatacttgaacaaagggttgtggtccatctattcgtgaagacttggagaaaagaaggaaggaagcaaaagagccattgccattagtgtactgtccaatttcaaagaagatagtgggagtagagcatgcaaccttcccacgcgttttgagcgattacattgctgccttttgtcctacacattacaaaaattgtaaggcagtgccccaacaataccaggatcaagtgctgcaagagctcgggtaaataactttagacaatttattcttgctataattaaatttgttaatatacttaaatatttttttttttgtagttttactatcaaattgacgagaatcctaatgctgaacaaattcggagctgtttcgacatcgagtgccctaatagatacagaacaaagaaaactagtcgacacgtgcatttcaaacgtttttattcaaaacctgaggattacgaggaagcgctaaaacatcatccaattgatatgactccggaacaatggcaaaaacagtgtgaattttttattagcccagcttttcttgtccgatcagagcaaaacaagataaattgaggaaatatgaaatatgttacaacacaaggaacaaaatccttcgctcagaggtgccatgaattagtaagtttaaatataattgtagttaagttatattaaattgtataatctctaatgtttacttcataaa

SEQ ID NO: 149347 - DNA, 817 bp, Cannabis sativa
gtgtctcatttctgggacacatagtggataaagatgggatcatggtggatccggctaaaattgaagctgttcgggattggccaacaccaaagtcagctactaaggttagaagctttctggcattagctggctatcatcgtcggtttgttgagggtttttcgaagattgctgtacccttaacagagctgacccgaaagaacttgaagtttctttggactgaccggtgtaagaaaagtttcctggagtcaaagcagcgcttgattaccgctccagtactaactattccttcagataaggaaaagtatgtggttaattgtgatggctcgagacagggtcttggctctgtgcttatgaaagctggaaaggtaataacctatgcttctcggcagttaaaagagtacgaacagaggtacccaactcacgatttagaactcgcagcagtggtatttgagctaaagatttggcggcattacctagatggcgagaaatgtgagatatacactgatcacaagagtctgaaatacttctttagtgttgtgataaatccaacacacaagtatacgtatcgttttaacaagtaatactcaggtaagtgagatcggtcccacgaggattgtagctaagtaccaatcaattgaattcttgtttctatttggtagaatcaataataaggttgaataattaaataactaaaaattaaaaagcacaataataataataaaaagtttaattaattatggatgaatatttaggaaaaagagtcatgttgatttaattacccaattgttaatgctaagtactattctctttctcaatg

SEQ ID NO: 149348 - DNA, 521 bp, Cannabis sativa
agataatgcatttgaagaaggcattttatgtgtatgatgcaaataatacaaccataacacctttatatagctcttgaccgcctctgctttgaaaaatattgataggaaaagtttattatttagtttttttaatttattatataaaaagaaaacatcaatttgatacacatgtccattaattatgactcaacatataattattttgattaaaaacaatatattctttattaaaaagtaatacatcaataagtggggctttagattgtaatcattattctgagttctagtaatatttgttatatgtatttgttaaatctagattgtaatcattattctgagttctagtaatatttgttatatatttgctatttaacaagatcaaaatgtggcatattatatattaatatgagattattatatattatgtgttggaggctatattatatcattatagtataataatacacataaattgtaacaaatgaggagttacaaatctgaaatagattgtaacctaagga

SEQ ID NO: 149349 - DNA, 708 bp, Cannabis sativa
tatttaaaatcatacatatttagtatcctaaattcattttttttaatgaaattttatcaatacaatcaaacagtataaaaatttatgaattttgaattcaaaattaattatatgattacatataatttagaactatttcgttaaattgataaaattatattgattaagttttttttagtgtaccaaatatgtataatttaaaaatatgagataccaattaagtattattaaaaacacagggtaccaaacatgtttttcataaaaacacaaggtactaaccaaatgagtatattgccttttaaaatggtacaaagaggatcctgaattgattttttttttttttgtttaaataaaacttaataataatccgatctagaggtgatgacaaaatgatctacattttctatttctgtttgtattaagaattattttcaagttgattatattaaaaaaaaattatcgaaaattaagttcaaggtcttttattttttactattttggaaaatacaaggttcattttatcatttaacaaaataaagggtccaatcagtaacttttacaatccaaaataatatttacccaataattccccctcacattaataaaagcaaatttttattttatatgcttaaataattaaaaaattttattattataccaaaaacttaaaccataaaaaaactatactttttttttcaaaaccccaaa

SEQ ID NO: 149350 - DNA, 799 bp, Cannabis sativa
aacacataattgttttaagcctctacaagagagaaataaagatacataattacacaaaaacaataatttttttttacgaaattacataaaaataataaaagaattttaaaatacagttatacagaattttaaatatttttacgatttttataattttatttatagaaaatacgatctttttatgttgtattcttgttaatttattgttaattttttgttatttgtacgttattttttgttgttattttgtttcatgtaattttcttattgtttttatgttgtttttatagaaaaccgtaaaaatatcaaagaaaaaaaaattaaacataaaaatgtattttttttttacaataaaaatagtgtcttatgtaattatcttataaaattatttcccccccctttttttttttgttcttcctttccctgcatgcacaatttctatggaaaatttcctaatgataaaaagagaagggtaagttgttttgttttgattcgttttttagagagtgagaaaattatttgtgtcgattataattttcaaatgaaaaacaaattaatatattgcaaaaatatgctgctccgctcatttgataataaatattttggacattaattcttataatcttctgtatcaatggagacttttatttgcaccctactaaattataaatacaccctattattaaaaaaaatataaacttaaatagtttttaaaaattacgcttgatatgtttttttaattttttttctcacattattttatattaattttaatatttattttgattttattttcata

SEQ ID NO: 149351 - DNA, 570 bp, Cannabis sativa
cctaatatgagggaattacttgttattatgcgtattttttagatagtaataaaaaggcgtacctttccaatgagacctggcacatttgctgaagaaaatcagaaccctagctggttctaggaggattcgaaagaaagagagaaagcttgagagagaagatgtgtttttgtctaatttctatttttttgtaaaataaatgaaataaaattgattttaatcaattaatatcagcttaatacaacataaaattagattaataaatcaactcaaactccactaaaggacaaaataaatatagggcaaaaagatcattttgcccttgcccacactaaaagtcataaacatcacttaggggtgttttggtcacttctaaaatctcgactattcccaacattcccaatgtctaactatactgcctcgctatactaaaattactaagatgtgattctaatagtcaaacaccgcgttccaatgttgctagacacaaaacatgcaaaattataaaattctatatataacatataaaattcataactaatacccctgttattagcggcggaccccactctc

SEQ ID NO: 149352 - DNA, 573 bp, Cannabis sativa
tcaacatacatgttagtaaatcgagatcctggtaaaacaatatccaacattatttgaggtagggatctctttaaaaaaaaagtctagtttagaaggttggggatggtagctctatcaaaactttagatgatcattggatctcgggggctagattctccatgtataagaatgatattcagcctccctcttacagggtcaatttctttattaacaatgaatggttcctattggtagtgttggtaaggaagattttttaatttagaatcagcatccctcaggtttattctgggtaaaaattgctgatcatttagctaatactgtttttctccctctcacctcttcagatggtgctttcactatgaaatggcggaccaccctgtggaacttgtgtcaccctcctaaaatcaaagttttctcttgagaatttatcatcatattctcccaactgctcttaatctgttcttgagaaaagatcttcccaacccttgttgctcctcttgtaactgtcctaatgaaacagtcactaatgataattagaaaattcatgctttctctagttttattcatttacaa

SEQ ID NO: 149353 - DNA, 569 bp, Cannabis sativa
aagtaacaattttttgtagtgataatgaaattaatttggagatcaaattaatgttagggataattagtactattttttgtaaaacaaattacttttttacatttatatatttaataaatttgtttttacatttttacagttttttatagaaataatattaaaataataaaaaaattacataaaagtaataggaaaataatatcaaaataataacaaaaattaatatatgaataataaaaaattaacaacaaattaacaaaatacaacaaaaacaaatttatgtgatgggtttagttgaaagagaagaaaactatttatgtgataataggaactgtagggccattctcatgttgaagcatttctatgttatgatgttcatgtattcattgattcccttctctaacaataatacacacagagaaaaattagctccaaactaaataattttgcataaattaagtttttattttccatgtttatcttagaaataattttattttttatgtatgaaatgaagtataattttttttgctagtgattttgtgttatttttttaatatgttgcttaa

SEQ ID NO: 149354 - DNA, 581 bp, Cannabis sativa
cggatactaaaacagatagagatgtatcggtgtatctcttttaaggggtgcattatagaattttccaaagtttaatatgtatgaggtttatgattttcttagtattgaaagatactaatatgaatagctatatatagtactgctaaagcactaagacatacactattatttttctctgacatctatctatctaatattaattaaatttagattattaataaatgtatgattaagtggtacttatgaatgagtaatgttgaatgtggagattgtaatattttaaaggagataaacacaattttggtcaaatttaagttaaataaagattataggtactatgttttatgctataactaaaatagtatataatttgaattaattaagatttttgacatgtttttttgtctaaaaataagtaaaaggttttcaaagaaaaaaggaaataattagtatataatatgttgagtacttaaggaataatgggtattaaatataaattttacttatggttgttttaaaaagggtaatggtaatacaatttaattaaggaataattacataagacaccattttttgtaaaa

SEQ ID NO: 149355 - DNA, 636 bp, Cannabis sativa
tcaggagctgaaacaaagattgatcacgactccagtgttagctctgccttctgacacagaaaaggtcgtggtttattgtgatgcatccagacaggttctggaatgcgtgttgatgcaagtcgatcgggttatcacttatgcctcccatcaagtgaaagattatgaacagcaatatccaactcatgacctagaattggccgcggtggtgtttgctttaaaaatttagcggcattatctcaatggagaaagatgtgaaattataccgaccataaaagtctcaaatatttctttaaccagaaagatttgaatatgagacagagacgttggttggagttagttaaggattatgactgtgagattttttaccaccctgggaaggccaatgtataggtcaatgccctgagcaggaagggttctgggtaggtagctggtatgattcagatttcacctcagttagtacaagatatggtcagatctagcattgtgtttgtcgtaggcaagcttcacaatgtgacgctgcaatctaatctgctagaatgaattaaagtcgactgatctagtaaagatcagagaagaggtttcagctggtcaagccagagcatttacagtgtgagacagtggaatgttattgtttaa

SEQ ID NO: 149356 - DNA, 548 bp, Cannabis sativa
aataaaatatgtatatattaatttgcttctaacatatgtaaaatctatattctttgaaatagaatttcatgtatactcattctctttgatgaatgatattttaaatattttaaatgtacaataaatttgcgatacattaaaacatgtgtacaattcacattctattcaataatcaaatataattttaccttgattataagtgtatccattctacaggtacgtgaccactattattcaattccacatattatatatagatttcttgcactttgattgtgtgcggtatttcatcttctagttgtttttattttttttggaaatatttacattgattatttaaatttattgcattcactttgggaaatgacattgaacaagaagaatgttattataaatttcttaaatacttgttaatttatctataaaaatataaaaaattattcagtaatattttttataatatttcaaaaaatatgtgaatatagtttttgcataatcttcaagatgtatgcacaatctgatctttaatatatgtcacatgcaataat

SEQ ID NO: 149357 - DNA, 1149 bp, Cannabis sativa
aaaatatataggataaaccgtccaaaccgactgatgtacaaccctactaacaattcactgactactaaatcaatcgaaggaagcggagaacgatgtaatatagaattacgaagtccctcatcactatgaagagccattaaaaattgaaccaacctttgttcctctctacgagcaatatacagtggaaaagcacgtagctctgttgatttggtgagtgccaattgatcctaaagatctttcatgacaaaatagaactcttgaatgctcatatatttctgttcaatagctctaatattagtttccaactgaaattgctttacaaaattggattgtgtatatagtctcgcaagatggtcccaaatttcttttgctgtctcgtactttgctaactgggtattagtagattgttcgatagagttatttatccaggtgagaattttcgaattgtctacttcccaattttctaacacatatgcattaccatctgctagttttctctttgttccagaaatataaccccacattcttgttcctttcaatttttttttcataacataattccaatatgaataatttttcaatccaatctcacactgatcgcttgaagagagttatctttattggtagccattgcagaaaaaaaagaacaaattgtaaaaatttccaaatacaaaaatgaaaattcaaaattgtactgcgaaaatcaatacctaaaactattatgcaatttaagaaaaaattcgaagaaatcaataccaaaaactagaatgtcaaactatacggatgttgtacagataacaattgtacaaacacttgcgaaaacttttggggctctgcctcgaacctcgggcaggggacgcgctaccgcctgtgacctcccagccaactcaccgtggtgagttggatcttcgaaagctgtgattacgcttaagaaattttctctcataaaccttgctctgatattattataattatttgtgaagagaagaataacaaataaaaaataaaagagatgtagagaaattaaaatttcattcaattacaaagggcaaatttgataatccatgctaaaaaattagacatggtgattaattatacccaattataacacaaagaaaaaatatacctatctttcaattttcttccaaa

SEQ ID NO: 149358 - DNA, 901 bp, Cannabis sativa
aagtatatatatgaaaaatcccctttttaaaatgatatttagatgtaaaatatgggatttacttgattaagcaaataatatattagtcagcctatacaatggtcttgacaaataataaaattacttaattttcagaatcttatccacaaaataaagtcaaaaatctgagtttggtaaactaataatgaagtaaggaaataaaactttggcatgagtatcacgaaaccgtttacataattggacgtagtcactcattattggtattacattacattattactccatcgaatcctcacatagtcaatttaaacagctcaatgtcaaattacaaattatttatgcaatattctattgtacactatgtatcaaatgtcaaaagctttgattgtcgacttcagattttatttaatgtatgatggttgaattttattaggtgggttcagaatattgtttattattaataattcgatcgatcaatatcatttattaattaatgactatatataagaatatatataaatatatatatatatatcgtacaaaaatatataaaactaaattaacacataacacatgatagaatttgtttgaagaaaaaggagagctaattaaccaaatatatatattttatattaaatgtagttatttaataaaaattattaatttaatgatttttttttattaaaattaacagttaaaactaacattgtcaatctcttatattaaatgtagctattttacagaaactattaatttaacaagtttttttcgttaaagttaaagattgaaactaatgccgttaaatcaataaattaattattttttataaaaaaaattacttttaaatatttaaatttaatttaaaattattaacaatattaaataattattttttatataa

SEQ ID NO: 149359 - DNA, 596 bp, Cannabis sativa
  modified_base (61)..(71): a, c, t, g, unknown or other
attaataaactcttatgctataaatttggcataggtgaaattgtgtttagcatttattttnnnnnnnnnnnatgtgaaatttttgcttaacataattttttgcacgaggtgggacccattctccttttcatctctaattacgttgagaattaaaaaatcacacttttgtaattaggtgtgctattttacaggaaaagtcatggcaccgaaagtaacagtatttttccacaagcttgcacatgcacacaccaacttggggcaaaagaagaaagatgactttctcgtgacattttctattggaacccatactcaaactgatgttccaagggaaatagaggtcacaagagctcatcaaaccgcagatgctctaaaagaaaaattcgccaaagacctaaagaggagacatgcaaaatctattaagagatgagttgctcaagcatcgaaggctactgcaatgtcgaactcttccgaatccattcaaacaaattcaacaaaatctagtggcattcctattggaaccacaaaggttaagcaacaatgcctgactcaaataatgatcggttctgttctaatcaacttggttgatgtcaattttt

SEQ ID NO: 149360 - DNA, 905 bp, Cannabis sativa
tgacaaatagggatgaaacgtcttccattccctttggaattgtcaaacttaccgtgctgcttcttttctgtaacaacgaagtattttgttgtagagacagaatcctgcgaggtagaaacagttcttccagaaacaaaaatatcaaatttaacaaaagtggtattgaaatcagattgattagaaacataacccagaccagcatgattagtttggctagatttttgaattttttcaaaaatggtggaacctagatttagcattttaacattctttttaatgttttcaagttccttagttaatgaaataattttagactctttgaaagacagttcagtttcacaatatttaatttttttcttccaagccattaatgttgttacacaagtctttattgtctttaaccagggaacgatttttagcacgtatttccaaccacttaccaaacattaccttgtaagattcagccatagaattctcatcaatttctgactcatctaattcggatccagcttcttccttgttgtcatcgatcaagatattattaatacaaatggtttttcctttttccggcaaatttcttgacaaaacacttgttcgaccaaccttttctttttcatcttcactactttcagaatcatcactacaagtaacattcaatccttttttatttttcttttaggtattggcacattctgattgtatatgaccaaatccttcacactctctgcattgaataccttttttaatgttagatgaaaaaggtttagagggattgttacctgaaatgttaccattttaggttttcaaaaagttctttttatttccaacagatttcatgtatctttggaagtttttagctaacaaggccatttcatcatcattttctgttggaaatattttaccag

SEQ ID NO: 149361 - DNA, 983 bp, Cannabis sativa
  modified_base (423)..(424): a, c, t, g, unknown or other
tgatgttataaattctcaaacagactcttgaactcttctcaagtcatcacattgacatcacgagtctgccccactatatcctaccagacgcgggcatgatcttgtaacataaaagctgcccaatttactctctttgttcctattaccctcatattatcaaggatacaggtgattgtactcatccactgctcagctttaattatgtcagtacctcccagaaaatttggaggttgcagcttcacaaaccattcaaacacggagtctctatgtggcatcataaacccctgattacccaccactggcacaggtgcaggtggtaacacttgctcaacaggggtagctggtgccgattgcctcaactgatgcaactcttcctcttgacgaagtatgatacttcacatttcttaaaacatctgctgccanncagcaggcggattagcattgccaacccttgcattatcccttggatttagcagaggcgcaggcagtgccggtggattggtttggtctacaccgggctctactagcccgccctgtggtctagatgattatggagggtccattttacaaacagcccagtaatcaacaacccccggcgagtcaggcaccaataccacacttacgcacttattgccttaaaccctaacttaactattcattccatttaaataaacacttaccatataacattttaaacatggcatcatatatcacataaatactctagatgttcgcatactgcctaaaatggaaagcggtaaatatatgatcatataagcagtaaagcatttactctcaacacttattgcaccatgagtcgagcttgtctttgacgatgactgtacatgttcggccggtctacaggaagtttaaaaaccttgacgctctgatatcaaactgtaacaccctaacaattaaacacgatacctaaggtgattaagaaaccctaatcccctaaacgggattactagaaagataaacac

SEQ ID NO: 149362 - DNA, 643 bp, Cannabis sativa
atttttggcaacactctaggaggcaacacttttataagtgttgtcttttaattttctttagttaaaaaaaagtgttgctaattgtattttttctagtagtgacagtttgttggtgatggcagtgagagttcacttttgctcttcaaatgattatttttcaaaaagtcaaccttaagaaagatgaagaacaaatcctaattgcaaatcccaattttatgattaaccctactatcaaatttcaaaatttgctgtgatatatcatgtaaacaatggtgaagagaataattgttttgtcctttttatttgagaaatagtatatatttatacacaatttacaatttatgaaagctattctaagaaactaacaaaataaaggaaactaaataacttaattaattttacacttaatatattacaactaatatgcatatctaacaaatactaacatatgcatttcaaactgatttgcacatgattatttattttttcttttgttgcgattttttcataatatgaaatcactaccacaaaaatgggttttttcgacctttttaaatagttgtttaaagtattcccgttggtttctataaccgccgcctatacgaccgtcgtaaaacaggcataataggcgacagttcaaaac

SEQ ID NO: 149363 - DNA, 574 bp, Cannabis sativa
  modified_base (69)..(70): a, c, t, g, unknown or other
atatattaattaagagactttgtatggtctaattaataaataagataaatggtaattttatttgataannaattataattattaaataaataatgttaacatttataggattgaaataaaaaaatatggcattattaaaagaaagataaattgttgaaataaagtcgcaaaattgtaactagtgaggcccacattaagtggctccctagtagagtgattttgcccattattttattctttttaatccatataattaaatcctaaaccctagttgaaatactataaaaggaacatgatgctctcattctcatccaacctacttcaaccaaactaaatttagttttctaactttgtcagacaactagtagatgagagactcatttctatagtgattttgcacctcttgatggtcttcaccaattctagcctctagtgatagagtaccatgcccacacatagcaagtcaaatgctcaatcatagtgcggaaaacagtggttaaccaaacccgaaggagagaaggagatccaggctcagattttgttattactctgcgacagaaaggaacaaaggtta

SEQ ID NO: 149364 - DNA, 606 bp, Cannabis sativa
  modified_base (189)..(190): a, c, t, g, unknown or other
tcagcctatactcaatatgctactcatactctagccatattgatgtgacagcatcgatcaatattttagccaacatacatttatcaagtaatcagcataactttaagtgtactattattgctatcaatgtaatctaacaagcataaacaacatgtatgttaaatatgtaataacatatgcatgatattnnactaatcttacctcaattccaaattcaaatttgccgatcaacttgagtggaataacttctcggcgaattataggctcttaaatcacattgataacaacatggataagtgacatgctgaatcacaatcgggagttaggttttaaactaaaaccctatttactgcaacttaatatggcaataccctaaactagtaggaattaaccaaccaaaaacctgaaactaacacgaaatgacaacctgaattttttgggaaaccctactgcaaaaaccggttacccagttttataagtacctgtaaaaccggttagccggtttccccaaaaaaaccaaaacaaattcaaaccctaaccaaatcgtttccaaaccttaccaaaccctccagaccttcataatataccccaatagacataaaccaa

SEQ ID NO: 149365 - DNA, 1089 bp, Cannabis sativa
  modified_base (104)..(109): a, c, t, g, unknown or other
tggtagcatcaatccatactataagtacaactagccataataccacatgcactcagtacttcagtgtactagtgttggtagcactagttcatgctttcgaaagnnnnnncaaccataataccacatgtactcaagaatctagcatatactagtattggtaccattggttcataccttctaaattgccaaacacatacattcacgatatcaataggcaatcatatagacactaactatcattctaacggatatgtcatacatctgccaaacataaaaataacatgtacatatgtatgtgtgctatactaatcttatctcaattttgattttaggtgcatcggtcaaccttagtggaaatagctccaggtaatcgatggccctaagtcacatttccagaaagacaaaataactgctgccctaacactttcggggacttaaattgacaactaaaagtttccctattgatatacatcatggcaataccctaagtagatagaaaacactcaattggggtcctgggaaaagtcttaagatggacccccaaattctgcctaaatcggatcgcccgaaactcaactatcccattttaaaacttgcataacacctgaaattctaaaaaaaaccttacaaaattttgtagggtatataaaaacatcacaatgaacattttgcatgaagaaacataaatcaaattctcaacataaatcaaactaaatggctgtcctaaaactgcctaaatcggatagcccgaaacctccctatctaagtttggaaatcctataactcatccaatactcatccaaaaattaccaaattttttcaagaacctaaaaacatcataatgaatatatttcatgaagaaacctcaattaaattctcaacaaaaatcaaactaaatggctgtcctaaaactgcctaaatcggatggcccgaaactccttgtccgagttttgaaatcccatgtctaaaaataacggtcattaaaaaatttgtctacttatatcaattgtaaccagaagggaaatacttccctcccaagcttatagccctataaatagtgattcatactcactgagcaaggggtcgaaa

SEQ ID NO: 149366 - DNA, 528 bp, Cannabis sativa
ttactgtagtaataaaaattgataccaatgaagttcttggacatagtatcacagtaccttatttgagtgagagaattttaaaattctagcctatctttatttggatgacacaagtgatagattaatatgttatgatcatgataggaactttagaatataattgagaaagtaaatctaaccattcatatggataaaaataacttatcacaattatgaggataagataggaaattttgttaagtctattcgaatgacttgggcaaaatacctaatccttatgaaaaagttttatggtatctttaatgattacttattcttaaacaagtattttacattaatgttaatactagaatgctatcttgatgacttagtttagaagaaacttatagtttcagactaagataaaatgtcaccataagatgtccctgagaacccatagtaagaggttaaatgtactcctatgtacgattttaaccagactcctactgttgagtgggagtcatctaagatgtaatcaaacaaggaaca

SEQ ID NO: 149367 - DNA, 620 bp, Cannabis sativa
gtggtgtgtttgttgtaagataagcggggaagacaacacacatttgttcttaagttgccgcctcgcaagatctttatggataatgctgataaacgaatttgagatttaatgggctatgccttgttcggtcccttgcatgttagtaagtaaggttggaggcagtaatcggagcacaagcatgtggagaacgacggtactatctattctttgggttgtttggttagaatgaaataatagaatttttgaaggatcagaatgctcaatagaggtcctatgggaaaaaatcaaattctagacagctacatgggtatacaagactaagcatttggaaaatatttcattcttagacttaattagagattggagatctttgttgtaagctgctcggatgcagtcccataggtacttatactgtgaggaagtcagctttagtttatgcctctagggagccataagtttactttgtttagaaagggcagcgagttttgtgttagttttcctagggtgggtttaagctagggaatctgttctacttgtgtaaccacgatattcctccgccacaagtgaggatttttatcttttcgggtttggggcttgtctatgacaatggcctcattctc

SEQ ID NO: 149368 - DNA, 598 bp, Cannabis sativa
acaatgcatataaaaagaggtatgcttcaattaaatataaaattagaggtaaatttgattaattaattaataaaagtggtatttttcaacttactcctaaaattttcgcccttaaatattgacatatatttttgaattttttttttagttaaaaattctttcgagactattgagattgttagatttaaggacatttgactaatttcatttaattttactaattttgtgattgtctatgtactaaatcatgctccctaatattgatatttaccaaatcatactcctcaaactttaatatgtaccaaatgatcaagtctcctaaatttttatccatgttagactttccttactaatattagaaaaaagtacttaaatccaacaatctcaatagttcaggagaatttttaatgaccttaaaattcaaagggcatgatttagtacatattaaagttcaagaggaaaaaattttaattcgccaattattatagggattatttcatagaaacacaaaaacaacaaaaaaattacgaaaaatacggtttcacgaaatttttaacatttttatgatttttttgattttatttacgaaaaatacgat

SEQ ID NO: 149369 - DNA, 668 bp, Cannabis sativa
ccgtgaaaccgtatttttgttgttgttttttttttttgttgttgtttttgtgcatttgtgaaattaacccttgattttaacgtgatggacttatatatatatatatatactagtaaataccccgcgcttcgcagcggatatataaaatattttagagtatatataaataaattgtgtattttaatcaataataattacttaatcaacttatattaaaattttaactttattattaaaaaatttgtgatataaatacttaaaatattaaatttgttgctagtaaataccgaaatgcgaaaaatagtaacataaatcctcatttatggtttaatttttattctgatgtgtgtgttattaagttctgggttcgaattttattatgtgtgtttttaatgtttgagttttagtattttactggggttataatgtttgagtttgtgcttatgagatctgtttttattaattaatttatttatttttatagattttgagaacttgaaatttgatattgtttctattgattattgagattgaaagtttaatttttcatacgggaattaaaatttatttttccgtttcactgattgaaaaatattagtagaaagtttatggaattggaattttgaatatatgaaaatagaattgaaaaatagcattttaatcgagaa

SEQ ID NO: 149370 - DNA, 746 bp, Cannabis sativa
  modified_base (259)..(265): a, c, t, g, unknown or other
  modified_base (344)..(346): a, c, t, g, unknown or other
caaacgaaattttaaaatcaaaaccctaaaatttcacaaactagaagaaaccaaaacgatgaaatgaaaatacaagaaaatgttcaaaatagggggaaaggaaaatgaaaccaaaaacaaacctcggttcgaacataagcaccaacgttagctttttttcccagaaacttcttcagccattttctcttgcacactgagctttgttttcttcttaggatgaggtctcccacgcttcgttaatggaggaacaaaatcagannnnnnntcctcaataattggacgttttcccttagctttattagctagtgatttcaatcccattttggaattttttttctgaacannngaaggagatgaggatgaacgggtcacagccattttaaatagagattggaaacaaaaggaaagagggaaaacggttatgggattggtttagtgggagttgaaaaaaattttaagaacaaaaatgagaggaaaaatattgttgaggaatcgtggggagttttggttcaacaatggagtttacttgatctttcaaaggaaattgaaaggaaataaaaaatcaaatgaaaacaaaagaaaaaaagagagggaagtgattgagagttgattgatggttgatagggaagccacacgtgtccggtgcatggatttggtgtgcatgtggtatatgtgtaataaaattaagagaaaagataaaaatattgatgtaaccgtgtgtaggtatattagtaataaagtgtgta

SEQ ID NO: 149371 - DNA, 557 bp, Cannabis sativa
agaggtatgtttcaaataaatataaaattaaaggcaaaattgattaattgattaataaaaagagtatttttcaacttaccccatatatatatgcgtgcactattaatgggcattatacccattcatgggtagttttatgaaaatttgaatttttatgtttagtttttccatcttattataaaaaatctctcatttttatattatatgagttgagattgttctatcagctgaaaaaaaaattaagaaaaaaagttgaatttgacttaagtattttgtatataaacatatttttgatatagtgtaaaaagtaatattttttgaaatttttttaattaagtagttcaattaagtatagaaattcaaatttcttcttttattattcgttattggatcaaaatctaatatagtttaatatttttaaaattaatatttataattaaattgtttagtaaccatcaatgattaatacccattaaaagatgttctataagggctcgtttggaacgccgtattatgtcgtattgtattgtattgtataatattgaattgtattttat

SEQ ID NO: 149372 - DNA, 1348 bp, Cannabis sativa
agatctggatcccaatctttggtccaagtcttgttcagatttgaatcctgggtcccggtccgtgttcgtgtccgactccgaatctaggacgaagaccggggtcgggtctggggtccctgtcccaatcctggatcccgattctggttataattttgagtttgggtccccaatccaggtcggggacctgggtccaggtctaagtctccaatcccagtccgagtcctgcatccagatctagatccaagtccgtgtctgggttcgggttcgtgtctagagtcccgattcgagtttcgaattgagtccgtgtctcggtcaaggtctgggtctgggtcctagtcaaatttcagttccgagaccgagaccgcgtcccagtcccttggtcgtgttcctgagtcccattctgcttccggttccggttctagttttggttcacggggtccaggtcttggtccgggtctgggtttgagtccaggtatgggtcctagatccaaacatcgactatcagttaggtcgaagcccccagtccagatctggatcccggtctcgggtcctagtctagttacactatcctaggtcctggtctaggtcctagttcagggtctgggtccaaggtcaggtcttgggtctcagtgccagttccaaagcccgggtctcgggtccaagttccccatccaagtcccagtcctaggtctcagtccgtgtctagggcccattcggggttcatgtcctagttcgagtttaggttcggttggtgatccctctccaggtccagatctgggttcgagtccccggttcgagtctagatccaagttggggtctgagtcttgagttctgatctgggtctgggtttcgaggcctgagtccaggtcccccactatgttcgggtccatgctcggtttcgggtcctagtcccaattcaaatttcgattctgtgtctgaattcgggttcgcgtctaggtttgggtcggggtttgagtcctgtcctgattctagggttggctttgggtcaaagtccggatccccgcttgggtctgggtttgggtcctggttcgagtccaagtcttgggtacgggtccagatttttgtctaggtctcagtccagatcaaggtccaaagttttgatcgcggtctaggtatgggtccgagtcttggtttaagatcagttccgaagttcaagttcgacctgatcccgaacccgaacctgaacacgaacttggacccggaacagcacttaggacctgaacttagatgggggaccaagacctgggaattgtgcccctgaactaggaccagaacttggtctcagaacttggatgaggatcgaggacccaacccaagacccaaacct

SEQ ID NO: 149373 - DNA, 547 bp, Cannabis sativa
atcacatatataatatgttctatgttattcttacctcgtttctaaattcaagtgtgccaatcgacctgaatggaaaattacgcgttgaacggaggccataggtcacaatataaaactgataagtgtttactctaaaacacttctctaatgcccaaaaagaacctagggtttttctaccgagctatgtggtgaagacaccttataataaaatacatattttggctctaatttatataccatatagtagagctcttcataagctttaaaacagtatataaaacgtctaaaatggacacccgagtaaaaagttatggccaaaatacgaaaaatttgcctttcccaatactgtccaaccggaattccggttggaacagccctgaaccaaccgaaattccgattgtctgaaaagaaattacacaaaaatactcaatcttaaaagccccaaaacatactcaaaccttccctaatcacaatcaaacttttcagaacatcaacatataacatactaaacatattccatgagtcaaacacaataattacaccaaga

SEQ ID NO: 149374 - DNA, 972 bp, Cannabis sativa
attgatttggacatccataaataattaatatatatttcataacaataataagttattcttttatatagagtgtgttctataataattttagggctcatttaatacaccgtggtgtattgtattgtattatattatatttgattgagttatatatatatatcatatttttatataatactaaattttaatttatactaaaatattatatattgtataaaatacaatttaatataatactatacaatacaatagtgtaatacaacataccaaaaaaactcttaattatttttttctaaattagaaaagcgaaaataattttaagagcatgttctataaatttattttcactttttaaattttaaaatgagaattaaaattttaaaaataaaaaaaaaacattttcaaaaaaattcaaaacatttttttaattataatctaattgtattttcttttattaatattttggaccccaacctggagcccaaaccctaaccctggaccccaaccccgatttggattcgagtccaaacccagacccagaccaaaaacttagacccagacccggaccccgaacttggacctggactcagatccaacccatgttggaccccgaacgtggaccccgctcccggcctcggacctcactcactttctctcatctcaatttcctttttcctcacttaaataaaaaatgggtaaatactattttgaactctgcattttgcaaaaactgtcaattggtccctctatttcattaaatgacaaaatggaccctgtatttttcaaaatggtaatataggatcacataaaaactgtgatttttgtgaaaataaaatttaataataacccgatctagaggtattatgaaaacaaattgtcgaaaattgagctcatagtcctacttgtacttttttaaaaatacatggtccattttattatttaaaaaagtagaaagtccaattggtaactttt

SEQ ID NO: 149375 - DNA, 763 bp, Cannabis sativa
  modified_base (59)..(62): a, c, t, g, unknown or other
  modified_base (385)..(386): a, c, t, g, unknown or other
ggaaccaaaactggaagttgaccgtgactagaataaggacttggacttggaatcataannnnaattggacctagatccagaacagtaatcagaccaggacctggatttcaaatcagacctaaactcgaattgggagccggactatcccaacccaaatatggactcgggacccgaacccgaacatgaacttagacccaaacatggaacaagactagggacacagatccaaggtccagacctagaaccgcacccaagtctcgctcccgaacccaaactcagaaatgggacctgggacctgaaccagaccgagactcgtgacagtgatccagatcttgactcgggattcaggtaacgaggcctggaacagaccagtagttggtgtctnnatctgggactcaaactaggaccaaaacccagacgaagaaccaaagctgaacccagaccgggacctgcgacgcaaaattagaagctgaacaagaatcgccgaaccaagaccctacacaaagactaggaccgcgaacagggcccgaacccagactaagaaccgaacacagtcctagcctaagaacaaaactgagactggaactcgggcccagacatggtcgtgtacccagaccggaactgagacacggacctggacctaaatcttggacccgatgccaaacacagacttggaattacatagggatccgtatacgaacctggactcggaccaagacccagactgggatcgaaatgttgaacctagatctggaccgagatc

SEQ ID NO: 149376 - DNA, 733 bp, Cannabis sativa
  modified_base (623)..(625): a, c, t, g, unknown or other
tatatttaagttagaaatttttcaatttcatatcaacttgaattagaataatttttcagagtatattttattttatttcaatacttatattttcatgtaatttttaaatatatttatttcaaatgtagatattttgaaattttttgattttaaaaattagattaagttgaaaattaatttgttaattaattttagatcaacttaaatcaagttatttttcattaatgaatgattaaaataaatagactaaaatatattattagaaaataaataattagtttgtaaaatatctagatagttagtttctaagtatactttttagtattttttttggatatatttaattaaataaaaaattaatatttaagttaattttgttcaagacacttaaatattagatatttttcttaaaatgttttattaaataagaaaattatatttatgttgaaaattaatttatttaattaattttagatcaacataaattagaataatttttttcaaaattattttatttttaaaaaattaaaaaatatatatttaaatacattggattttgaatttaattagaggtatgtatttatagaaaataaaattcgagttgaaaattaattttggaccannntaaattaagtaatttttataatatttattgaaaattaatacaaagaatgaaaaataaaattttattttcagatcaagtatgtatataattttataaatattaaattaa

SEQ ID NO: 149377 - DNA, 582 bp, Cannabis sativa
  modified_base (546)..(553): a, c, t, g, unknown or other
taaactatatgtatatattgttgtaagaaaaaggcataaactactttatataactattaagtttagaaaataaaaagaatcaaaattagaaaataacaattcaaaaataccaaaattatttatcactaataaataatgaatttttcttttctctaaaaacaaacattttttttttgataaatggttacaatgagaaccaccaaacaacaaagttggccataggccaaaacaaccaggaactactcactacatcccaaggcagtagcaaaaacagccaaaagaaagagtcaatagaaactaacactacaacacacaacacaacagctaccaactcacaaaagaaacaaacaaattccggggaaccatgactatttgcagtaattaactacaggaaatcatcaaaattggccaaatcaagaccaccaaacttgttgtttcgatttgcccattgagccaccgagtgggccacaccattggaggttcgagggatccattggacctcccaaaggttgagattgttggaatattattttaccaggatcttannnnnnnncacaagtatgttatttaaacaccctaaat

SEQ ID NO: 149378 - DNA, 652 bp, Cannabis sativa
gatgatatgctcgtaaaatctcaacatgcaaaagaccatgtcaaccatttacaagcaatgttcgaaatactggggcgatataaaatgcagctgaatcctcttaagtgtgtcttcggagtcagttcagggaaattcctcgggtttatggttaatcagcgaggaatagaggcaaaccctgcaaagatcaaagcattagtagaaatgcgatccccgactaagccaaaagaagtccaaagtctcacaggtaaagttgtcgctttaaatcgttttatatcacgatcttctgataaatgcaaagagttttttcagatcttaaaggcaacaagaagttccaatggactgaaaaatgcaaagaagcttttcaagcactaaaaacgcatttggggcagcccccaatattgtccaaacccatgtctggggaagtcttatccatttacctggcggtgtcagaatatgcgattagctcggtactaatccacgaagaccaaggtcgacaatacccggtgtactatgtcagtaagcatttgttagatgctgagactcgttatcctcagatggaaaagctagcatttgccctggtaatatcgtcaagaaaactgcaaccttatttccaggcccatagcattgaggttttaacaaactaccctttgag

SEQ ID NO: 149379 - DNA, 1100 bp, Cannabis sativa
tgctacaatatcagcactcagcattataatgtttaattcaataatgtttaattcaggtaatacatcagcaaccaacacctctggatttgtttctagaacaaaactcttaaccttgctatgattgtctttaatagaacttggtgtgggactaggatcgacacaaacattcttctttaacaaattcacaaacaagggagtaaattcatctgacttcttcgcaagtgtagataaaaagtatcttgcacacttatcatttccaataacttctaggggatacatgtagcctttcatgtacttgtaatttactttcaatttcaagtcatacttctctttatcaatatctagttcttcatacaaaagaccaaccaaacatgagtagcttacgttcaaatcaatgtcaaatgtcaaatttttggcccctttataaacccaatctttaccctcaggctcccaaacaccattatacataacaaacgcattaacaattgaacctgtcatattcattaaaaaaataaaataacaatttagaacaaaaatctcacagaaaagttatccaaaatctaaaaaatgcaataatactgtacaccataaggctccattcgaaccaccatcgagatcatatcgaaccccgttaaaataaagtcaaaaaaccatgttggacagaaagtggccaacaatcggacaccatcgggtccaatcggacccatctaaaaaaaatgccctgaatccaattttggacccccatcggaccagccatcaaactaaaatcggaccaatcgaaccatactacaaaaaagtcccaaactgacctaattcagactagaatcgggccaagtatcgggtccatcagaccgaactaaaaaaaatgccccaatccattttttgacccccccatcggacctaggggtggcaaaacgggtttcaacacggcacacgaacacgaacacgacacgaattttacgggttagggtcgggaaaattaaatgtgggtcgaaaacgggtcgacacaacttgacacgaaataaaaacgggtcaaaaacgacacgacccgcttaacacgaatgtgacacgtttggcacgatttttttaaatataataaa

SEQ ID NO: 149380 - DNA, 547 bp, Cannabis sativa
acatttgaattaataaaaaaacaactcaaaattctaacaaataactgcttacttgtatatctttctaaactttatttttcagagttgggttgacttctttccaatttttataggacaaccctatcaactgccggcatctgtttttctgcgtctttccatacttaaaatctacaagttcaacttgttggagaatttttttcccagacagtggcaaaggagtcatatctccctcttcactaccatcgaatgctttcttcttccgtctattaggatgatttgcaggcaagtaccgtctgtgacccatgtaacacatcttgtgtccatttgccaagcgacgagccaatgtgttagtgcaacaaatcagacaacctttgtaaccttttgtgcttaagcctgataaattactataagcagggaaatcactgacagtccacaatagcatagctttcaggttaaagaattcttttttaaaaccatcataggcctgaacaccattctcatacaattctattaaattgtcaatcaatggttccaaatatacatcgat

SEQ ID NO: 149381 - DNA, 652 bp, Cannabis sativa
ccggtcctccgccgaggctataatttccgcccggagcgctttctctgcggccggggtgcggatgttagggcagagaaccttcgagaggttaaagtcatccaccgactagctcccggagatcagtttggccattcggcagttttctgtcgtgaccaagtctcccatgttgaggtcttttttgtcataagtggagaaggtcttggcgtgttggagaagcagtcgggtgggagcagtgcagagaatagggggaatcctgacccactccgtgagaagttccaggcagtccacggcttggaagctggaagaaaagaaaaagcgatggcggtactcctttacattcttttggtgattaaaagggacttggccctcatttaaaggatgggcccggagggtgaaaaaatcgtctttaaacttgtcccccttcttagggacagatacaagttcataaaagtataaaatttcgaccgggctaggtgaagcccagcctctggcaacataaaaaataaataagcctgagagcaggcagtaagcttgtggaatcaattggtaaggcgcaaggccgacaaaaataagaaaattaacaaagtagtcttgaagagggagcatggccccggacataagatgggtttggtgttggaaagtattttaccag

SEQ ID NO: 149382 - DNA, 1161 bp, Cannabis sativa
tttttaaaaaaaaaaaaaaatttagggttgtcgcaactcacatgtactcttgcacttatacatatttttatacggttaattatgattttttgttctttaaatttttaaacatatattaaattatctccttcgaattaatatgtccgttaaaaattctttaattatgaactactaagattattaaatttaaagatttttgtttaattttattcaattttattatttcagtaattataaacatatctaccaaatcatatccctcaaactttgacatgtactaaattatgttttttgaactttcatccatgttagacttttttttattaaaatttctaacaatcttaataattcagaaaacattaaaatatatattatagcctaatggtaatataattagtttaacgactaaaatgttgagagttatttaaatcccaatagcctcacttttattcataaaaaataataattcaggacacatttttaacgaccttaaaagtataggagcatgatttagtacaaatcaaaatttaaaggataaaaatcttaattagcttttttattaattaacaatttaaatcttttacgtataattttttttaatttttttttttttttacttaacacgtataaaaagttatagatgtaaattctaacaaaaatatcaaaatgataacttctcaataaataatgtgtttaatttacaaaaagttatcaaaaacttttgtaatcatgacaagctcaaatttcaattattagtaattaattttttttattaaaaaaaattgatctccttaaagctttttctaatatttaaaattaaatcagatcaataaatttttttaaatcaaactaaatcataaaaattaaaacagtttgggttggttcgaaaccacattaattattttaagtaaaatttataattattcatattttttaagtaattatattgtttttactaaatttttaattttatttttcaaaatatatatttaaaagtaataaatctataacatataaataaaaatataaacgttttcttaaaagtcaaacataatataaaaatttaaaattcatgtaataaaaaacttgatacacaaaaaaggtaaaatatatgcacattatacaaatagttgttggatattttacgaggatctagattta

SEQ ID NO: 149383 - DNA, 500 bp, Cannabis sativa
  modified_base (453)..(473): a, c, t, g, unknown or other
ctcataaatgtatttatgtttagttttttttattatacataggacatatttatagtaggcacattagttttgtccttatgatagggatatttttatagccatagatatttaatctaatggtgatatattaacgagtgtatatgaatgtttaatatttagaatgtattagattattcataaatttatttttttaataatatttgaaaattaaataacaattcttttaataatagtactaatatattctgacttctcccaattaattaatttatttttttagcatctttctctctctctcttctattatcgttcttccattgaagaaccaattcttaaatccacagtgaccatcctcgatctccttgttgccaacccaacgtctctttcactcccattatcattgcaacaccctaactaggctaggcgtgttaagtgatttttaaacgtactgtnnnnnnnnnnnnnnnnnnnnnaggtttatggaaatcgtgattaattaa

SEQ ID NO: 149384 - DNA, 591 bp, Cannabis sativa
tcaagggccaagccttggcagacttcttaatagaaggtataactctagaagaaattccacctattcaccgagaagcaaaaacttggaaattatacgtggatggtatgcatccaacgagcagggttcaggtgcaaggggtaatattactctcatcagaaggttttaattttcactatgctttgagaattcaatttgacgcatcaaacaacgaggctgaatatgaagccttgattgttggcttaaggatagccgaggcattgaaggtcaaaaatcttatttgccatactgattcggagctgattgtgaaccaggttctcagggaataccaggccaaaggcttgaagatggaaaagtatttagggaaggtttgtaagaacttggaaagtttagattactttaaaatagagcaaattccaagagaaaaaaactccaacgcaaatgcttggcaaaactggcctcgcagaatgactgggatgaattgaatttagttctggtagagatgctaagcgagccaagtatatgtgaaacggaagacgtagagatgatagacagctctcctacatggatgactcctataatcaactatctact

SEQ ID NO: 149385 - DNA, 561 bp, Cannabis sativa
aaacactcttctcacaaagatagatataaaaatatgagaccagtagatgaaaaatatttggtcactctctaggtcctatttatagaacataacaaccctagagatagtgacaaaaacgatttccaagctgtacaaaattttcttaaaatttttcctaatttgcaacatcagaatcgaactttgcagcaggagatcaggaccaaaaaagaaacttttcaaattgaaccaaaatcacgaatttagacttattcaaacctatcaaataaagtttatttgatctgataaaaacataccaaaactgaattcatcaatttaaaaaaaggaaagccaagtttcccaaacaaatgcaacaaactgagaaaataactttccataaaataaaggagcaattggcatcaaattaacacaataaaatcaattaaatttctcaataaaaatgtacattaattaaaaaaatgttttgtcaaactaatttgccaaaaaagacttaacaagctcccactttggcactttagataatcaaaatattattaattaacaaacacctacaaaacaaagtta

SEQ ID NO: 149386 - DNA, 511 bp, Cannabis sativa
aaaataatattttaattagatattagggtttgaaaattaaaaaatgtgaaatttgggaaaaaatcccacaaaattcggattttggaggtggctgcccaggaggggtgcacgtgcagccacaaacgcgcgtgcaagtggagaattgcagggtgagagggcgacaaaactcggcgccagcagggtttccctcggcgtgatgcaacctctcgtgtctgaaggcgtgcgctttagacagcaggctgtctgagtgagcgcgcgcgtatgggtgttgtccgaagcctctcgtgcgtgcgtgcaccaagcttcgacacccatggacacccaattttcaaactctcataacttttttaatttttatcgtaattgagttccgtaaaaatcaaaattgtttaacttttcataaggaatccaaataatatattttcatggaaaaatttcgtaaaacacatacattcatcctataatgacataaaccaacatgaaaccatccaaatcaacacaaacatcgttt

SEQ ID NO: 149387 - DNA, 602 bp, Cannabis sativa
gcctcagcttttgaaatcaaagatttaggaaccctcaaatactttctttggtatggaagtagctcgatcgaaagaaggaattgttatatctcagtgaaagtctatcttagatcttctaatggaaactggaatgattgggagcaagctagttgacactcccatggatccaaacttgaaagctaatcgaagagaggattcaactccagtagagagggggagctatcaaagactagtaggaaaactaatctatctctctgatactagaccatatatcgcctttcctgtcagtgttgttagtcaacatatgcacaatccttgtgaggaagatttggaagcgctgtatcgtattttaaggtatctgaaaatgacaccaagtctgggtttgcacttcagaaaatacaacaatcgagacttggaagtttacacagactctagttgggctggagagctaactgacaggcgattaaccagtggttattacacctatgtatggggtaatttagttacttggcgcatcaaaacgcagtctgtagtctcaaggagtagcacagagttagaatatcgggctttagccttaggtatttgtgaagggatgtggatca

SEQ ID NO: 149388 - DNA, 521 bp, Cannabis sativa
  modified_base (173)..(175): a, c, t, g, unknown or other
acaatgcatatacaacatattccaactagaaaatcacaaaaaactcagtgaatcaaattatgccattaaagacctaaacttggattttaaagctcaaacttgatctataaccatacatcaaaaccagcttcaagaagctaaaaccaactcaaatgaaccctagaattcaaacnnncaaacaacctaaccctaacagccactaattttcaaaattactacttgaaaccaattaaaatcttgagaaaacatagctagaaagtatctagggtttaccttggcttgattccctctgaattcttgttgaaaacaccaaaacccagcagcaatactctggttccaagctggttcgaagagggaaagagaagggaaagagagaaattctatatttggcttttctttgatttttttcttttatttcctctaagtggacaaatggatttctacattaatccttggctgaaattaagtggccatgtgtcactcacctaggcagccaccaaaccaccattaaaattactaaa

SEQ ID NO: 149389 - DNA, 638 bp, Cannabis sativa
tttcaaaagaaaacgttatttatggtttgtgaggttgagttacgaaagccttaagcgtccccgaaccactccaatacgcacacttgtgcttttacagttgccttgagttctcacgatatcaggaggaaagttaatgtagcgattgtttttggtatgggaaaatggatcaaacgcaataattccctcaacacatttagtggtcaaattactcacaagccaatgttgcattccattacatgaaaccgtattttcatccaattttctcccttttaaaaaaatctacgatctactctattttttagtctcaaaacaaaagacttgaacacaataatttaacgaacctgaggcctaataatgaaatagtactattgctttataccttttttttttcacataactattattattatttgggtaacaaaccaatctgcccattcgtcttgatggtagaaaatctaattctattgaattcaatataagctttggcagcttaatccattgttgtgtgagtagattgcaaataacaaaattaggtggtaacgcgaaaccacataagagaaacaataaatcatctaaagatgcatacaaaattatttcgttccatggtaagaaattgagataataattgaaatgccact

SEQ ID NO: 149390 - DNA, 1044 bp, Cannabis sativa
gatcctcctccatttgtaaaatattcgcaagtctctgtttgcaagtagttgagatatccccaaaggacaccgttgatttagccttattggcaacaagacctgtagcatcactaaatagaaggaaagcctctttcaccaactgaacaaacttattattacccttacaaaagattatgagatcatccgcaaagcataagttgacaaggcctaatgatttacaaagagggtggaatctgaaccccttcttcttagacctttggataagaagtctagtcaaatagtccattattagcacaaagagaagcggagacatcgggtccccttggcgaaggccttttcacccttaaaagagccttgaatccttccattaagcaatagggcgtaagaggctccttgaagacagcttaagatccaagtaataaacttagaaggaaagcaaagagcttttaagaggtcagccacaaagcaccagtctaccgtatcataggccttgctcaagtcaatcttcataatacacctagaagaaatgttcttcctagtgtaacctttgagaaggtcctacaaaatcaaaacattgtgagctaaaagcctctttttaacaaaaggaccttgattttcatgtattagccaaggaagaacttccgagagtctagtatagatcatcttcgagatgcatttgtatgttgtggtgcaacaagcaataggtctgtagtcgctagctccttgaaggttatcaatcttggggataagggatatggatgttttcatttacttcctgaggaagcttaccagattgaaaaaaccccaacactgcactagagaaatcgtctccaatgtcactccaaagatctttgaaaaagccggcaccaaacccatcgggacccgggcttttggacgaatgaatcctaaataatgcttctttcacatctttcttgcaaaaaggaccgatcaggctcacttgttgcttgatatcaagcttgttcccaaactcaagacagttgtaatatcccgataagtctaatggtaattaattagggtttatat

SEQ ID NO: 149391 - DNA, 1325 bp, Cannabis sativa
  modified_base (555)..(561): a, c, t, g, unknown or other
tggaggcttgaagcggggacgttacatacttatcctctacagtaaagttaagaacgcatgtatggaacccataaattaagcatgcaaaatagaagaggaaagaattgaaaacttactcactgttcgacgtctgagtttggtccaaacgaagctacccggatacttttggtggaaatctcacgacagacttaaagcgaaaaacttcctttcttactctatgctttgctaaatagagaagttggtaaaagtgaatttgttaaggatgtacaaccctatttataagtagaaaaatgaaaaagggtaatcatttcaaatgccttagatgcctcagttccaccccaaaagcaaatatcgggaatcaaatataatcaagtgtaaccgtcaaaatgtggtgagagaaaactgggtttcgaatcattaattgcgtcaaagcattaattagccaaaaattgaagtgatgcctagttagcctcacatcgaatcgcgaacagacacactagacacgtgtcacccatccaaacgcaaagacaactcggatgaagtctacacgcaacnnnnnnngtcccgtacagacttgggggggaaatgttatccaaatttttgcaatctgacgtggcattgcacgatggtgacacatggagtcaactctatgtacctactcacaagaaatatgacgaacaggacaccacatacatttgctcggacgaagtcctcttagtcgggcagtgagcaatccgcgcagcacaccagcacttagcaaattcagcttttgcatcgcgagtcaccgaagaaatcccaataactttgggatcagatcacagagatatggcaagttgtccgaatcccatgattagtatattctgtatttaatatgcaatctttcaacttatatcaattgtaaccagaagggaaatacttccctcccaagcttatagccctataaatagtgattcatactcaatgggcaaagggtcaaaaaactggtctaagaatctatatttagagatattattgtaagagctttaagaaaaggaaccattctcattattcttaagtcaatacaaactaccaggattaggctattatcgaactgttcggggctgaacctctataaaattcttgtgtctttatttgttttattatattacactcgtagtatactacttgtcgcttacaaattagactcatagtcattggctaaaagcgaggtcaacaatcatttttataacattgtaatcacacaatctcggtacttcacaaagcacccttaccacttgttaaccacgagcttcatatgtcactatcgttgcccgatacaacaaacg

SEQ ID NO: 149392 - DNA, 1139 bp, Cannabis sativa
ataaacatagaaatgaaattctaagtgcttatgtagtattaactcgttgaagatactatagaatttgtatcaataataaaaacacatacacaagcataaaaaaaaaatataaatataaatggtactggcaaacataagataaagtaaataaagctcaattcataaatgcaattcatttccaaaatggaaaactttattataaaattctccaaaattaaaggaattgtcttcaataatatgaaaaatagggaataaaatcccaaactaataatcgaaatccaaatttttcttaaactaaaataattaattcaaaaaataaagaagattccgagcttcatcttcatcttggactatttccacccttctgtccaactatccggttcaacttgctaagatagcatccgagttcaagtagttatggctaaaataagaagaaaacaaataaacatggttagtaggtccagaattaataatcgaagaggataataattcactaaaacacattagtttataggaaaagaaatactttttttctttgctagaaatttagggcattggggtttccagtggcccttttcattgcaatagaaacattttccttttggtgtatcaccagtggcaacaacctttttcttcttaactgttttcacagctttaataggctttttgctattcttccacttcttcttgttcttgggtttggaagtagaggcaaagtttgcctcagcctgagtcgctccattacaatttcaagaattatgagctttagacccattcttctttggtcctccaatcaaattttcaaaagccagaaggtcgtcaaacaactcgtgaaagtcttgttccttcttattcatgacataattggaggtgtaaggaagaaaagctggagtcagactattcaagattagacttattacttgagttgtctaatccattttagctccatgattctaaggttcctggaaataagttgccctctggagaaggtgatcacgcacgttctgatgaggactcatccgtgcattgataaatttccttgtcgcttcaaagcgagattggattgatgccatttcgtatatattagttaactctgtcatgatttctgcagtggtgacagtgtttgcaaaccttgtttt

SEQ ID NO: 149393 - DNA, 596 bp, Cannabis sativa
  modified_base (568)..(569): a, c, t, g, unknown or other
tttaaaagttagcataatatcctagttctattcaaaatatcatgattaaactaatcttattttaaatttaaataaagtcaatttatttaaaaaacattaatatctaaccttaaatttaaaaataagataatataatcaaattttaaaataagataacaaattaagcaaaaaggatagatttttacctattttcaaatttaaatttcactaatatcttaaattaatttttaaaaaaattaattttgataattagttttgaaatttgaaaagtaaaaatcaaaatacaaaactacacaaaaaataagaaattaattccataaaaaagcatgaaaaaattgcatgtggtacggatggtatgcattgcagaccatccgcgtgcgcgcctagagtggactagccgagaaaactcggcgctagaggctgcacgcagcctttccgcgcgcggagtgaaggaattcagacacgcatgtgcgtgttcctttggaaaataaatactacttttctaagaaaatgactaagtcggaaaacaaagtagcaaagtagatgagatatttttttcttgattccnnaagtgttttatcatcttattcgatata

SEQ ID NO: 149394 - DNA, 516 bp, Cannabis sativa
taggcagaaactgccccaccgtggccgccagtgttgatgtttctccagcatgagcgacagcttttgggaacaaattgagaggtgtaatatttgttcttcccactcctctatttatggtgtcgacgggaggtgttctgttcccaggaagtgggacattcatcgtcccgatgttgattgatccattgttgttatcccaagttgtctgatttccaaccatagtgattttccttcaaaatcaacaaaatatttcattcccacagacggcgccaaatattgttgaaggaattttaacaacaccaaaataaaatataataataatataaagaggagtttatgcgagtactcaacctagaatggcgagtattcaaattaaggacacaaaatacttaataaaaaattggaaataaaaagaacacaagagagtatagtggttcagtcagatcacggtctgcttagtccactgcagcaaggatttctgtctcgcttccatttcacgttggatcactcctttatata

SEQ ID NO: 149395 - DNA, 523 bp, Cannabis sativa
tttatttattttttaagataagagtttacaaatatgaataagcttgattttttctttaaaaaaattttagtttgtttaaattatttatttaattttaaattaatttagtttgattttttaagatacatgtttataaataaaataaaattaaaaatatttttttttaggaataatttaatttttttaagtaagcttaatattttatcaggctttttaataattttcattaattttttcataattaagataacattatagttttttaaattaatttttatcaaagggggcaaattttatattgatcaaagttcaatagataaaaatattaatttttaatggtaaaagaaacataatttaatagaatagacataattatgtggctgttatattttagaaagaatttttaacaagacatatattttagggattaaaatcagatagtttcaaaatttcagagagcaaaaatattaattattcttatttaaagaaataataaattgattttaaaaagatcggaagagcg

SEQ ID NO: 149396 - DNA, 567 bp, Cannabis sativa
gaattattaatcactaagtctgagcatagtgcgaaatactagaatatgagaattcatgattcatacatcatatctaaactctaattttacctgtatatcttgaagttacatgctttagacataataacttgaaaacaaccaacaacttcatatatgtatatttttatcagtaacacgtattcgagatcaataaccaataaatgatgtactaactttgttgacaatacataatcaaaatcaataattaatatataacatcggttgctaagtttatcaagaacacatgttcaagatccataaccaacaacaattaataaattttaaatcttcaataatacatattcaaaatcaataacaaataacaattactaactttcaatttctttcaataacatgtatttaagatcaataatcaataacagttagtaacttttaaacctctcaataatatatattcaagatcaataaccaatagtgatcaataatttttaatcttttgtaatttttctttttctatgattctactccgatcaattgatatatatacaatatattaatttagaattg

SEQ ID NO: 149397 - DNA, 598 bp, Cannabis sativa
ataaaaatgatactcatatactaaaaaaatataaatataaattttaaattataaaatattactagaaatataagataaaatactaaacgggtcaccgcggtgcggggagtatcatcctcgtccctaccccgtttaacattcagagatgaaaagtaatctctatccccgccccgttctccatttaagtgggaaattcccactccatcacgggcgggtccccgcgggacccaatctcaatgagaaaaatgtgcatctctaatcattacttataatatttacataaattcaactgatatgttctctaaaacaatgaaagaaaaaaaaaaccaactgatgatgtataaatttgaatttgaaataaaaacataaaaataggaatcataatgaaaataaaaatagaattaaattaaatttaatatacacaaatatatgaattaattacactcattaatattgatcttgttccactataaataaagtagtaaataacaatattacatagagcatcgttattaagcactagtggtgcctaacaccttctcgacacatcgcgttgcgattggctagcaatacttcctaaaagttattatattaaatt

SEQ ID NO: 149398 - DNA, 558 bp, Cannabis sativa
aatttactcatataaagaaaccttataatttttcttatggtacaaaacttaaattgaatcatgagaattctattatacttttgtataggtattaagattatatctcccaaaaggagaatagaaagacttatttagaattcttgaccccttgatttaataaatttagattttataaaggggtaacaaataagaaatcaagtgacaaaataaagtttcattatctaagaatttatgctatattttggtggatctttcctcatgatttcatggaatgatcaataatagtatcttgtcttagactaatgaaacttattttgttcataaggcattaatctttagacgttgtttcttttaaattttcaaaccatagttgacaaataaactaggcaagaaaattaaagccgttgaaactaactatgatggttattactaccatgtgaggtatgacaaatagtttgagtaacgtctaagattattttgcacaaatactaaagaaatgtaattttatcttccaatacaaaatgttaggcaaacctaacatgaagggtatttgagaga

SEQ ID NO: 149399 - DNA, 884 bp, Cannabis sativa
aaactaagagaaagggaaactaagaaaaaagggaatgttgattacattaatggtaataaataaaagatttggacatccacataattaatactatttataacaatttaattattattgcgatttttaaaaaactttaaatgaagagaactaaaaattatatcataaggtgaattcttgtataaaatattttcatgtatatatatttaaaaaattattaatatatataatatgtgattagtatataaatataatatttattattttgtttatatatttatttaaatttatagtagtatcaccatcaacaccactctatatatactatcttataataagtttttgtattatatttcatttacttatttagataggagaccaataaattacaactacacatatataatttatacaacttgaatacttaattaatataatatttatgtgtttgaaaaatcagggggaccatggctaccctcacttacaacataccttcagggtcgtcttaaacattttggaggccctgttctaatttaaaattttagcaaaaaaaaatgtaatttataaataatatttttatatattatcattcagttttatattttattaaatactaaaaaacttcaactatttataaaaattgttattgattctaatagaacaaaaaaataataaaaaataatataaaaggcttgagaaaaataggattgaaaatgggctttgagaattgggatggaagtgactaatgacaaattattagccacttcaaaagttaagttcattaaaaaaaaattattgggcattaaaaaaatgctaattagcaatttcccccccaaactttgacatatactaaatcatgcccactgaacttttttggccgttaaaaa

SEQ ID NO: 149400 - DNA, 674 bp, Cannabis sativa
aaacaccacccgtaacctcaactcgcacacacagccggcatccatctccattcagttcaccactgtagccactcagtcgacccaaatctgccagcatcaccattacatcctattcttgctagcgagaagcaaaagaagtcaagctgccacagagcgttgacaaaagtgagttggtaaaatttttaattgtttgttttttttggttaattggacaacttcttggctgccgagtagtaaatggaggtgtgcgggtgtgttaaatttgataactttgctaagtggagttttgaattggttttgaaattattagtgacaaatttatcatggctgccaagtagtggtggatctaatttgagtactattgatattgtgaggatatttggtgtgatattgggagttaattgccgtggctgattttattgtgtgaaattcttgtggtgtgaaattggaagtttggtgtgggggatactttgatgtggataaaattgatagttggaagtgttgaagtggttctgaaaattatttgtgtagttcataattggtggtgtggctttgcaattgttggtgtgatattggaattttgatgtgcttttgaacaatgaactgcttggtggtaactatttgatttgaattggaatttggtgtagtattggaagtgttgtggctcttggaca

SEQ ID NO: 149401 - DNA, 603 bp, Cannabis sativa
  modified_base (43)..(65): a, c, t, g, unknown or other
  modified_base (210)..(232): a, c, t, g, unknown or other
tttgcaactttcccattttgttagggaaatttacaaaaatacnnnnnnnnnnnnnnnnnnnnnnnaaaatactgtcacacggaaattttttcgaaaaaatcctgtgttattataaaacagcagtagaacacaaaacaaaacaactaaaaacaacaatagaacaactaaaaaacaacagtagaacaacagtgaaaacttaacatagtacannnnnnnnnnnnnnnnnnnnnnntttgaaaaaaattccgccccacagtagaatagtaaaaaagttaaaaatttcagtatgtggtgtaattatccctatatatattgatttttacttttatttattatatatattttaaaatatacatgctttcataaatgatgtcaccattacaccatttaggttaatgtaaattatgtgtcagacttagtcgagggtgagagtatattgagcaatgggaattatcgagaaaaaaaataaaaaaactcataaaagtagatacatttaatgaaatactagtatattgttacgtgcgatgcacgtatgctatgttttatattaagtattatattatgagttcggaaggaaataaatgaatcaaaaataaataatat

SEQ ID NO: 149402 - DNA, 576 bp, Cannabis sativa
agttacgaggtacttctacaagaaagtgaagaagaggctatttaacattggagacttggtgctaagacgagtatttgcgaatacgagagactcttctgaaggagtgtttaatccaaactgggagggtccttatgtaatcgaagttggaattagggtttacaaattaactcgacttaacagcttgctaataaagaactattggaacgtgtagtatttacgaccctactacctgtaaactgatgttgtaacttctatttctgatgtaatattttgaacttcaggtattaataaagttgaatcatttttcaagtaattataaagtgtcatcctttaaaagtagttgaggggcatatgtgtatgataaaccggaatctatctagaagtacgtgatatattgcaaacccactactttagaattttttaaaaaattttaaaattttttaatgtttttgattaaagaacctttcccacgagaaaggaaaatcaaaagtaacagttgtaaatgaaaaataactcataagaacaacattaagctacatgcaaagctgaacactaacgactcgcattttataggaa

SEQ ID NO: 149403 - DNA, 563 bp, Cannabis sativa
gagagagagagagagaatatggtttcagacttagagtgatttggaggctaggttaagattttgtgacttagcctttctaggttagagttaaggcctttatataggaagcctgaaaccctaatttacaatgaaacccttagatatttatatataaattgattaaatacaaaagactaaactaccccttgaaagcagatatttccatcagtttgctgggttgttaaggccgcgccaattcccaagtagcttgttgtccacgttttgggctacgcatagagtcttgctaggttagtcctagccacccatagacctataggggaggtctggccagccatgctcctaccaggacctggcaagtcatgtgtctgccacgatcctgcaggtcactatagctttaccaagaggaggccagctttgtacaccatttccttgtagaggccaaattcccttggtcgaatggaagctcccttggtccaaaagttactttttggccggtcagcttgtgcccagatcctgactggcctatttgctcactctggccagcctataggcttctcttcacc

SEQ ID NO: 149404 - DNA, 1078 bp, Cannabis sativa
atttgagggcttaatctgaggtaacaaccctaagcttgctctattatggatttatgatgttattggaaggttttgttaagtttagggttgattttgatgaatttggttatgtgttggtaaatttcgtttaaggttagtttccgtaggtctcaaatgatgttttaagattgcttgtactgtttttggtagtaatattttagtttgagcaagtttgagttcatgaagctcaaacttgactcaacaatggcatgtgtgagttttattgtgtttttcttgctactattgtgtgggaaatattctagaatgtgttttcaggtgttctggagagtatggttgcatttatggaagatttggacaagttgtgcaatttttggagtttgctggtgcaaaccggttgaccgattttacagggttcgtaaaatcaattaatcggtttacatgccaggaccctgaaattgtaacttttccaaatttgtgttattttccgagcatagtttggtttcccttagcatttatggtaatagtatattgaatatgtcattaagattacccttagttttgagctagggtttcgaaatagttattcaagtaatttacccaattgtgtaatgtgacttaggacctccgttcaactcgagaatttttcattcaagttgaccgacatgcttgaatctggaacgaggtaagatagcataaataatatatatatctgaatgtatgcttttagtagttgtttacactactaacactaatggaaatgtgattttaagggtgttagtacagtgtaggattttagagtagttacagtgttaccgacacgagtaccagggggtacgtcgtgcatgtggtacaacacttagtaactcatgggagtaagtgaaaactctaccaacacgagtacagagtttgtactttagtgcatatggtgcagtggtcatacttccattaagaacgttcttaaccatttggtgagctcggttgataacctcaggtcggcttaagcataaagccggtagagcattgctttcatatatgttatgcatatcttattgagtctgtcgactcatcagtttgctac

SEQ ID NO: 149405 - DNA, 563 bp, Cannabis sativa
gggttttgaaaaaaaaggtatagtttttttagggttttaattattggtttagaaatcaaattttttgattttctaagcatagaaaatcaaatttcccaattaaaatctttactatattcattctaaaataaaacctatatttctcaacataatcaaaatattttatccatcaaccatatactcatctcttgtcagttcgcatttgattgttggagccaatgtgcaacaccagtagtttttgatcctgacagatctttcggcaattggttggagactatttttaagcaagctaaagttgatatcatttatcttattgcaatgtatagctgggcaatctgaaaggctaagaacaaggttgtttagaaaaagaaacaatcctctgttaatgacgtgcttacttctgcacaagtaactcttgatcactggaataaagctcaggataaaatttcgttgtcatcaatctgtctggaaaacatcggtgatggcgttgagtcatggactaaaccagcagaaaacactatcaagattaatgtagatgcaacactctttgatagcgacaataa

SEQ ID NO: 149406 - DNA, 657 bp, Cannabis sativa
ttttttttttcaatttttttattcaatttttagtgcttaaattgatgaaatagattattatgttgcaattttgtgtgaaatctgttagttaaggttagatttaagataagacctgttagttaatagggttgaaatatgtatgagttttctgtcgaaaatgaattttttaggtccgtccaatggggcccgatgcccgtccgatgtgtgtccaaaggtacataaaattacttcatttttagggttctttgaagtcggtccgatgggggccgatgcccgtccgatgtgtatccgatggtacacacatttagctcaatttttgggattttgaaggtcgggcccgatgcccgtctgatgtgtgcccgatggtacacgattttaactcatttttgggctcctgaaggtcagcccgatgtgatgtaattggggggtaaaattgagttttactaaaaattatctcattttacaaatttcttaaagttttaaattagtggaccaattttagtctttattatgcataaaaattcaaatttccctttaaaaatgtcatattactttgtgtagtattagtgtatattttaggctaattaggatttttgccccttaaactttaacatgtaccaaatcatgccccgaccttaaacttttttggtcgttaaa

SEQ ID NO: 149407 - DNA, 609 bp, Cannabis sativa
tatttacgtctacggattatacgtcggttctgtagaccgacgcaaaatctttatatgtcacttataaaacgacgaaaatacccctttttgtagtagtgagatgttaaaaacttactttttagtaaatttaggtcctggtaaaatatattctgacagtgtcaactactcttttggagacaggtagtatcaaacaaccaagtagtatgtctcatattgatcaaactcttgtgacaaggtcagaatgaagtcgtggtaggagaacattgagaggaagatatgatgacagaagagacaatcacgctcattcacgctcttcaagggaagtggagtgctactattgtcacaaaaagggacatgttaggcagaattgtgaagagttgaccaagcatcttgaagtaatgaggaatcaagaagacatccgattccacaaatgttgctggtgaagactttgaaattgactctgatgttctctccatcatagctgatgaaaacttttctaactcttggattttgaattctggttgttcgttcaatatgtgcttgtataaggagtgctttgacacttataaggcatatgatggttgtactgttttgatgggcaatgattct

SEQ ID NO: 149408 - DNA, 768 bp, Cannabis sativa
aagaccaagaggagaaagaacttggctcttgctattgataacattaaccaacaagagacagtccgattccataaccaccgctgtaggacgaaattcttcaacaacacctcctccttcccaatttaatttaacccaactcaaagcccccttcattgacaaagcctcagcaacaacagggtcgacttctccccgaagcttgacggcagcagcagcaaagcacaagccagcatgatctctagcaatccatcccaatccatgactcctctcacttgaaaaaagagcagcatcacaattaaccttcaactctctcaaagacgatttagaagaagatgaaactcctccatttttaatttgagcaaacttccaaagttcaaggtacgtaattgcatatgacacaactttttccacacaaatagccttattattctaaattaaatcattacgggcccccccaaacaccccaaagaatcattgccaacttatcaatcttctcggccagatgattgttacagaaatcctcaaaccaggcaccaaaatcctcactcccattattgttatgcagacccaaaccccgctccaaacatgctttcgtaaaagagcaaccagccatgatatgaaaggtggttttgggttcaaaattgcacaaagaacaaatactgtaaacatgaacctacttagtctgaagagagactagagttggaagacagttggtgagagccctccaaagcaaattctaacttttggaggaagattcaaatactaaaattt

SEQ ID NO: 149409 - DNA, 572 bp, Cannabis sativa
agggcttggacaaaacccgtattcggtgtttggatttggtgcacatcctggacccaaaccctaacaaggacccgaaaccagacccaaaccataacaaaaattagacctatatccagaaccgtaacaggacgaggacccagactacaaatcagacctagacttgaattgggagccggagccggatcccaacccaaacttggactcgggagccaaacccgaacctgaactctgaccaaaacatggaaccagactagggacacgatacaagggtcgggacatagaactgcgccccaatctcgatcccgaacccaaactcagaaatgggatctgcgaccttaaccagaaccagatcgagacccgtgacagtgatccagatcttgactcatgattcgggtaacgaggcctggaacagacaagtagtcgatgtctagatctgggactcagactaaaaccagaaccgacacgaagaaccaaacccgaaccctgacctagacctgggacccaaaattagaacctgaacaagaatctacgaaccaggaccctagaacaagtctaggaccgtgacaaggacc

SEQ ID NO: 149410 - DNA, 1072 bp, Cannabis sativa
  modified_base (83)..(95): a, c, t, g, unknown or other
  modified_base (739)..(740): a, c, t, g, unknown or other
gagaaacttagagtgttatgggaatctgtttgcaatcgaggatgagtctagggatttagactagttcccttggatatcagtgnnnnnnnnnnnnncggatatgtttccagaggatttactagtgttaccacctgagtgggagatcgagttttgcattgatttaattcccggagctcaaccagtttctattgcaccttaccacatggcacctgcagagttgcttgaattgtaaatacaattaagggagttaatagataagggttacatcagacatagtacttctccatggggagctccagtcttgtttgctaagaaagctgatggaactttgcgattttgtgtcgactatagaaagttgaatcagatgacaattaaaaacaaatatcctttaccgaggattgatgaactatttcatcaacttggtggttcaagttctttcaaagattgacttgaggtctggctaccaccaattgaggattagggaagaagatatccctaagactactttcaggacacgttatggacactttgagtttttggtgatgacgtttgggttaacgaatgcacctgctacatttatggatctcatgaatagaatatttagacctttcttggataagtttgtggtggtattcattgatgatatctttgtgtattttaggacacgtgaggatcatgctgaacacttgacaatatagtattacagacattgagagatcatcgattatatgctaagaannagaagtgtgacttctggatgacagaagtcaagttcttgagccatgtaatttctaaagttggtatcattattgatcctacaaagatagactctaatctatagtgggaaagaccaaagaatatcaatgaagtccaaagttatcttgggttagcaggctactatcgccgctttgtggagaatttctctcagatttctatgcctttgacaaagttaacaagaaaggaagtaaagtttgtgtgggatgatagttgtgaggaagttttcaaagaattgaaggaaagattaacttcggcgcatgttctcagtgttcctaatagtgaggaaccatatgtg

SEQ ID NO: 149411 - DNA, 530 bp, Cannabis sativa
  modified_base (176)..(195): a, c, t, g, unknown or other
aacctgtcatgtcatgtggtacattatacttttcttacctcaagtttcggatcaggtatgttggccgacctgcttgaagaacgatcgataatctcggggtccttgatacttctcttgaatctacaaagagtttctcccaaagctattacttgattctttattattattattattannnnnnnnnnnnnnnnnnnnattattataataataataataaaatttatttaataaaagaatattttattatttcttagccattaagaaatttatacttctaggacactaggccaaatttcacatactcttaattaccccaatacctacattatcaacttatcacaatattcctaataattctatcaattaagtctgttatgacatttctggtccccgattgattctccaaggtcgccaaacttgatttttttttttattctatatatagttcatattacattcatacatactatataaatctccgtaatttaaaaattacgcttatttatccacttatagcaaatttaaaattt

SEQ ID NO: 149412 - DNA, 558 bp, Cannabis sativa
  modified_base (504)..(505): a, c, t, g, unknown or other
aaaaaaaaaagaagaacccttgaaaagaaatcttgactgttttctggctaaaacacgccctgaaaaagattctgagggaggcccaggataattttactcgcagcgattacgccgggaatgtttgggattcaaatctggatcctttgactgactggttcaaccgcttctttggacctaccctggctccctttgcctcaaaattgatgaccactttgctgttggcctagttcagctccccatgaagagatacgcagcatgtgcttctaccaatcaggtctaccaaatccaggacgtgagtgcggccatgattgcggtaagttcccatctgttagagattttcaagcttctttcgatgcttgatatcacacactcatatatattttttttgttgtcagattgttgcagagaccggtcgtctctcgaagactttgattgaccatggatacaccatgtctgaatttgcgggcatggaggaggccatgaagatgttggaaattattttannaggatctagatttactactaagtatgtttgattaacatcctactatgaattct

SEQ ID NO: 149413 - DNA, 853 bp, Cannabis sativa
  modified_base (425)..(427): a, c, t, g, unknown or other
tcaagcgtatggccaacaaggggaattatagggtttttccttgaatttgatttttgggttggggtgtttttcaaagctttgattagggtattttagtgatatttatgttatttctatctagtggggagtttgagttgttcggttatggaattagggtttaatctagagtttagataaattatttatcgaatttcattgtcgtgacataggacccaggatcttcgagcatagttccactcaggttagcatgcacacctgatattggattgaggtaagaaaagttattttcactaccaagcatgttaagtgagaacaattatcaacgtttatgactcgattatgattgaggtaaagatacagtcattaccatttattgcgtaagagtaattactgttagaaatattttactaggatcttagatttannnacaagtatgttgtttaacatcttaaacatgaacttctaaaacgattataaataaaaaacatgtaaagtatgagaaaccttacattggctgcagcggaataatatgtctcctttcactcagatttctaacccctgtatcctttctgtcgcagagtatcaccaagatctgagtctgaatgtccttctgttgaatcgggattcttcacgatcttccacactatgattgaggtactacttgttgtgtgtggggcactactctatcactcaaggggttcgaatcaactatgaagaagacggaaagagaggtggcggctaggtcaggtagacggcactcaggttttctctaaaaggaataagatgcatcatcgtttcctgaagccatcactacctatttatagtatgccacctagggttaggtttgaattat

SEQ ID NO: 149414 - DNA, 547 bp, Cannabis sativa
tctctctccctctctctctctcacacacacacacacacatcaagcacatcttgtgactaaagtctaaacaactgtatggatttgtaaaaaaaaaataaagaagaagatgaacatgaaagagagatgaaaagcttaaaaataaaggtgatgatgaaaaaaaatatgaaacgatgaaataacaaatgagggggtaacgtgtgattacaaaacaaataataatacattaagttttttttattttatttgttattttttttaaaaaaaaaaagtaaattgtcatgatttgaccatgaacattacattagaaatgtttttaaaaaattaattaataaaaaaaaaagaaatacataagggcatgcaaaataagacgtggcattatgggtacaataaaaatttcatactttttaaaaaaagaaagtataaatcgtacagtatgtaatttctaacgtgtaccagtataaaaatggggtaaattgaaaaatgcttcttttattaatcaattaactaaatttgtctctaattttatatttatttgaaacatacctct

SEQ ID NO: 149415 - DNA, 548 bp, Cannabis sativa
aggtttgtgctgaaaagatattttatgatggactgagatctttgagaccatttttgacaatgatttcatcattttatcgaagagcttatgaaacccaaaatgacagagctcgttaccagctttccaaaacatgttaaattatctcatttggagtctgaacgcaaaagttatgcatgatttactgagcaaggtcgaagtagaaaaaattagtgttgtgcgctatagcgccgagggtctgcgctatagcgcccggccggaaaaaaaagattttttacgaaaaaaaagataatttcagcacgggttcagaattttttctcttcggcgctatagcgtggggcacctatcatttttttaaaaaaattcctaattctgttaattctatttttgacatatttaattgacaaaaatattttattatttattattattttcaactggtatgttcaatttagtttccttacattgtgtatccaaacttggaaggaaagttatctagctttcctatttttggaaaaaaatgtaaaaatggtaagtttggttactcattt

SEQ ID NO: 149416 - DNA, 609 bp, Cannabis sativa
attgggccctaaaagcccaacaaaatggctaaataatatctagaatcaatggcactttgacattttgtaaatatctaacaaactatacgaatactaagggatttaaattgtaaaattagggttttaggcctcttatacaaaggccataacctcaagctaaaaacctaagttgcttctaagctagaaacttgcttctaaacactaagtgtctaataaactatatgttcctcactttccctctctcactcgcctaccctagcacatctcaatacttgagttttgccagtactgattcataccttgtaatcctaagggtgctatagcagatcccacctatagtaatctaaataatgtttctcttggtataatacaactaaaagggaagtaggtcattacccgctatcataaaggggtcgaacctctataacaaatcttattgtctattgcttttcattcatatttttgcaaacacgtggcaagtatcagatttgtacgaccccgttgttggttgattactttttgaggtcaacaaaaatgatttttcttaagatctaaattaatttcttaagatttactaaaaaaaatttaaatctttcttatttttatttt

SEQ ID NO: 149417 - DNA, 550 bp, Cannabis sativa
gcaggagtatccactcgccttgttttattaacagctttcgtctccaccattttgcctttacgcttgcggtctaggggatggatgatctctccttcttcctcttcctcgtcaatgagaacaacttggtcctcaagaatgccaacagaagatctcttgcgagtcactactatctcgcgtgactcggacaagctagcctcaggactgtaggtataggcaagggcatcaaggaggtcctccattggcttcgctgcttaaggaaatcaacaaaggagtcatagcattgccaaaaaaacatgtatgaagaataacacgatgagactaatcctaccatggcgatttaattctgccctagcaaaggtatatattaaaaggctggtgtcgtcgtcacgtagaaagctatccgaggggaggaaccaactggaggacacataggcggagttatacaggaggatgggtacgggaggatcggaacccatctgggatcggcctaaaaaatgactaaggttggaaaaataaaaacttttggcgttataaccccatcgtgaatggg

SEQ ID NO: 149418 - DNA, 581 bp, Cannabis sativa
  modified_base (70)..(75): a, c, t, g, unknown or other
aagcccctacagtgcatacttttgcatattctgatcaatcatccatacttccgtgtccattccattgttnnnnnnaaccaagttgttgcatcaatggttatggtgataccgtaggcgatcaatctagtaatttcgcatattgtgatcaatcatccacgctttgttaaggtgagcatgaacaccttatgttgcgttcaacaactatctaaaaccagtgggttttaaggataggtttcttccaccagctagtaggcagcgaatccttagagaaccttccatgtctatttggataatgaaagcccctatattgcgtacttttgcatattctgatcaatcctccatacttccgtgtccaatccattgttcgatataacaaagttgttgcatcattggttatgctgatctcgtagccgatcaatctaatattttcacatattgtgatcaatcatccaccctttgttaaggtgagcatgaatagcttatgttgcgctcaacaactatcaacacctaaacgatttttatatcctaaacaagtgggcgttaaggataggtttcttccattagctagtagggccagcgaa

SEQ ID NO: 149419 - DNA, 548 bp, Cannabis sativa
gtcaggggtgttgcaacccaaaatggtggaagctttgggtgttaaagaggcactgagttggtttaaacggaaagattggaggaaggttatcattgaaaccgatagtattactgtggtgcaagcgttacgtatctctattcttatggtttcatactttgggagtattatttctgattgtaagatgttgttaaatgacttgtacatgtctagcactataattttagtactggtaaaattaaatattagattttaaataatttaatttagttatatttacggcaaaatttttataatattttcagttattacacatatgattttaatcaaaaaaagtaatagcaaaactacattatccttctattttgttgtagccgtacccttaagtgataattaagtccaatgagtaccaactcaaaaaatatgtagcaatatattattcgatattaaaaacctgtatttttcccattttttttcctgcattagttttataattttacttaaattgaaataaaacaactaattaattttattacaataacaactaactt

SEQ ID NO: 149420 - DNA, 927 bp, Cannabis sativa
  modified_base (519)..(524): a, c, t, g, unknown or other
  modified_base (697)..(703): a, c, t, g, unknown or other
  modified_base (867)..(887): a, c, t, g, unknown or other
gaaaaatctccacttaccttttccaacggttcccatagttcaccctcttctaaactgttgggaatagccctttttgtagtagtgttaaaaataaattgatagttaaaagggttttgccgcaaattactcatatatttatacccagcactaacattaattaattaatttaaaattttacgaaaaaaagatatgaccttatacgtactcagaaaatttataaacataaattatgttgtgcatttttccgcaaataaattttaaacctttgaaaataaaatgtgcactttttcaccgtaattgttttcatttactgcaaggactgacccatgggtggagcatactgggccctagcccaaaggctacatcctggcccaagaattttctcaaaaggctcctcatatatttttcaaaatactatttttaaatgtttgtcaccatacattaaaataataaagtattttgaaggaaatagtaaaaggataattagataaagcactattttttaaaaaaaaaattatnnnnnnacgtttaaagaattttttttttacatttttacaattttctacggaaacaatacgaaaagaacaagaaaactacataaaagtaacaagaaaataacacctaaataacaaaaaattaataagtttacaacataaaaaagatcgtattttctgtaaataaaataaaaaaaattatnnnnnnntttaaaattctgtaaaactgtatttttgcaatttttttgttatttttgtgtatttgtaaaataattacaataataaaattattttaaaaagataatttgtgattttctaaaattgctatagttttattttaggaataattacataaggcactattttttgtaannnnnnnnnnnnnnnnnnnnnaaagaatgtttttttacatttttacggttttccaaaaaat

SEQ ID NO: 149421 - DNA, 586 bp, Cannabis sativa
  modified_base (54)..(59): a, c, t, g, unknown or other
  modified_base (379)..(385): a, c, t, g, unknown or other
ttttataaaaataatttcttttaacaaagcaatttaaaatactacatataatannnnnnaaacttcttaataaataatttcaaataataattaagaaatttgagcatttagtttttaataaataaaattattaataataacatgaaaaaggataatatatttataattttactatatattagaattatatttttaagtaagtattttttataatactaaaaataaattaaattagccgcgcgaagagcggctatattgcctagtatttatataaaggagaagtataagacggtgacgtggcggtctaaaatctctttaaagctattttaattttttctccttaattttctcaattttttaatattttactattattttnnnnnnntttctataaaaatatctatcttaaattaattatttttttaaaaacacaccataataactataaattaataatattaaaataaaataattattcaattatatatatatatatgcattcataactataaaggaaaaatatttttttatagtaaaaatttattatgaattgaacaaaaaaaaaaagaaaataggtgtgagatta

SEQ ID NO: 149422 - DNA, 655 bp, Cannabis sativa
gctagaagaatggccaataattccctttcaagaatcccagagacagtatgaaattcagaagtcacctaggaatcacccacattcggttcagcaacttccacaaccgccacaccagcagcatcatcaagagtagaagcatcacagtgaaagcattgcatgtcatccaggttctccacaaccgggacatggagatcaacccaatcagccacttccagaggaacatctctcaactccatctccttaactctgtttcgaatgtccttaatcaatcccattaaagagaaggtgcaacctttaaaaattaccttattcctccaatgccagaccgtttcacagagacaagcagcaaacagttgaaggtcctcatccctcacttgagaccaccaatctccaaaatccatgatggtatcccattaaaaatctccaatcgaatgccccatcgactctgaaaccaagccgctcgaacaacactgcaggaaccaaacagatgaagaacagattctgaagccacatgacagagggaacaagtgttatcaaccaatcccaaacgctgtttcgaaggcagagaatcggaccacgtttatatgttaactttatcgaatgccctaagtaaatggactagattgctaaaataaattttgacataagtaaattt

SEQ ID NO: 149423 - DNA, 1373 bp, Cannabis sativa
tcctggtaaaataaattccaaaagttcgggcatacctctcccgagctttgcccgaatgtctagctatatgcgggcgtccagtgatgacttgcagatgtccatctattggtggaggtagcaagtcttggttgttatcacccctctgattctgatcggccttgacatacttctgtacatgcgggttatttttccttatcaagaattcaatttcttgcttcagattgttgcattcattggtgtcgtggccgtagtctccatgaaatcgacaaaacttggttatgtctctcttgctgacatcttttttcatgggcgcgggcttcttgtacggggctagtgactgagtggccatgtaaacactttgatttgccatggtttttctcaccttcttctcgctgaatagcctcttcaagtttgagaaagcgttcagcacggtcgagaagatcactcattaagtctacctgagcgttcttccttatgtccttccagagctcaccaaggacttcaatgccccccaaaactgcggacaactttctatcttctgttactcgtgaaaccttagtcgcttccgtcatgaatctgctgatgtatgctcggagaggctcgcctggtctttgcttgacttcaaccagatctcccagatgtaacaaaagctggcgagaggaagaaaattgtgcatggaaatttgaagagaaagctttccatgaattgaactttccaggtgccagcttgaaataccattactgggcggcttctgggagggtggaaggaaaaattctgcaacataggtatcctcgtacttcttgcagatccatttgcatctcaaaatacttaaggtgggataatggatctcccttacccgtgtacatcttccaggttggcattttaaacttgtggggtaactccagaagattgatctcatggaagaaaggggttccacatgctcggttcaactcgagatcgttattcctttgactggccatgccttggaacatactttttagttcgtctagctgtgcctggacaactggactaacttgtttggcatttgggccaatttgagtcacatcagcatctttttgagcaggaatttgaacacgggttctgggctgcacgagcggcgtgtcaagctgattgtccactcctctcctcctattcagatcgtttctgagatcatgagtagtccccaatctatcaaatacggaaacgcctggttgtctcagcgactagttggtttggccaatgtgctgaccgacaccattaatctggttggaattgttaggcatgatttctcctgatgaattactagacaaagtctacccacctaccactgggcccacaggcggaacatatgaccggggatttgacggctgacc

SEQ ID NO: 149424 - DNA, 517 bp, Cannabis sativa
ggtaaaggacatgaatatggtggcctgtatgttcttgatccattattctcaacccctattgcttgtccaagtgtcgcttctgcttttgaggctcattgtcatttgggccattcatcccttcctttgttcaagaagttttgtccccaatattgtaaggtattttcgttagattgtgagtcatgtcagtttgtcaaacatcatcgtgttagtttgactcgttgagtcaataaacgtgcaagcatgttagcgttccttttgagttagttcattttaatatttggggtcctccaattttgtctaaacctagattcaagcattttgttacttttgtagatgattattctcgtgtaacttggttatattcaatgaataattgctctgagttgttttttatattttatgcctttcgtgctgagattcaaaatcaatttaagtgtctgttcatactttgcgaagtgataatgctaaggaatacacatctgctcaatttcaatcttatatgatctctaatggcatg

SEQ ID NO: 149425 - DNA, 652 bp, Cannabis sativa
cgcccgttaccaatgttcaaacaattattggagatgacactgaaatccagaaccttcgtgctactcttggagtcatgcagggtcataccaacaccctgcataatgatcaggaggaactccgtgctgcgctgaatctcgcgtttgaagtgcagaggcgcatgttcgttcaatggagagataaggagatggaaacgttaagggctcagcaagtagtcatcaccgatagtagtcggcaggccactgtgttgatacaaaaagcctatcagactaccggacaacagcctgtaaccatcatccccttgggcgagaccgacgaagatccagcgatgaacacctctcagactattaatggtcagctgcccaatccacggtcacaggttacacctgtgggccaagtggtaggcgggcagaccttgtctagtaattcatcagaagaagtcatacccaataattccaaccaagttaatggtcccagttagcaaatcggccaaaccaatcagtcactgaggcagccaggtgtttctatatttgatagattggggtaaactcatgatctcagaaatgatctaaataggaggagaggattggacgaccagcttgacgcgccaatcgtgtagcccggaacccatgcttaaaatcccgctcaaagaga

SEQ ID NO: 149426 - DNA, 561 bp, Cannabis sativa
acttttacactaaataatgtaaaaccaactaaaagcaattcaaaaattataagtaatataaagcaaaataaactaatcaattcaagagaaaaattattatccttaattttggagtttagaaataatattttaagctaaataaacaaaaattaagaagccaaaagtaattaaagttgtgaaaatttaagattttagaaaatagatttggatggttaattttcccctggtatgctctagttgttacagcaatgagttagcaatggcctagcaatcctatccgagttaacagaattcacaaatacccagcaagtttttcccaaaacctgtaatatgccattcataacctcagcaatgtattcctacactaaatcaggtcacaaacagtccaatatatagcatcaaatctttagttatacaaggtagcaaaatatacctatccccactactaattaatacctcaaagataggtaaaaatcatgcatcaattagatgggttctgttggaattattttaccaggatcttagatttactaacaattgtatgttatttaacatcctaaa

SEQ ID NO: 149427 - DNA, 501 bp, Cannabis sativa
aaaataatttccaacagtatctcctacaatacctgctttgcatgcccagtagggggaatcacatcatccatgggagtgtccctatcacgaacactagatttgttgattgtggttcttgtggctaccattgttgcagttcacaacttttgtatcaaatctttttttagctttcaatgaaagtatcaaaatatttaccgagatttttgaaagtcaatatgaaatataataaagttaaagaaaaaaaatatatagagatttggacgataatttttacgtggttcgagtattaacaaacactaatccacgagtaaatattattatatggttggaaaagcttatttaatttacatagtgttttgtcaagattctaaaccctagaacttgcctaagttctcaaatctcgagattatatccctttgcatgaatgaattttcttatatttatggtccaagggttttcgtatgcaggggcggagccaggacttaaatgctaggggggcca

SEQ ID NO: 149428 - DNA, 628 bp, Cannabis sativa
ggatatttgttatggataaatcatagatgcgtgaggagagagacacactgcgatttcaagtagggtttgatcgatttttagagtttttcttaaagaattctaaaaatcctgaacgtattcattgtctgtgtgtagattgttgtaatggatctaaaggaaatattacaatgattaaggaccatgtgtatttacgaggtttcaatagaagttatactacttagtatttgtatgacgaacatttagttgatgatcaatatctattaggaaagcggggatagatgatatcaagagtaatgatttcgatgatcatccattggacttgcttaatgaagcacaggaggaatttcttaatgatcctgaaaaattcgataattttctaagtgatgcagattaaccactgttcgatggttgtataaaactaagattaccaacaatggttaagttttacaatatcaaagcagaaattggagtgagggataaatgttttactcaatttttagctgtttttaaagatatcttactatttggcatctgcttatcggaatctacatatgaagtgaaaaaaaactttaaattctataggattgaagtatgaaaaaattcatgcatgtctgaacgattgcatttt

SEQ ID NO: 149429 - DNA, 641 bp, Cannabis sativa
aagagaatttgagaacatcaaattggacatagttgactatgcgaatccggttgctgaagaaattgtagaaaaacttgaaaacaacagtaaaaaactagatccaggaatcgatatcaacaacgtgaagctagaacagacaaacaccacctaaaagttgaaaaaggtcaggcatacaaagacaaggaaacactgaagaatgtcctcagctactacgcaatcaaaaacaacttccaatacaatttttgaaaacatatttaattgggtttcagaaagaaattttttaatatattcaataacagagtaataaccagaggttataactctggaatggtagtattccgatcgggtgtacttgaattcccaatcctataaaaaacataagaaaacacttcaaaacaaaactaaaacaatacaaaaaaaataaagaatataaaaaacaagcataaaaaaacatcaaaactaaaataatgaaatcacacaccttaacaatcctttcccaattatgttctcaaacagatcaattggttgaacaatctccactggaaatttaccctttccttaagagttaacaaaacaaaaccaaaacaacaacaaaacacagagtcaaactaacagaaaaccataaaataggaggactaaca

SEQ ID NO: 149430 - DNA, 1009 bp, Cannabis sativa
tggtgatgagatattttattttaaaagctaaccgtgtagaaattttattaaaccaagggtcctttgatattagttattttcctacagggctttatgagctcacccctattttctttcctcacaggaactcaatttgatgctagtggatgaggatggtatcgttgaggaaaaaagtcgttattagtttagtcttattctacttattaaacttctaatgaaattgattttgtatttaagctggaatggatggtttggataacttaaactagctatgtaccagctaaaaatggggaatgatggatgctagatattattttggtatttaattaacttattaaatctatctattcagtgagtacacaactgtggggatattattgttcttttatattaatgagtggtcctaattttattattaattatttcttttcgatataggagttaatccattatttttaaataaatattttgtgatataaattaaaggatcatttataagtgttatcttccttcaagggtcaaagtgtgacctttgaccacccaagttatggatattacatatctgccacagcttagggcttgagttgtgacaaaataatggtatcagagcaccaaatttaattacctcagaatgtgtcaccaaattgtttaaatttatttaaaataataatagcaataaatatttcaatctttatgtgtatcagacatatttatattattagaattcaaccctcacttactgattagcttttggttcttagacctaagaaaatacctctaagaggaaagaagacaaggagaacagttggagagacgcccctcaagctaatgtctaacctccacaagttgaattccctatgaacgctcttctcgaaaccttaatagcagtttctgctcaacatataaatcctgccactcgatagagtcatcgttttcaaatctttcatcggattcaagtgcctcagtttgagggtggacaagattccactgtagctgaaaggtggttgag

SEQ ID NO: 149431 - DNA, 922 bp, Cannabis sativa
  modified_base (780)..(790): a, c, t, g, unknown or other
aaaacagagttacaaaagtttcaaaactggtagagcccaacccgcttggtctagtgtggccgaacatgtacattcattgtccagctcttacactcatggctgattaaaaaccgatttaccctttcctgcacagtagagcacccttgagccaagcccagaaggacaatataattatcaataatcataattaacacatcacataaatattaatgccatttcatatttgtctgtaagacacagacccgcgtgttacactgacacgcctatttatgtctatatagcatagacctacgtgttacgctcacacgtctatttacagtaaggccttagaacagttcatctcggttctagttactgagtccaacccgattatgccttgaacacataaccctttacttcaatatacatctatatacatcatggcataacaattcacttgggtaataaccctaagccaataaaccgctcactttagagtaataactctaatctcggtttctagtttctcatataaatcacattctatataagcgccattgcgcatatctctacgtgctaactactgtattacctgatgtcccgcaaatatggagattccaaatccccgggtgctcctgaccaagtgccggtaatcctagtcacaattccgagatacataagtatagggttaatcccaaaatccatttccacaaattataaactgggcatttaaattctagatattcacatagagctcggaacgagcttttccaaccatataaagaacgtcccaaacggagnnnnnnnnnnnaagttatgaccaaaacaaaaacccgaaaaaaatacaataagctgccaaaaatggtcacggctacttggtttaaaaacccaggaaaccctgtttccagccacgaaaattcatccaaaaataccaatttttatg

SEQ ID NO: 149432 - DNA, 587 bp, Cannabis sativa
  modified_base (41)..(46): a, c, t, g, unknown or other
  modified_base (275)..(291): a, c, t, g, unknown or other
  modified_base (498)..(498): a, c, t, g, unknown or other
cggcgtcacaaccatcaactggtggttacgttggttgattnnnnnngtttgaaagctgtctgaactaacttcattgttgtagtgatgtcttgctgacactcatatgaaatcagtctgtgtcacaaccctccgatgggattgcagcgcgtgttcacgttgggtgattgaggttgtttgaagcccatcttgaccgacttcattgtcagaaggatgggggacacttgtctaaaatcaagcgccgtcacaatcgtcaactgggtggttaagttggttgnnnnnnnnnnnnnnnnngctgtccgaaccgacttcgctgtctgagtgatgcattgcttacactcatttgaaatcattctgcgtcaccaccctccgatgggatttcggccggcgttcacgttgggttattgagtatgtttgaaagccatcttcaccgacttcattgccagaaggatgggggacactcgtctaaaatcatgtagcgtcacaaccatcaactgggtngttacgtttgttgattgaggatgtctgaaatttttccgaaacgacttcactaacggtgtgatgtattgctgacactcattggaaatcat

SEQ ID NO: 149433 - DNA, 699 bp, Cannabis sativa
  modified_base (604)..(641): a, c, t, g, unknown or other
tcttcaaggaatgtggcatttgtaaaaataaacactttattatccttgtgactataaaatagtccacccctagtctccttagacttttcgacaaacatgcaaacttcatttcgcacttatagtttgccttctttctctcttaagacatgagcaggcgaccattcgatagttctacatgtatcttaggaactgctttagatggaacaatatttaaaatgtcattagccatctgaatagcatgtccccagaaggacgtttacagggttgaatagctcagcatagacctaaccatttttaaaagtgtgcaatttcttctctctgcaactctattttgctgtggagagccaggggcagtataacacatcaattctaactgttttttatggaacaacatttaaaatgtcattagccatctgaatagcatatccccagattgatgttgacagggttgaatagctcagcatagacctaactatttctaaaagtgtacaatttcttctctctgcaactccattttgccgtggagtgtcaggggcagtataacaaatcaattctatccgttttttatttttactgcatatgataatgataataataataatannnnnnnnnnnnnnnnnnnnnnnnnnnnnnnnnnnnnnaataataataataatatatttaaaattaaaatatttaaaatatatcttaactagaatt

SEQ ID NO: 149434 - DNA, 506 bp, Cannabis sativa
gctgcgatggtgctgaaatccttcacaaacctcctataaaaactagcaaggccatgaaaacttcaaacatgacctatagttgagggggttggcaattctttgatggattttatcttttcttcgtcaaccgcaatacctgtagcactcacaacaaatcctaggaaaccaatcttatcggtacaaaaagtacatttactaaggttagcgtatagtttttgtcttcgaagcacatccaaaattgattgcaaatgtgaagcatgatcatgcaaacttttacaataaattagaatatcatcaaaatacacaacaacatattttccaatgaaagcacgcaaaacatgattcattaatcgcatgaaagtactaggtgcattagttagtccaaaaggcatgactaaccattcatacaatccatgtacagttttaaatgcagttttccactcatctccttctttcatacgtatttgatgatacccactctaaagatcaatcttagaaaacacaca

SEQ ID NO: 149435 - DNA, 1006 bp, Cannabis sativa
ttcccaaaatacccttagtaccccttttatgttgttttagtgtggatgggcaaaatagtcattttaccccatatgtagtttgttctttaatggactatgttatacttagtaaatgtgaattttaattaattcttggctgatcattttagttaaaccaactcatgttatttcattttacaaaaaattagaaaagtaaggaaaaatcctcaagctctctctctctctctcgatttttcttggggctgctagggttggattttgccccagtaattcaaatctttttcagctgattgttagtaaatccaagccaaggtatagctcttgcacctcctttgtgttttcttgaagtttaagaaatgtgtatttttgcatgcttggtgattatgttgctatggctgctgttaatgttttatgttgttttctaaagcttaattgtgtttagatatgtagatttaagcaggttctagtggttgttggttggttttattcaaatttagagtttaaactcaaactttggtttttaatggtgaaatggtgatttagttgctgtggttgttgtttgtgtttgggtttgttttctgatgttggattatgttttatttaagttgtttttagttgatctgggggcttgtggtgagagttgttcaaagtttgagcttatgagctcaagctttgctctcacatggcaaatcttgtttctgagcttgtagcagggttttgttgctttgtatatgttctttgggttctttggagcaggtctggagagtttgatatggtttggggttgatttggtgaagatatgaattttttggtcattcttgcactgaatcgaaattccggttcagagaggcctgtaagaatcggaattccggttggcttacaagaatttttcccaaaaccagaatttcagttggggaaccagtttatcggttggggcaattttggaaaccctagttttttccatttttgtgttatttagggtattgccatgttattcatggatagg

SEQ ID NO: 149436 - DNA, 521 bp, Cannabis sativa
  modified_base (460)..(471): a, c, t, g, unknown or other
atcattaagttttgggtgcctaatttatgagaggtcatttagtcaataccactcataaatcattattatgctaaaacttcacttattttttttttatcttatgatttaatgtattgaaatgaaaatgacattatttatgatatttttaaaatactttatttatttgattgggtgggtgaagaaacaatcttagctaacttaatttgattagtacttgaggcactatcaaataaataactaaataaacaaattataaacaatgccaaataaaataaaaaataattttatataagtataactatatatacataggagaattctctatatatatttggcacacagtcaaaaagctaaattatagctcaattatatcatagtatatttatatagttattataatagattatgtaaaaatcagtaatactaaatttatcttgttgtcttattattattattattnnnnnnnnnnnnattattattattattattggaagaggtttcaatggttacatttttattgt

SEQ ID NO: 149437 - DNA, 693 bp, Cannabis sativa
tggccaaaagcttcctctgctgagacatccgtccagctcccccaatacccaagcaattcaagctcaggcggtaaacagtccaacaacaataataggcaaaaaaacaggaaaaagggaaaattcgctggaaaaaccgaacaagcccccaaggagaattccaccaagtttactgcattttctgtattgacagaggatatagaaagtgtgtacatggctactcaatcattagccttgtacaagaagcccgcacccatgaagaaagatgtaagcaaaagagagatgactaagttttgttattttcatggggattacggccatgacactaatgatgcaacaatctgaagcgggaaattgaatttatgataagaaaaaacaatctgcacgtacagaagtatgtcaaggccgatcaaaatcagaggggtaataacatccaagatttactaccaccaccggttgatggacatctgcaagtcattattggaggtccgtatattgttggagatttaggcaaagcccgggagaggtatgctcgaacagtacatcatgagaaaaaagaagtagttctagccgtcgaggaaattaaactgaacatcccacgggcaagagagcccaccataacattcaatgatgaagatgctatcaatatcagcttcccgcacaacgatccgttggtcttggaagtccagatagcca

SEQ ID NO: 149438 - DNA, 1133 bp, Cannabis sativa
ggcacaaaacccaacacaaacaacatacaaatctctcaaattatcacaatcacaccaacatgcattaagaacataattactagcaaaacatgcattaacacctttaatttacagcagtaaaataaaaaaggaaagaggtagaagctacctcaagctctttcacaaaatttaagcaccaacttcttcaaaaatcaagcttatccgaaggtgaattttcaaaatttaacaaagcttgaggaaatgagataaagagagattgaggggattggtttaggctgatcaaaaccagaaaattctttctctattttgtcaaaaattctatttattgcaaataaaacaaatagtcaaaatacccaaaatgcccctagggccataatatagcatatgcacaactcaagggcataaatgtcattcaaccacacaccacacttaaataattttcagaatattcaattatcaataaaattccaatacaaaatcctgaaatacctgattgtgactatatcgtgtcgacttgtcagaaaatacctgcagaaggataaaacaagtatactatataataatataatataaacacacaataatattaaaattacagttttacccttctcatgtcaaaattatagaaatgcccttagctcaccaacggggtcttaacatatcatttatcagtaaaattcacatatatttaactatataataatataatatcatataaatacacatttaactagttagggttcgctaatccattttcttaatcttagggtattacaattatcccctccttatagaaatttcatctctaaatttacctgaacaactctagatatttctgctgcatatccatctcgagttcccaggttgcctcttctaccttactgtttctccataatacttttattagtgcaattttcttgtttctcaagattttttctcttttatcaagtacttgcactggttgttccttgtatgatagatctggctaatgttccaatgcttcataactcagaatatgggacggttcttagacatacttctgaagcatcaaaacgtgaaacacatcatgtacagctgccagtgctgggggcatagccaacctgtacgctactttccctatcctctcaaggatt

SEQ ID NO: 149439 - DNA, 1105 bp, Cannabis sativa
  modified_base (830)..(849): a, c, t, g, unknown or other
ttctttcatttctctttgactagttcggattttaatgctttttctgcatagacgggtgtgaagatggcctacgcctactcccgagctaagtcggctgctgttaagaaccttgctacttccaatacaatgcgaagagaagtggacttggccaaaaaggatgttgaggatgcacggactcaacttgagaccgtgcaaatagaactcggagaggtcaataaaaaaattcctgctattgaggccagagttatcgagctgaccagggaactgcaggagatgccatcaaccgagcaactcaaggcagataatgcttctttgtctcaggtcattgccagtctccaagatgaaagagagggtctctggactcttcttcgtaggttggaagatatgcttaaggacaaaaagaccaaggaaaaggaacttgagactgaggtggagaagctcgggaagaaagtggatgccttagagacagctggtctcgagattttttatgacttttagaaggccaatcccaaagcaaactttgaataccttgacacttccaaagacatgtttctcgactattgcactgcttaggcggccaatgagaatcctaaggcaaccacttccacttctccgaccgagcagaatgttgaggctccttctgcccagactgatgatcctccggcctcttcaaagctagctgatcctctggttcctttagatccagtcgacccgtacaaagagcctgggactcccacaatttaattgccttctttttactatcttttttatatgtctgttcgaccaataagccttctttttagacaaagtgaccggccaagcggtctttnnnnnnnnnnnnnnnnnnnntttttgaacaactggctgaccaggcagcctttaatctggggtttgaatgctttgttattcttaatgaatttcatcccttgtttataatcattgtgcaactgtatttgttttgttctttaccaaatgttttgtacaagtataggtgcctcacaagtgaccgagcagacttttgactcttggtcacttatttttacaagtatgctttttgtctgttcggggctttgggtacgaacagaacttttgttcacgtttaatg

SEQ ID NO: 149440 - DNA, 559 bp, Cannabis sativa
aagcaattctcttatggaaagttagtttttaaaggaaactttgactattatcattttccttattaagtttgattatgtcttgactatatcagatcatacacaatgtttatagcatgtatcaagacctaatacaagatcggactcgtttttggcaagtttccttttctggtcttatttgttgcatcagaatcagtttgatgctgcaaatcaagtttttcttaggaaagttttgtacagctgtagatttgactttgtgcctgtctctagggtttctatgttctataaatagaatctagagagcggccattcgaatcaactcttctagttttcattttttgcatttttcttatttgtgagaagagagttcttttttagagaacctagttgttcatctaggttctagtaattttcatatttgttcttactatgtcccagagtttgttagaacgacttgactggacaagagagtggtcttcgggagaagacttgttcaagccttacttcgggaggaagtaagcacgcacacttcaaagatgaagggagtttgctgtttggaggt

SEQ ID NO: 149441 - DNA, 612 bp, Cannabis sativa
agtattttattttagttaaattttaaaattatcacggatttttaataattaattaatctattagtattaaactagtttataaatcacacatgtgacgtccctatgggttgggacgttacaggtgtcgaagtttatcaagtggtgtgagcagcattatagtaaagaaactctccagaaaatagacttcactatgaatgttggtgagccatgggtcgaagaggctagacgatatgtaactaatccaaccttctcgagaatctcaaaaggccctgtaaatgtagggcataacttgccctttttcctaaaattttcaatccccttcatcagagatactcgtaaaaatacatgatctcctacctgaaactttacatatctgtattttagatctacatagctcttttacctactctgagaggcaagcattctgacattgatcttctctattgcctcgttggtccattataatgattctggacccaagtatttcttttctcccgtttgatcccagtgaataggagatttatactttctgtcatacaacatctcatagggagtcagccttatagtactctgatagctatttctgttgggttttatgccctgaataaaact

SEQ ID NO: 149442 - DNA, 507 bp, Cannabis sativa
ttggcccttgcacctcctttcaacttagcttcacgcttaagttggatgagttcattctcctgatgagctccctcagcccggccagcaccgaatttcctcttccgctccttcacatgcttaggaataaaatcctttggatagagctcgtacttcagaaagttgtcctcagaggtcaacaaaatgatatttcgggcatcccctggtagctgagcaagcctttgagctctatccctaagagcaagagtgaagggagggcggtgatatgtggggatctgctggaaacgagtatgggttgtgcccatgccttccaccatgaagtagtcatcaacaaaatgcccaattttgctaacggccttgtcccaagtgcaagtcaaccacttgaagtctggctgaaaaaaatagaagtaccccaaccttccttgcttaagggtggacttcaaatcaaaaaaccagctaacctcatggggagaaggcatatcccaattctaggaggcgtagagaacgaag

SEQ ID NO: 149443 - DNA, 579 bp, Cannabis sativa
tgtgggtaatgccccaatcaagttaattccccatattgcaaatgggtatggtgaggtcatcattcttaattctgttggtggtacatgaggtatatgtgaaaatctatggcatttatcgcatctcttgaaaaattcacgcgtgtctttatttattgttggccaatagtatccttgacggataattttctttgataaactttgccaacctgcgtgatttccacaaaagccttcgtgaatttctttgattattttgatagcttctgttggcaatacacaccataagaaaggcattgaataatccccttatataatttgccctcgactatactatagcgaggtactgaatacaagagtttgcgtgcctcatttttatctgtttgaagttctctcctgagtagatatttaagtacgggtgtcatccatgttggcgcggcatctgtcatctcaacttcttccttttcacataaacttgggtctcccaaaactttaatcggtaccaaatttaacttatcaagttcattttgcgaggccaactttgccattgcatcaacatttgagttatgttctcttgaaatttgt

SEQ ID NO: 149444 - DNA, 551 bp, Cannabis sativa
ggaccaactacccatttattaaatttccttattttcttaactttttttttttcaaaaacaaaaaaagcacaatgtttcatttcggacgtacgaaatggttcaactcattcaagaacttaggtgaaggcccattaacataaggccaatctacttaaatgccaccaccaaccctttaaacttagtaatatcagccctttacactcatgaaataaccttattttacaattacatttggaatgaaaataaaacaatatgtactattgtactgttcagacgtacgagaggagttgaattcagattctaatattgtagaggcccattaatatcagcccaacagctttaaatgtgatcaccaactccatacaaccctattatctcgggcttttaaactcataaaatctaatttcaatcccctcagcactctctttcccttactcctcatcgacaattcttagaaatcaataacaagccaacatgaatgacgaacacacttatgaatgggaaaccatcacagcagagctaaacatcacaaaaccagtgaatgagattga

SEQ ID NO: 149445 - DNA, 603 bp, Cannabis sativa
  modified_base (230)..(231): a, c, t, g, unknown or other
caatagttgccgtcgccgccttactgatctacatgtccttaattttataaatagcatgagattgaggagtgtgagatgagagtacatcattttaaagagcatgagaattttcaactcatgtctctcgagtgaattctggtgtaggagcaagacagcattgtgttcagttttttggtgtccaccattgtaatcctctgagttatcttcttcaagtaataaaggcaaagccnnaaggcagttcctcccaaggattagatctaagtgatttcacttgtgattgaaacttataatcctttgtgttctattgttttattgctactgctgttattacttttgttttctggtttatgatttcaagtttgtatcttttagtttcatttgatcttgtttatgttgttcttgaatggtgttgattcacaattcatatactaaaataataataataataattaattttttttgttcaacatgccaactttttaggtttattataataacgttattctgttaataagctaattatatttatttacgggaaattatctcatatactgtttttttaatttttttttcaaatttatagtttgggtttctaaagtggtt

SEQ ID NO: 149446 - DNA, 629 bp, Cannabis sativa
  modified_base (31)..(37): a, c, t, g, unknown or other
  modified_base (153)..(161): a, c, t, g, unknown or other
tcataaactagatatagtctaactttagaannnnnnntgattaatcaaaatcaattaactcagtcttacaagcagtataatctcaactagtatggggaccatgggcctatacagagcctgcaataagtcaaactgaatttaccaagtaaattnnnnnnnnnattaattccttattgaatccacacctagaacttggaattgcactctcagtcataggttggatcatgtcctgttccatgcttgtgggtcccaagtcccagttcgggtttggattcaagtttgggacccaatcataggttgggtctgtgtccgattccgggtccttgtctggttatagttttgtgcatgggttgagctcctagtactagtcctgtttctcggtcctgatctccttctactttcggttgtagtttcaactcacggggtacgagttcgagtcgagtttgggtctgtgtttgggtcctagtcttgatttgggttcggggtgaggtttaggtccgtgtttcggtctcggttagggtttgaggttgggtacagttttgggtgccgatcccggtggaagacccagtctctttctaagatcctagtcaagttcaagttcaagttttggttttggttcccgagtgtgg

SEQ ID NO: 149447 - DNA, 1347 bp, Cannabis sativa
  modified_base (1169)..(1171): a, c, t, g, unknown or other
ttataataaatactataatcaatatataaaacttacagctttttgattttgtatgtaacggttggggtttgcacgtgcgatgatgtcagtcatgtctttcaaaacataaaaaatcagattcttggttttaaggctgtcttcgacaatttgctagtgaaatttcttgccatgggctaagatactcatgtgttgcccctatatatccgtatgcactctttgaaaattatattagtgtttcaattcattagttaattaatatttgttacacaaatagtcattaaattattaccttcccaacatttgagtaatttctttgagaacttggtggccacgtatagggtctaaatggacaattttctttggcataatgacctttagcatccaatgcgcactagaaaattttattggaatataagtaagatagtataaaaataatttcaagtcataatatagaaatgaacaattagcactaaagaattaaatagtgtttaccagatgttctagggaataaagaacatttggtggttgttattcatcgatggtaaccaagcagccaatcatcttaccgcattgtcaaaagactgactcttctcttcaaggttgctaccactcactacgagaagctctgggtcgtaaaacttgaaaattttttgtaaacggttgatgctctcctagatgtgcctgccaaaaaaattattaattattagtgtcttatagtaatttgactagaatttgatatataatgttaattagattaaagaagagtatacatcattccaaacggcattccctggttgccgatgaagtcacacaatgcaacctgctgcaaatcctctccaaataatgtgatccgggtacgcggtgctatgaattctcggggtaaaggaattgtgattatatcacctttatctttgaagatcaaaaattcaacaaccatccattttagcgatttagggatcctgtccatgaccttttgcgagaataattcatcttcccgttcacgaccgccttgtggagaaagtatgggagctttccccttcgacgcatcacgtcttgaaggcggttgagcgagtggaccctaaacaaaacagaacataatatataaaatttgatccaaattctactgaaatttcggtagcataacagctgtaattgaatgcccccaaaannnttaaacatgcatgtataatgacaaataacacagatataacaatagtttattcatccatcccaccacgtcacatatattcacagaacctacttcactatggttgaatattgaagataatcaaactcaactaatcattaataattaatttataagagaagttaccttggatgttacaa

SEQ ID NO: 149448 - DNA, 559 bp, Cannabis sativa
tattcttaaataatattaaagagataaatatattattttagagaaaataatatttattttaattcttgtgaaataagagattaatgagagttaattaattattattattttgccaataaataataaataataaataattaattattatttattggtagaataaataataaattttatttatggtaaaattgataaatattcaattttggatcttaaaatataggccacatgtgtgggcctggcccacacgtgtaggacgacatataaaggtccatgttaattttgtttgattattttatgggttaaaataatttaaattaaattaattaattatcttttaaatattaaagtaaatatattattggataaattatttaattaaaaaataataataaaataaaaggatttaactgatttctgttaatcgattaaaatatttatatttgaatataaattatgaattttattatcccaaattttgcactctgacgtggcatcacaagaatggtgatacgtggagtccgcttggagcatctactcgggaagataggccgagcag

SEQ ID NO: 149449 - DNA, 746 bp, Cannabis sativa
atttaattgtggaataaaatctaagaggacgattattgttgtataaatgtatattttttatatgaaactctgaaaatatataatatatattatattttgaaagttattcttatttataattattttaatttatgtttaatttttttatataataaattaaaagttattaagggaatcattggtgcccacattatgttatattaatatataatgtaattattaatataattaaatacaagttttatatcttctaatttaataatttattatgaaaatttactaacatccctccttataataatatttagctcctaattaatagcaatactcatatattttaggagaattattttatatatatttttttttttttaaatctactgtttgtgttgttttagtagctgctcaagtggtttttatataggttgttatgtgaattttggttacaatttatgttgttcgatctgttggttgttatgtaaatttctatgaaatttgtgtaaaaataccaaaaaaaaaatttaaagtataaaaataaaaaaaaaataaaaatctatatattttaaggtacaacctccaactcaatagaattagatactatatatatatatatatatattaaaatgagtataaaaccctcttgtattaatgaaagaagacaagaacaacaacaccactgactatatagaattatataaatcttataagaaaaaagagatgaatattgaatagatatacatagatgg

SEQ ID NO: 149450 - DNA, 502 bp, Cannabis sativa
actaatcagattgtaaagagttttatttagggcataaaaccaaccacttttttggttagagatgtgtagatcatatcagcaatgtcgtgaaacaaaatctcagaagagttagtaaaaatataatgataaaattgcgtacctttctagactctcctaatgctccggcagtagaataatgcatgtgagacagactcttccgacattccacaacggtcacagcccgaggaagtaatgattttcctatgagctagatttttggcagtggggagggttgaatttgtagctcggaaggcaaagtgtttcaccttggcagggaggaaaaggtgccacaggtttttccaccaaggcgagggggaggaggaagaggggatatctggggggtgtggaagagaggctgagatggtaacccgattttgcagaatagaccccagattgggaatgttcccaaatgtgctcatcggggcaggggctgagggggaggggaatggagaggatctgctca

SEQ ID NO: 149451 - DNA, 610 bp, Cannabis sativa
aagcacaaatatacaaagacaaagaaacactccaaagtgtgcttggtttctatgcaattagaaaaaacttccaattcagagtaaaaaagtcatgtgcaagaacatacaaaatttgttgcttggatccaaaatgcaagtgggcactaacggcatctagaaacagaccaacgaagtcattcataattcaaaagtatgacagaaaggtgatacacacttgtgatctaaacataagatttgcagacaaaagacaagctacaacgaagttgatgggaaactacatcaagcaacggtttaccaatataaaaaaaactcaaacgccacaagacatcagaggagaaatgaaacataagtatggggtgagaatgaactacatgaaagcatcgagaagcaaagaacacgcgcaagaagaattacgaaaaaaagcaaaaggatcttacaagctgctgccaagttttttgcacatgctgcagaaaactcatcccggaactatcgtacacatcaaacagaggaagacaacagcttcaagtacttgtttgtggcactagatgcttcaataaaaggatggaagaagtgcaaacctataatagttgttgatggaactttccttaaa

SEQ ID NO: 149452 - DNA, 540 bp, Cannabis sativa
  modified_base (481)..(494): a, c, t, g, unknown or other
aagtgcgctgactttgtaaacctgtcaactatgacccacacagagtcgtactgtcctgtggtcctaggcattccaaccacgaagtccatggcaatgtcttccctttttcattccagaagattcagtggctgcagcaaccttgcaggcctttgattttcagccttaacttgcaacattaatgaatgtcttcattaatggtatcctgatttcttccaactcaaagaaagcatttgagaggaatttttggatggtgttgtaatgtcattaggagcctaagcttcatgttgaatacaaaaagtgcaaattttgctgaccctaagcaagtttcttagagcatgaggcggacattaggggtgttcatcaaaccgttcaaactgctcaaaccgcccgcaccgcaaaaaaatgcagtttgaaattctttgtggtgtggtcccagtttgaattttcctaaaccgcgtggtgcggtgcggtttgcggtttnnnnnnnnnnnnnngcggttcaaaccgcaccgcactgcacattataaaataccaattttt

SEQ ID NO: 149453 - DNA, 973 bp, Cannabis sativa
aatttataatttaaaaagggatggaagttacaaccccgtgagttagtgggattacctctcccatcaatatatatatataaaggaatgcacaataagagtttaggtggctttttacttttttttcttcctatttttcttattatgtgacacattctcttattttctttgaaaaataaactacactacaaggtaaaaagtcccacattgtttagagatattttaattgttatccatgtaagttataaataatacttttatttatttattttcttttgtcttagaaatattattatcttcttgggtgattgattaatgttttacccaataagttatatatatatttctataagtagttatttatttttttaataattaatttttttactaatttttaaatttttaattttatatattatgaaattaatttagtttaaaaatttattttaatattctagacttttatattgttatttgttcgagttaaaaatatttttttacaactacatatattctcttaaattttaatttgttcaaaaattaaaaaagtgacacacttatatgactatatacacaattattattttatcatttttcaaatttttatattttgtaagtttagtttaaattatttaaatagttaaaattattagagataaaaattgacatttttttacttaagaaataatttttgtagtatacattataaattaaaaataaaaatatgaactttaaaatagtttaaaagtgatgatgtggcatctcatattttttttatagtatttttactattttgtgagagcttcaagctttgtctaatgaaaaaaaaaatctactaactttgtaaaaaagtcccacattgtttagaaagtattgtagttttctatatccaatctataaataagtttttctttttcgctttcattagtctaatcattattatttgctatagtataaaaaatattatagcaaataa

SEQ ID NO: 149454 - DNA, 842 bp, Cannabis sativa
ccatgcgctgggttcttggtatttggcattactcttcgaaggaccaagtctcctgttcgcaggacttttgccttgaccttagaattgaagtatcttgcagttctccgctgataagacgcattttttaagtacgcctgatcatgtttttcttccagaagatcaaggtagagtgattgtttttcttcattttgcgagatgttgaaaacatctcttcgtagggaacatgccccaatctcgactagtaccatggcttcgcatccataggaaagcgagaaaggtgtttcaccagtcgtggagcgaggagttgtattgtaagaccaaagaacttgcgagagctcatctggccaggtccccttacgttctttgagtttccctttgatggtgtgctttattattttattaacagcttcagtctgtccgttgatttgtgggtaagcaactacggagaatgctttcttaattcccagatcgtcacataattgtcgcatctctttacaatcaaactgctttccattgtcttagatgagtgtgtaagggatgccaaatcgacaaattatggatttgtagacaaactctcgcaatttagtcgctgtaatggttgctagtggtttggcctcggcccattttgtaaaatagtctactgtgactactgcatatttgactccaccttttcctttgggtagctcgcctattaagtcgattccccatactgcgaaaggacttgtgatagaatgtaggtgactcggtggttgatgggtatatgtggctattcgctgacacttgtcgcatttcttcgcaaaagcgaaagcatcttgtcgcaaggttggccagtaatatccttg

SEQ ID NO: 149455 - DNA, 1187 bp, Cannabis sativa
  modified_base (1149)..(1151): a, c, t, g, unknown or other
attaggacgttaatgaaacatacaaggtcgtaaatctagatcctggtaaaatatttccaatagatggctcgtaccaaaaagacaatgcgtagaatcaacgcatctgaccctcaagtggcccgacatgccaccttacccagtgtcgaacaagatctatccatcaaagaggaggatgatcatgaaggggacgccaaggtctaagagattgcagaacaggacgatgttcgtcctagcagtccttctgaggcagaggaagaggaggaggttgcacccccaacctttgggggatatactgagactggggagtcagtcgatgcggatggcgacgtcctagttgagggcgtggactatgccagtgaggaatttactgccgcggttcctcacagaaggcaaggttcttttggttccaggtaggtgagccctccgtccaatgttaccgaggcacgcttacgagatctcgaccaggacatttatttgggggagttagactgctatattcctgcctataccaatcgagttacaaaccctgagaaggggatgtttgcctggtcgggtgctcacgctaaacaaggggcattgctgcctttgcacctgtacttgccgacttcttccacccctatccgacccaattcactcccaagggcatcaagtatttgtttgccctgttcattctctatgccatccagaagtggcatatgccttctccccatgaggttagctggttttttgatttgaagtccacccctaagcaaggcaggttggggtacttctaattttctcagccagacttcaagtggttgacgggcaccacgaacaaggtcgttagcgaaattgggcactttgttgacaagtatttcatggtggatgatatgggcaccacttacactcgattccagcagatccccacatatcaccaccctcccttcacacttaccctctgggatagagcttagaagcttgctttgctgccgggtgctgcccggaatatcactttattgacctccgaggacaactttgtggagtacgggctttacccaaaggattttattccccgggctgtgaagtagaagaagaggaaatccagtgctggatggggtgatggagctcataacgaggatgagcttattcaacttaagcgtgaagctaagnnnaagggaggtgcaagggccaaacagtatgctcatgag

SEQ ID NO: 149456 - DNA, 751 bp, Cannabis sativa
tgtgtgagtttactacttgattgcgtatacttgcgtagtgattataaatttagcaacaatatactgtgcctcccagcatcgtcttgactcccgttcctgctgatgaagagagacaacagctctggattgccaagcataactatgttatggccgaatacacaaaggagaacgctgaggtggaggccttgaaaaaggtcttaagggaggcccatgaaaattcctcacgcggtgagtactttgggaacgcctggggatctaaacatggaccccctcatggactggttcaaccgcttcatcgggcctaccctcgctccttttgcctaagagctgacaagccactttgtctctaatctaacccaactcccggccaagagatatgcagcctgcgcttttacgaacttaatctaccaaattcaggatattagcgctgccatgaccgcggtaagtctatctgttagtgttctcgggtcttgttttgaggcacccgtcctcccgtacttacatattttccccgtatttccagattgctgccgagactggtcgcctctcaaagactttaattgaccatgtatacatcatgttcgagtttgggggcatggatgaggccatgaagagtctaagagacttggcggccgagagaaaagctatcagggaggaggcccaacaaagggaggctcagatggtgcgaagtcaccaggaggcgttaaaggccaaggctgaggagttaaaggcaaaggacgacgccctgaag

SEQ ID NO: 149457 - DNA, 1041 bp, Cannabis sativa
gaaactttaaaaattcatttctcatgcaattcaaccccaaaccatatcaaactttccagacctgttctaaataccccaaagaacattctcaaagcatcaaaacaaccccacacccttataatcaaaaaccaccattgatgagtcaagcttgagttcaaaacttaaagcctgctcatccaactaattagctaacaaaacctgctcaattcaccatatataaccataatataacaccaggaaacaaacccaagcacaaataacaatcacagcaactaattcctcattttaccataaaaaccatagttttgagtttaaagttttacacaaggttaaatctcaccaactaacaaccaaactagctttaattcactcaattaaacacatctaagcttctgaaaacaacaacaacaattaacagcaagcacaacaccaaaaaccaagcatgcaaccatttttttacttaatttacaagaaactaaagagagagagagagagagagagagagcaagagctatacctaaagcttggattgtactcaaaatggatgcaaaacacagcttgaagcagcaaaaattcagaaccctagctggttctagaggtggcggaaagagagagagcttgagagaaaatgggatttttgattttctttgattttacaattttctaactttttgaataaatgataaaacatgcataaattttcctttatttcagctaagataaatcaaataaaccaaataattccataaccctaagtccactaaaggacaaaatacaaatggggcaaaatgatcatttttctcctccacactaaaccacactaaaataacaactaaaataacataaaaaaataacataaaaggataacataaaagggtaacataaaagggtactaaaaagggtactaaggggtattttgggaaaactctaaattccgactaatcccgaaatttctaatgtctaaataaaccgtcccactatgctaaaatactaaattgtgattctactgagccatacaccgcgttccatgttgctgggcac

SEQ ID NO: 149458 - DNA, 575 bp, Cannabis sativa
tttttaacttggtaaattaattacatgctttatttttacatgtaattataataattgtgatattttaagaatgtgaatatattaatattctacaattaagtacgtaattattatatttatttaccaattaagtaatttattgattaaattaattgataatctgtcattaaatatattctttaattttgcatttaattgatttcatataattaaattttactaaatttgtatatttaccttatttatacaaatttattattagtacaaatatttaacatattatatggttataaatgcataattatggaattaggatttaatttattatcatacaataattgtattaatttgtatttattatttatttttaatacaattaatttagatttgaatgatttaaatactatacataaattctttttatagtgctagattatatttagaaatattcaaacattgagataggttgaatacattatttagcacgttaagtttcataaaaacttcataaaattattcataaaatattcataaaacactcgtaaaatgaataaaatatgaataaaacgtaagta

SEQ ID NO: 149459 - DNA, 631 bp, Cannabis sativa
attcaattaacaaagttaaatgattcttcagccattcaagagcgtggtaagcttcccgctcaacctctaatcacccctaaagggcaacatatgactcaaacctccaattcttcagagtctaatctaaagggggttaatgccattactactcgaagttgtcaaagtacagtatcaccctcacctaagaccactagtgtaccaatgcccactccagatgctgatgtgccacagaaccttccagtgaaggtgcccttccctcaggctttaaaatctactaggaaggtactagaaaataaaggtgaaatcctagaaaatttaaaacaagtgaagatcaacttgcctctcttgcatgtgatcaaacaagtaccagcatataccgaggtcatcaaggatttatgctccatgaaaaggaagaaccatgttaagaaaactgcattcttgacagaacaagtaagtgcggtgatcgaacaaaagataccaattaaatataaagatccaggttgtcttacaatcgcttgtcgaattaggacacaagaatttggtcaagccctcctagacttaggtgcaagtgttaatcttatgccttattcaatttacttgcaactaggcctaggagaaatcaagcccacat

SEQ ID NO: 149460 - DNA, 638 bp, Cannabis sativa
ggctaattatattagtttaccctatttaacatttattagaaacataattaattttaatataaataaaattaatttttcatttgattattttaaaattaatttagaaaaatacacttagtttaatgaaatttattttagatagttatttctagtaattaatttttttttaatatttaattaagtaggaaaatatatttattttgaaaattaattttattaattttagatcaacttaaattagaatatttttcttacataataattagaatcaataattaagttgattttattcaagacacttaaatattagatatttttcaagaaatttaattggataaaaaattatatttaagttgaaaattttaatttcagaacagcttaaattacaataattttcaaaattttattttattttattaaatattatttttttcaaattgtatattttaaatgtatatattttgaaattttaaaaaatagattaaagttgaaaatttataattttaattaattttggatcaacttaaatcaagtagtttttcattaatgattttttaaaataaatagactaatgttatacctgaaattcgattggaggacatgtgtcaagataaagagaatgtgaatcagtgtcgtat

SEQ ID NO: 149461 - DNA, 1765 bp, Cannabis sativa
  modified_base (31)..(33): a, c, t, g, unknown or other
tttgtttaggagaatgacttaatggtttgcnnntagtggcatttttgtaaagacaagtttataaccagtcttagatttttcttatcttaaatgccgtgtactattttcatttgaacttaatacaattgtatttgcttgcatttttattcacaatgtaaacaactatattttgatcaaatgttcagtacttttgggtttttccattgctcataatcttcctgtttaagtagttagtaatctaccaaactttatgatttttgagcggttgacaattctgcctcgcaattgcaattataatctgccttaagcaaacttaaatatactctaaggattttatcactttgtatatttttaatttgctcgtatgaatagttatattatctatccattttcgaggtttaagtacttctaccaaggtgtcgtgatgtctagtcagataggttataaataaaaaattatatttgtttgatcccttctttgtcaaaaaggtttgatcaaggtgttataacgattcgacccctctctcgtaaaaaaggtttggtcagggagttgtaacggttcgactccacattcgtcaaagaggtttagtcaagaacctttgaattttaaaaaaaattgaaatgatgggttggcattatacaatgtatttccagatgaattctggttaatcatacataaatgccccttaagtaattttaaaaaataaaactttgcaattacttaatataaatgattctctttattcatagctgaagtttaaagttcacattagtaatgcgagttacatcatttatttattgatagtagggtcacaaatgttttacgttctagtagttctttattagcgaccatcaagtcaagttaatttatagactctgactccaactactgcttcgatgacatatggaccctcctagttcgggttgaacactcctgctgatgcatctctcgtatttgtaaagactcgtcttaacaccaagtctccaatattgagtagtcttttctggacttttttgttgaagtatcttgtgactcagtgttggtatgcggtgttggtgattcacgactcagctcgtttttcctcaagtagatccaagggcaattttaaaagttaatggttttcttcttaattataaaactctcttctatgagtcgatacgttcacttcaacaggcagcattgctttcgagccaaatgttagcgacaaaggagtgtctctcgtggctgtattctcggtagttctgtgggcccagagtacctgaggtagctcatcaacccatttgcctttggcagtgtctaacttcctcttgatagtatcctttagggttttattgacggcttctacttgtccatttgcctgagacctggatactgatgaaaaacttttgataattctattcctctcgtagaattcagtgaacaagtcgccatcaaattgggttccattatcgaatactatcttcatgggaattccaaacctacagataatgttgttgacgacaaattcaaggactttcttgcaggttatggagacgaggggctcgtcctccgtccatttagtgaagaagtcgactgctactaccgcatacttagttccacctcgcccagtgggtaatgccccaattagatcgatcccccatatagcaaaggggtagggcgatatcagcattctaagttctgttggcagtatgcgaggtatatgtgaaaacctctgacacttatcacatttcttgacaaactcatgtgtgtccttattgatcgttgg

SEQ ID NO: 149462 - DNA, 647 bp, Cannabis sativa
ggtgtgggttcggttccttgttagggttcgggtccaaggctgggtcccaaatccaaacaccaactacaggttttctccaagccctgggactagattcgaatgccaatctcgggtcccagtcttgttccatttatggtgctaggtcatgagctaggtcataggttcaagttcgggtccgggtcgtgtactaggtcccggtcctagttctgtttctcaggtccatatcttcattttgggtccaggtcccgattattgtgtgggtttgtgtgccggtctaggtttgggttcgagtcctagtctcagttaaggtttcggtctctgtttgggttttgatttgggtttgggtttgggtttaggtcatggtcctggtcctagtcctatttcgattctagttccatctgcgattctgagttcgagtttgggttttagttcgggtcagagtttgagtcctggtctgactttgcgttcgggtccagatttctatctacgtccagatcaggctccgggtgtgggttcacatcctgggttgttctggattcagttctcggtctaagtccgttgttctgatcctggcctccattcgtgttttggtccgggtccgggtctaaatttgggtcttattctaggtgtgggtgtttgagttcggg

SEQ ID NO: 149463 - DNA, 738 bp, Cannabis sativa
tcaaatatgttgttaagaatcttttccctaactttaaaatgcaataactttgccaaaaaattaagagaagatatccaatcacaaccaggatacaactcggcctcaatctcttcaaataatttgtagtgccattgatttgcatcaagattatcatccatttcaaatgatggctaaagaaagtcatccactatcagaatcatatcgtcaatttcaaggtcatcatcaacgccatcatggtcattgactatattagtggcgctagattctgcttccccgtggtaagcccacttctcctaaccagaaaaaaaccccaatcgaatatgtgtgctcttacaacaggtaaagttagaagcctattgttcacacatctttcacaagggtacctaattctaccatcacaatctttacatttcgaggccatctctaaaaatgcatttagaccattccaatactgtggacatctacgatttcgcaatatggtttaagacttgtcgattgtcatctaaaattttataaaggcatataagattttattgtttaaagaaaaattgaatgataaaattttatgttattttatgatatcttatgcaattttataatattttttaaaaaaatcaggcattattacttatttagacaaattattattcaccatgtaaaagtttgttagcgcagatttttgttaaccaaatttaagcctcacaaatatgatttaatacagaaaaactatagaaaaat

SEQ ID NO: 149464 - DNA, 725 bp, Cannabis sativa
  modified_base (35)..(64): a, c, t, g, unknown or other
taatcgttttagaatttcatatttagggtgttaannnnnnnnnnnnnnnnnnnnnnnnnnnnnntggtaaaataattccaacaaaggacacccaggaattggctaagaaatgtgataccaccaacaaaactaagaatgatgacctcgccttacccttttgcaatatgggggatcgatttgattggggcactccccatagggcgaggaggagcaaagtacgcagtggtggttgtcgacttccttacaaaatggatggaggttgaacctctggtttccataacctgcaaaaaagttctcgattttgtcgtcgagaacataatttgtaggttttaaatacccattaagatagtatctgataatggaactcagtttgatggtgaattattcattgagttctgcaagaggaacaagattatcaaaagcttctcgccagtgtcatggcctcaagcaaatgggcaagtagaagcagttaataaaaccttgaaggatactatcaaaaagaagttggatgatgctaaaggtagatgggtcgatgaactacctcaagtactttgggctcatagaacaactgagaagacaataataggacatactccattctcgctggcatttggctcgaaggtaatgctgctagtagaagttaatattgcaacccacagacgagatttctataatcaagaagaaaaccaagaactattgaaattgtccttggatctacttgaaga

SEQ ID NO: 149465 - DNA, 510 bp, Cannabis sativa
  modified_base (465)..(477): a, c, t, g, unknown or other
gacccggacccgaacccggacccagacccaaactcggacccgaacccgggacctaggcccgaacccggactcggacacgggacctaggcttggacccggaccccggactcgaattcggacccgggaccagacccggacccgaacccagactcgaacccggaccccgacccagacccggtacccggacctggatccgtaattggtgttgggatcgagtgtattaaaaatatattttaactttacgcaatcaattaatacaagtcaataccaaacatcgtattgtattaaatagggatattggcggctaaaccacttgaactttacgttttgtaacacttaaccacaaaaactaaaattttggcggctaaactacctaaactctggttcccttttgctatgcacacctctgtccaaaaatcacagtttagtgccacggtggactgtctgttggaaattattttaccnnnnnnnnnnnnntactcacaagtatgtttattaaaatcctaaata

SEQ ID NO: 149466 - DNA, 1041 bp, Cannabis sativa
tttgtgtgtaagaaaaagagcttaaaaacaaaaaaaaaaaaacctttcctctgtttgagatataggatcttgggcttgtaatttagtaaactgttgtttaattccatttttttttttttaaaaaaaaaaaaccaattctctgtttgaaatataggattttggcttgtaatttagtaaggttttgtttaatttcattcaaaaaaaaaaaaaaaaagaacactgatgttttcggaaatgaaggattttggtttttattgttaaagaagaaaaaaaaattggtttttattttgtttacagtcattgttagaatttttttttattatttttgaaggagagagagatctagcctttaataatttgtgtttggattctgggaagactaattcctctactaaccattagaaggtacactttttttttttcttttactcctttttattatctctactaaaccatattatgctttttttttttcaattatatgtgagaatttagcattaaaattgtttttttttttgcttaaaaaaacattaaaattggttgtttcagacaattgttctcttatatgtggtcaagtcaacgtgagcaagtgtgaaccaattgatgaagtgaccataaatcacatgacttgggtaatttcactaactctttctttttctttttatttactgtatgtgatttaagtaaagatgtatagttatagttactttacatatttattcttatttgatttggtattattgacaggttttttcactttaactcgtgcttcacttcagaatatacaagtttcattacaatcataggttagtaatattgttttatttatgtatgtattcagaacagagtaagtaggtactttatactaaattatgacaaatttaagttgtgtactttatactaaaaataattatgaattttaatgtactcttatgttaacattaaataacttaaataatcaatatttaaattttaataactattttattatacctaattattttttattcaatccgtgtatttatttactttatttagaca

SEQ ID NO: 149467 - DNA, 539 bp, Cannabis sativa
taaaatttctttttgttgaaagtaattcaaataggcaaaatgactaaaatgcccatagggccataatataacataagcataactcaagggcataaatgtcattcaatcacacaccacacttaaaataatattcataatatttaaatatccataaaattccaatacaatatcctgaaaatgtatttctgcaccgaattcggttcggcccgaaatacccaattgtgactatactgcacttacttgtcaaaaaatacccgcagaaggacaaaacaagtacactatataataatatagtccataagcatgcaattaaattaaatttataattttacccttctcaggtcaaaattacaaaaatatccttagctcaccaacggggtcttaacatgtcatttatcaaattaattcacatataatatattatataataatataattccatataaatacacatttaactagttagcattcgctaatcggttttcttaatcttaggatattacaattatcccctccttatagaaatttcgtcccaaaat

SEQ ID NO: 149468 - DNA, 709 bp, Cannabis sativa
  modified_base (333)..(335): a, c, t, g, unknown or other
gacaataatttgttacttggtaccaaaattgtctttcttttttccttttaattataattattggtaaacatgaagacggagtattgatatgatatttttcaataagattaaattatttcgtattggatgaattaattagagctaatggattaaatttttaatatcctccttgtttataatattgattattcagcttgtactgacgaaattaaaaaaaaattacagttttacaaatattagatatttatgctgttaaaaataaacatcgagattatgctacttacaaactttaggtacttatgccacttacaataatatatatgtatatatatnnntatatatatatatttttttgaacataaacatatatgtatattgaagtgacattgtttctttcatccaatgttttggtgtatatcaatatttattacatacactaatttttgtaaaatttttatattcttacattgaaagttttttttttttttttattttttatatttttacagtattttataaaaatacaaaaaatcaacaatgaaagtaataagaaaagaacatcaaaacgacagcaaaaataatatacaaataataaaataataagagtgcaacataaaaatatataaaaagaccgtattttatgtaaataaaatctaaaaaatcataaaaatattaaaaattctgtacaaatcgtatttttgtaattttt

SEQ ID NO: 149469 - DNA, 657 bp, Cannabis sativa
atgtaatttattagtttcaaatatatttggaggtaacataaagtagctatataatatatatgtataaataatacaaatacatcttgatcaataatataatataatttaaaattaaaattataattttgaaagtaactataattagtaggtaaacaacaatatgattttaaaagtaattgattggtaggtaacacaaatgtaaatgagataatattatctcaaagtaaagcttattaattttttcaaaaaaaaaaagtaaagcttattaaaaagaaatcaattaatatcatagtaccttactttttaataatataacttttaaatataaaattaattttttttggtagattagtcacaataaaaaaaaatacttttagtatggtacatatttgattttgtttaagtttaaaatttttattattttttcgaacaatttataaaagaaactaaataattactttgatttcaaatatattctttggtgaaggaaaaaaaaaatatatgtttctcatatatcaaaatgatacttaaggagtaaatcgcaataatattattttttaagcaaaataattaacagtgtaattgttatttattttttaaattataaaaaacaaaaatagatatagatgcaaaagaaaataataaaaaaaaacaaaa

SEQ ID NO: 149470 - DNA, 610 bp, Cannabis sativa
  modified_base (553)..(554): a, c, t, g, unknown or other
attattggtataattatttttatagaatattattaatcaatagctaaacgatgaggatattattggtattaaataacaattctttacaacgcaccacatatccttatatagtatcttcttagatatcatactgtgctattagtacaattaagtattaagttttatataatttgatgtaacaaacttttaaataatatcgataaacgatcataaggtaccaccactagtggatccaaaatttaaaataaaggcatgcgtaatattttttattttttatttttttttgtaaaatagcaaacaaaaataaacataaaagaatagcttttggtaagatttgaaccattacctctatcatatatacaatttaactaattattatactaaaattaatattgtgcatataaatattatcttctattacccatatttgtcgtaattaactaaaatacatatacttttttttttcatattggtttgctcctggataccacctcaaggtgctcgacactaataatgccttattatttattgggtaaatagcggcataagtacnnaaagttttaagtttgtaagcgacataaactccttgtttatttttagtggcataagt

SEQ ID NO: 149471 - DNA, 554 bp, Cannabis sativa
catccccctttctgcgggaatgtaacagtccaactcgcccaggtagccatcctggtcgagagcccgcaggcgtgcctctgttaccttggacggagggctcacccatctggcacccaaggtaccttgccttctatgaggaatcgcagctgtaagttcctcattgacgtagtccacgccttcaaccaggacgtccccatcagcatcaattggctccccagcctcattgtatgccccatagtttaggggtgcaacctcctcctcttcctccgcctcagaggggctgctaggacgaacgtcgccctgctcctcaattctctagacctcagcgtccccttcatgatccccctcctcctggacggttggatctcgttcggcgctgggcagagtggcgtgccgagccacttgagggtcagatgcattagccatgcgtgttgtctttttggtgcgagccatcatcctatggctaggtgaaagattcgagcgagaatgtctttcactggaagaaggtgggttagaacagagacgaggatggtcctcgtgcaagagttgaagca

SEQ ID NO: 149472 - DNA, 1952 bp, Cannabis sativa
  modified_base (88)..(99): a, c, t, g, unknown or other
gatacgaaaagcttaccaaactgtcgggcagcaacccccgaatgtcatcgccctcggtgaaatagacgaagatccagcgatgaatacnnnnnnnnnnnnaaatggtcagccgccaaatctctggtcagaggttctgcctgtgggccaagtagtaggtgggcataccttgtctagtaattcaacaagagaagtcgtactcgatggttccaacaaggccaacgatgcaattccacctatcagcaaagttaatcaaccaccaaggcagctaggcgtttttgtatacgaaaggttggggatgactgatgatctcagaaacgatctaaaattctcaaaacctggaacccgtgctcaaattcccgctcagaaagatactgacgtgactcaaattggccaaaatgtcgaacaggttagtcaagttgtgcaggcacagctagatgaactaaagagtatgttccaaggcttagccgaacagagaaacaatgatctcgagttggaccgagcacgtagaacccctttctctcccgagatcaatctcctagcgttgccccacaagttgaaaatgccaaccaagaaattgtacgctggaagagaagatcctctttcccacctcaagtatttcgagatgcaaatggatctgcaaggggtacgaggtggcgtgtgttgcagaatttttcctgctaccctctctgaagccgcccagcaatggtattttaagctggtccctggaaagttcaactcatggaaagccttctctttggaattccatgcacaattctcctcctctcgccaacttccgttgcatttaggagacctggtcgaagtcaagcaaagaccaggcaagcctctccgatcatacatcaacagattcatgacagaggcgaccaaggtttcacgggtaactgaagatggaaagttgtccgcgatactggggggcattgaagtcatccgtgaactttggacggacataaggaagaacggcctggtagactcaatgagcaattttctcgaccatgctaaaggtttcattaaacttgaagaagttattcagcgagcagaacgcgagcaaaagccttgcaagacaaaagctccttccactaaaacgtccgcccaactcccccattacctaaataattcaagctcaaatggtaaatgttccaacaacaacaataggcaagggaataggaagaagggaaagttcaccaacgaaaccgagcaggctccctcggagaatcaagcaaagtacactgcatttaccatcttgactgaggatatagaaagtgtttacatggccactcaatcgctagccccgtataagtagcccgcgcccatgaagcatgatgttagcaagagagatatgaccaagttttgttgatttaacggagactacggccacggcaccaatgaattcaataatctgaagcgagaaattgaattcctgataaagagaaataacccgcacttaccgaagtatgtcaagaccgattagagtcagaggaacgacaataaccaagacttgctacctcgaccagtagacggacatctgtaagttatcattggaggtccgcacatagctagagatttaagcaaagctcgggagaggtatgcccgaacagcacagcacgagcaagaagaagttatcctggccatagaagaaaggaatcccaaaattccagggcaagagggcctaacataaccttcaacaacaaagatgctgtcaaaatcaggtttccgcacaatgacccattggtcgtggatgtacagatagaaaacaagatggtggccagaacaaggattgataatggagcctcttcaaatatcttgttcaaaagtgcttatgaaaagatggggctcctccaactcaaggatttagccccatgtctcctgcctgtctatggtttctccggccaaggagtagcacctttaggacaaatttgtctacccctcactgttgg

SEQ ID NO: 149473 - DNA, 689 bp, Cannabis sativa
tcaataaaaccttaaaggatactattaagaagaagttagacgctgccaaaggcagagggttgacgagctacctcatgtactttgggcccacagaattaccaagaagacagccacaggacacactcctttctcgctagcatttggctcgaagcaatgctgcttgttgaagtgaacatatcaactcacagaagagagttttctaatcaagaagaaaaaccaggaacttttaaaatggtccttggatttacttgaggataaacaagttgagtcgcaaatcaccaacgccgcataccaacactgagtcacaagatacttcaacagaaaagccaagaaaagattattcaatgttggagacttggtgttaagacgagtctttgcaaatacgagagatgcatcaccaggagtgttcaacccgaactggaagggtccatatttctcatcatcggaagcagtagtagagttggagtcggagtctataaattggctcaacttgatggctttctaataaagaactattggaacgtagaacattcgtgaccctactatcgataaataaatgatgtgatgtaaacattcaactttagatatgaataaagagaatcatttatattaagtaattacaaagtcttgactaaacctctttgacgaaagtggagtcgaaccagtataactccctgaccaaacctttt

SEQ ID NO: 149474 - DNA, 583 bp, Cannabis sativa
gaagactcctcaaatgggcaatggagttaagccaatttgacctgcactacatccctcgcatttccataaaggaacaggcgttagcaaacttcatcacggagtgcaatgaggtcgaggctactgcaaacatacccacaccatcagtcccagcgtggagagtatttgtagacggagcctccaatgagaatggatcaggggctggggtcgcaatgatatctccaagcggacttcgactccaagcaactctacggtttgacttctcaacttctaacaatgaagccgaatacgaagccttgatagcagggctgagaaaaaacagtgggggctaaaagagtagaagtctacagcgattaccaactggtagtaaaccaggtatcgggagaatatcagacacgcagagaaagaatggccgcatatgtggcgatagtctgggaactgctccacgagttcacggactataaattggaaagaatgcccagagtaaagaatgtccatgcggattgtctggctaagttagcttcagacagcgaaatcgagaaactaggggtggtacctgtgaaacgcttggcagaaccaagcatca

SEQ ID NO: 149475 - DNA, 510 bp, Cannabis sativa
tccaaccatcaaaaccagctacaaaaagctaataccaactcaaatgaaccctataattcgaattacacaaaagttaaaccctaaaagcccctaatctctagaatcataaactcaacctaaacttaaattcaagaactaaggcaaagagatgctagggcttaccttggcttgatttccccttgaattccttgctgaaaacactaagaatcagcaaccaattccccttactttggctggttcgaagagagagaggaagggaagagaggtttccttccatcttttgatttttagcttattttctctttttctttctaaatgaaataaaggtttattcaattaaaccttggctgaaacttattttgctaggtgtcacaagactaggcagccacctcaacccccactttacaaaatgactaaattgccctggtacttaaaattagggtaattctaaagctaggggtaaaatggtcaaactccataaccccgcttaatcccgatattttattttct

SEQ ID NO: 149476 - DNA, 512 bp, Cannabis sativa
tttccttaactcattccattgtagtcaactcataatgattgagacataaggtagtgacataatgctttttttctatagtagttaactcattattcattatttgatttattttatgttgatggcaaacctagcatggcaatgacagtgacgactacaaatgagatacggtgatgactcagttttcaatgtagtgacaactataagtgagatatagtgatgacaacaaccttgaatatagtggcaacaacaatgagatacgacgatgataataattttgaaatcgtatgatgagttttctatagatttatcaattatctttttagacctcaattttatgtgaagattctttaattttttttgttttaattttaacctttgaaaatattttttttttacttttattttaagataagaaattgtatgataattttctacaatatcaatttgttttttacgtaaaaaaaaatagtagaataattattcttattattaaaagaaattatattaaaaat

SEQ ID NO: 149477 - DNA, 819 bp, Cannabis sativa
  modified_base (227)..(242): a, c, t, g, unknown or other
ttttatctagacacttaaatattagttattttagaagatatttaattagatagaaaattatatttaagttggaaattttaatttaagaacaatttaagttagaataatttttgaaatatattttattttattttattaatcattttcccacctatttcgaaattgtattttttttaatgcagataattttgaaattattttagaaaatagattaaagttgaaaattnnnnnnnnnnnnnnnnttttggaccaacttaaatcaagtaaattttacattaatcatttattaaaataaataaactaaaatatattatattttaattagaaaataagtaattaattagtgtatatctagatagttattttctgtatgcttgaagtatttttctagctatatttaattaaatagaaaattaatatttaagttaattttattaagatacttagatatttgatatttttcttagaaatttaattaaataggaaatttatatttgtgttgaaaattaatttactatttaattttggaccaacataaattagactaattttttaggatttattttatttttttatgtcaattttgaaaatgtatttattttaaatattggattttgaattttgcattatatatttatagaaaattaaatttaagttaaaaaataattttaattaattttggaccaacttaaattgagtaattttcaaaatatttattgagaattattactaagatggaagataatataatttattttcagatctatcgaagtataattttataaatattaaattaaattctatttagagttttattct

SEQ ID NO: 149478 - DNA, 686 bp, Cannabis sativa
gatttgactcattgtaagatcttgcacctcatcaatgtaaacaaaattcatttcatccgccttatatctttcatgcttgattcgagagtgaaggtcattaacaaaatcagcaagatcgaattcaccattttccattttcattttttcatagatcttaatatatcgtatattctctctctcctttcctgacttaaattggaggaacgtctctctgacattttaagataatcctcacgacttagcttactatcaattgcttcaatggattgcagaccacctttgatatgagaaattatctcagtgaagactcgagaaggatcaagcttctttgttaacttggaattaaaacgaggccaatataaagcactaaacttatcgtagttgacttccttgttccttatcaatgtctgaagcaacactgatcttgaaattcttccttgatcataagaaagatcttccacattaaagaatctttcaaaataagatttactcaatgttccatctagcatcattaagaacttgtggaatgttatgaccaaagggtagcaattaggaggaatgtcataaaaagagtctgggatgtttttgaactgtgcttcttcatcatctatatcatcaatatcagtcaaactactacaccatgagacaaggagtagaactttataagcagcaaactttcactgacc

SEQ ID NO: 149479 - DNA, 697 bp, Cannabis sativa
  modified_base (51)..(51): a, c, t, g, unknown or other
gactcacagttattgtttccatgtgtaggtaagggcaaagctaaggccgancagcagtgagtgcgagcagatgaagattgtacatgtcggggcagttagacctaaagctacgatctttgggacagtaggctgtattttgagtagtcgctaagaaacaactattgtatcgaatattttgtgttacgattgtaaatattttaaatacgagatcccgatttatgtaaaagatatttgtttccaattaaagggtaattaagtaaagttttaattaatcacgatttttaacaaacctattgattagcaatgaattgaacaattaatataaaatcacgataacatgcctaaaacgagtagggtgttacaattcggtatcagagctaccaggttgtcttccgaatatcgtcacaatacgtacagtcatcatcaatgaaaagctcgactcaaagttatgtaagcctttattgctttagtagcttgttttattaatatgttataagaacagcctgataaaaagcatgttagtagcctgagagctgaataggcgtatgttttaatttatgaaataaacggtaattagtagtttattattgatcgcgatctgaccaggctagttcttagttttgcaggttgttctattagaatggacaccagacgaaatacaagaagccagggtaattcagttggatccagtggcagt

SEQ ID NO: 149480 - DNA, 1369 bp, Cannabis sativa
  modified_base (799)..(799): a, c, t, g, unknown or other
ttagtctcatacgtggttcccttagaaactttgtatgaaacttaatggtgagtctattatagttgaatgcttaacttaagactcaatatttgtccaagctgttacacttgaaaccgtactttgcttatacccaaccttctacaatgacattatctggcaagtacccttgggtacagttgaccaaagtcttgtctatggcttggagcctgcaaggaactctaccttttggcttggaacctgctaggaactctgccttgccttagagatttagcctggtacgtggttcctataggaactctgtttagttcttctctagctgtacaattctggtggggcttcagccttatgcattttgaaccgcagggttcttgcagggccttaaccttatgcatttgtactgattttttattcatattcagctttaaggctttcatgttcttagttttggcctatatgcactctattttcaaacactatttttagccttaaatccttttactattgacacatgaccgtcctgtctatctttttattgccttgacatgtaagtatccaaatttacttttctttatgccaaggttaagtacgcctacacttgacttagaggcaagtttagtagcttatactaagcgttaaaatttccctgcgtaagttatctgcgctattttgatgtattaaaccgtgtgagtgccccccaagtgagcacaaagacttacgatctcttggtcacttgcaattcaccaagtttcatagaccttgcatgggaattttcttggggtgctactgggtgtacgcatgngaactgaaaaagaataactttaagaagttatcttgttagcaagtggtttaaacataatatcattgaactgaatcaccgtttttattcgtcaaatggtgttgcttatgtgttgttcatgtacaacgtacatgttttttgtaacaaaaggttacaacttaatgtccacttttgaaatcaaatttttgctacccctgcccgacatgccagacagaggccatcactaaagaacaatggagaggccattgctgaagagtgatgggtacttagctctttttagaattcctacacggtgaaacattagaggaaccactattaaagagtacaagttggtgagtgagattacttaccgagatgttctccattctagtattttggtagaagaaccaactctaagctctcattgtcaaattattctgctagcaagatgtggtttacttcttggtcatagtagaccaaaagtatgagagtagactattggcggatcaggctagccaaggtatagactaggtggccagccacgttgagagagcatcgcctagttagtttgatgaggttatggtcggccagcct

SEQ ID NO: 149481 - DNA, 744 bp, Cannabis sativa
  modified_base (333)..(334): a, c, t, g, unknown or other
tttcgtttaattgtgacgtggatgaaagtttagggaacacaacgtgtcaaagttcgaagtgcacgattcgatacatattgaagttcgaagaatacgatttgatacacagataatgttcatgttagtaaaattgaacaaatttggactaaagtttttgaatctaacaatctcaacaatttgagagaaattctaaagttcatgagaaaaaattctaattatcctttgtattaaaagaaaatatttttaaagtaatttgatgcataaatatgcgtttggttgggagtaatgaaaatataggaatggaaatgggaaatgggaataggaataggaatnnaatggaataaaatttaaaatgcatgaaaaaaattgataaaaaaatcattaatgttattccaatactttaaaatggaatagccattccaccaaagtggtggaaagagcattccattgaaatgttatttcaatactttaaaatgcaaccaaacaaaggaatgaaataaaaattatttcctttccattcgattccatttcattacctccaaccaagcgccacctaagtttaactcccgattatagataagcacctaagtttaatttttgacggtaataatacctaagttatatttttgaaagttccgtaagtatttgactgttaattgtcaagtcaataaccacgtgacaatccctaattagttcaagtcgttaaattttgggattatttcacaaaaatataaaaataacaaa

SEQ ID NO: 149482 - DNA, 662 bp, Cannabis sativa
gggtataattgaagatgttttggtaaagtttggtaaattcatcttccctactgatttcttaatacttgacatcgaggaagatgagaatatttctatcatcttaggaagaccattcctagcaacgggaagagcattaattgatgtacataagggcgagttaaagttgcatgttcgaaaagaagaagaaactttcaaagtatttgccccaactgagattcctacttgttgtcgactagaagttgtaaaggatggccgagaagtcactactaacaagaagaaagggaagtctaaagaacgatttcgaacgtttcgatgccgtatgaagagattattgtgtgggaattatgaaggtgactctcaagctaaggaaagctttaaaaattgcaacgttgaaggacaatttttttcatttggcacaaaggccctcatggatgcgagaggtggattctacccgccgccaccactaccgccatactgacatggcgctcaggtaagttccctttcctttggttttaaatgtcacattgaggacaatgtgtcactttagtttggggaggccgggtgaacttaaatttttaatttttaatttaaattttttatttttttagttctaaaattaattttttgtgtgagttaagttgcttaatgtgagtaaatttgaa

SEQ ID NO: 149483 - DNA, 1145 bp, Cannabis sativa
aaaacgatcactctagattttaccttatgtaaagaaatttgaaatatctgagaactttcatgcatttctagcaatggtgaaaaaccattaggtaagtggttaaagatcttacgaactgataggggtagagaaatatttggtggatatgaagttcaaagatcattaagttgaatttttgaattgtatccaaacttacctccctagaaattaagattgcatgttgatgaaagtgaaatgtttatgattagttactagtagttgcctaagtccttctaaggaaataccctagtgataggaaaattttagaatgatagaatgattatatacttattgtacaccattactagattcatttatgccttgatcgtgaacttaagaaaagctagaactattaactaaggtttgcatgtttgatagctagtctaaagtgattaggagtggaccatcctatggtcattaagataagcaagtgtttgtttcaacaaatattacttttctaagaaagtgactatatctgaagaaaaaaaaagtagtaaagtagaggagatattttttttttatccaaagtgttctatcatcttgttgtatataagatggtcccactgcctctgttgtcttaacacaaccaatgaggatattacccctaaggttcttagacaaaaagtcacggtaacttgtcgtagtgggagggtttcaacgaactcactctgttatgacttgggagacacttgcgataaaaatctattgttagtttaaacaaataatggatagtcaaaataaggaactaagaagcaaagccaatagaactatggttaaaaccattcatatggagtaacaaaaagttttctattacaaggacaagagaggagatttcgataataagtctattcaatggagttaacaaaatttcatgatcctagcattataggtttgagataatctaaacctatggcttgtggtacacctggtaatttacttactctagtgcaaccaacttatttttgtaagatgttgaagcctttttctaatggctattgttatcccaatttttgcactctgacgtggcattacatgaatggtgacacgttgagctacttggaacatctgctcgaggagcacagtccgagcaagatgcctcactggca

SEQ ID NO: 149484 - DNA, 526 bp, Cannabis sativa
ccatgacccacggttggtgattgcgtgattggttattcaggattcgtggatggtggaacccctgcatttcctggattctgcaatgcgggatccattgccgatggatttaccggattgatcacgcctctacgagtttgtaccaccatcgtgtttatgattaaatttgaagtaaagagcgaatttatgattctgcctctcaatgaaagtaccaaaatgttgacctcgcttttagccaacgacagtgagtcttaattgtaagcgataagtgatataatttagctataatatgaaaagataaataaagagcacatagtttttaaagaagtttggccccgagcagttcggtaatagcctactcccttgatttgtattgacttaagaacaaagaatacaaagattcttctcttgaagcttttacaatgacatctctgagtatgctctcttagataatttttgtcgaccctttgcccagtgagaatatatcactatttatagggctatgtgcttgagagaaggtttccctttt

SEQ ID NO: 149485 - DNA, 513 bp, Cannabis sativa
attatttttgaccaataactaaatgaattcaatgaaagttgccttcatagtaattataaaaaattaaattatctttctaatgatatgctgattattaaaaatagattaaaagtaagagagttatcatagttttactgaaataatttctgagaaaaaatatggagtaacggatcacaggagacatcgaaaatataaagttttaaccctaaaatattctaaatcagagaataatctcttcataacagttttagaaaattgaattccctttcgaatgacacaaaaatctttaaaatcagactcataatgtaggagatatatatattttactgaaatagttttttagaaatcttgaagcaaacgaatttcaaactacagcaatataatgataattacgacttagaaaaataaatgattggtaaatagtttcatcataaaacatttagaaaattaaattatcttttcaatggtaccaaaattgctagaatcagatcagtattcagagagatattcagg

SEQ ID NO: 149486 - DNA, 823 bp, Cannabis sativa
tgctaaactagcattaccttcacccttttcaatataaaggaaactagagaactaaatcgcgcttcgcacttcaacttttataattttttattatataaatatattgtacttgttgagtgatataatttaaaatatagtattttgatatgtgtaagtaatagtattaaaattaaaaacatattctttttacaatatataaagatgaccctttgtgataaatactaaaaaaagtagaaacaacaaagaaattgcatgtgtcattataaaagaataaataaaaaagaaaactatttctaaatttaataaattggatttgtgactgataatgtagttctttttaaaaaagctatttagacctatttttttctttaataaacaatatataaatactatttatgaaagtttttacattttattttataagaagacaactttaaaaatgggtgtcacaatattctttgtttttaaaaactaaaaaaatagggatttatataaaaaaaattaatgataaaaataatccatatgaaatgtttaataagagaattaattttaataaattatgtggaggtgaaatatatgccgtaaattgtaatgatggaaaggtaggtcatgattcatctgactaattgtttctatatggaaatgtttatctgtcttactatattgtaataattaaaatgataaatactgtatgaagtcggttgtgcaattgtgtgatcattatcgtgcctcgtacaatcattataatcattgaaaaatcaaatttaatttatgattatttttttttgtatttagaaattcatatattaagtatttttttatt

SEQ ID NO: 149487 - DNA, 609 bp, Cannabis sativa
cctttgactcttcaaaatatccttcaatttctctttttcttcacaaaaacacttgagaacatcccttgcaatagtgattctagaagggatttcaaatcttggttgcaaggtctgaacaaattatttgaaaccttccccctcgacatgtcggtagggcaactcatcagtcacaatatactttgccaaggcaactctacatgcttctttgttgaaggcaatcgcaactaaacttttttctatttctttaagcggctcgaaacttagcaccttctgcttatcctcatcatttctaaaagggctttgctaacaagtttttcgaaagtggttgtttaagtgactcgtcccgttgctagtaccacaattgaactcattaccacagtaaatgcacatacacataggagcttcattgggatccgtacaattaacttttggcaacttttcaaagtgcttccaaacatgtgacgattttctattactttttccacttcaactaccactaggtttagtcttaggaggcaaaggaggcttttttctatttgttgttgctttttttgttgttttccttttccttgattgattctcctcctcattggcagatggtgatgatcc

SEQ ID NO: 149488 - DNA, 555 bp, Cannabis sativa
  modified_base (353)..(353): a, c, t, g, unknown or other
tattaacaaaagtaagattagtgacttatcatgttttttagcacattaatatgaaactctcacaaaataagaaaaataaaaacaaaaaattttagagagccacctatacacttatgtgctttcctttatataaatactaggcaacataaccgcgcttcgcgcggtcattatactaattaataaatatttttttgattttttttataatttacagttattatattatgttatgctgcaaatatttttttattgtattataaaaaatgtatttaactttgtgttaattttaaagtagtaacaaacaatggttagtttggtaggatttaatttattagtaattttaaatttcatanttttatcataaatttattacatgaaaataaaaaataaaaaaaacttatctctaaagtacaaaaaaacacttaattcattctccaattttgactatttaaaaattaaaactcaatttatgaaaaactaaaataatatcaaaatatttaaatagaaaaaaaaatttacaaaaatagtgatattattatattccataaaattcaa

SEQ ID NO: 149489 - DNA, 612 bp, Cannabis sativa
gaaaatggctgcgtacgtagctatcgtccgggaactgctccatgagttcacgaagtacaaagtggaaagaatccccagagaaaagaatgctcacgcacactgtttggccaagttggcatcaaacagcgagatcgagagactgggggtggtgcccgttgaacatctcacagagccgagcatcagaattaaagatacggtgattacaattaagcaagagccaagttggatggaccccatcaccagacacataaccaaaggtgagttgcctcaagaaaggaccctgtccagaaggctacagtatgaggcacatcgatatgtgatgatggataatattctctaccgaagaggactcagcatgccgtacttaaggtgtgtatcggaccctaaagctagacagattatgctagaggtccatgaggggttctgcggagatcataccggaggtccgagtctctcaaagaaaatattgagacaaggatacttctgtccaataatgaaaaacgattgtagcgactatgtcctgaaatgtgattcgtgccaaagattcgcgaacataccaagagccccacccaacgagatcaccctaatgactagcccctggcccttcgcggt

SEQ ID NO: 149490 - DNA, 569 bp, Cannabis sativa
ctgtcacaaaccgcgcgaagcgcgaatttgtttcctagttaatataataaaggtatgttacaaattcaaaagttattgcatacatatgtaaaatactgattgaaatttattttaaaataaataaataaattttgtttatttcttttttatgattttgttggaagaggtgaatgaaaaaataatttgtaatatcccacatctactatgagtggttttctcacaatttaaaagaatacttatatgtacatatatgatacgaatatatttaaatttttcaataaattatataaaatgtggattatataaaatatagttatattatggactgaaatttttcggtataacatatttattattttataacaacttccaataaaataatatataactggtataaatgtgcagagtgagctattccttaatattgtcaacaaacatgcattgaaatcacaagtacaagtagtttaagtaattcaataacatttccaacactttcttcaatacaagttaatcctgaagtaggcctccacgaaaatgcattaggtttccttacaaaatcaacaccaacc

SEQ ID NO: 149491 - DNA, 562 bp, Cannabis sativa
ataaagaatatattttttagtgtagatttaacactaaatatgagttttagcattggagatgactttagaactttttagtttaatattttgtgctactaataatttacaaaacatactgtgtaaagatgtcagagtgagaaatataattatgtgtgtgaaattatttttgatgtgaaatgtagtgtgaaattgttagtgataaatataaatgtttctctagtaatttttttaatatctttaaaatagaattttcttgttaggaaaacaaaaaaagatagggataattatataatattcgattttttaatttttttttacaattttacgtttaaagattttttttttttacattttaaagagtttttatagaaacaacacgaaaacaacaaaaaaactacgtaaaagtaacaggaaaataatatcaaaataataacgaaagaatagcatacggataacaaaaaattaacaatagtacagcacaaaaatgtcgtattttctataaataaaatcataaatatcgttaaaatatttaaaatttcatacaactgtatttttataattt

SEQ ID NO: 149492 - DNA, 617 bp, Cannabis sativa
attaaattataataatattgtatactataataattaaaagttaactaaaatataattaaatatacgtacattgtacgtaactttaatctagtatatatatatgtgcgcgtacatatatatatatgtggaattatttaatatatatattttttttaaatttactatttgggtttctaaagtagtttttacaggattttttgatgtgggttgctatacgatttttggttataatttaggttgttctgctagtggcaataggatttatataaaaaaaactattttaaagtataaaaataaaaaaattccaatatatatttagaaatgattgatattacattgacttttatatatgaatttcaaaatatataaatacatacatataaaaacaactagatagatgttatgttaattttattttagtttttagttttttcaatatcataatattaaaattaataatattcaatgtagtaaaatttaaaagcataatagtgatttaaataaaacaaaaattattattatacatagtaattaaaaaaaaattattcgtcaaatttatcttcgcaattaatgaaaatgctcatctaggttaaattatcaaaacattcaaatttaat

SEQ ID NO: 149493 - DNA, 976 bp, Cannabis sativa
tagatcctggtataatatttccaataggatgttactagaatgacctgggaggaattccgggacttgtttaatgccaagtattacaatgaggtggtccgcggtgcaaagcgaaaagagtttgtggaattggtacagggcgagaatatgtcagtgactgaatacacaaccaagtttgatcacttggctaaattggcctatgggattgtaccaacggatttcagtaaaaaggagaagtacttggcgggattgaatcccaagattaagcatgatctggttatcactacaaatgacactacaacttatgccgaaatggttgataaggcttttcgagctgaaggagcagttaagttcttgcaagaaacccgagagactcctggtgttggtgggaccactactctccctatttctggccctggaaaagagagtggtgatcccacttttgaacaaaagaagagaactttcccatcatcgggaagttcagggcaaggtaaaaggtttcgagaaaaccagggtaaagggggaagtcagacttactcctatcctgagtgcccgcgctgcaagaaacatcatcccaggacttgtaaccggagagcttgctttcagtgtggatcactagggcacctcaagaaatattgtccccagttgaagaaagaggaacctaagcctgaagttaagcctgcaccagcacgtgtatttgctatcactcaggctgatgctgccgccaacccttcagtggtcacaggtcagctacttataaatggttttgtctttattgttttatttgattcgggtgctacacgatcatatgtatcattgagagttcttaatcaacttggtagacctagtgatgcttttgagatgtgatttggaaccctattacataatggggaattaattatttcaagaaagtgggttagatcagtgttaattagagttgaaggcagagaactgagcgctgatcttgtggagttaccat

SEQ ID NO: 149494 - DNA, 647 bp, Cannabis sativa
taatacaatacaatataatacgacctaatacggcgttccaaacgagccctatatattatatctaaccaaggaaaatgcaatatttcatatttgcagtgaacaacttcaaagtcttgaaaagttctctataagattatctctagcgtatgagagaaatcaaatgacattttcatgtggaatatataatagaaatgaattttttctgaagcatgaaaccaaccagaaaattattgtttcattggatcgtttgtgtgattggtttaggatttgaaaactattttatgtttttaaaaattaaaatggtaagggtccacctaagaattcttgattggttgagtgttttcaaaaataaaatttgaatactattttgagttttaggctaaaaaatgaaaatactatttttatgttgggtttcgagatttgagggatttcaacttagccatgttgggaaaacaagcttggaatgatcattctcttgttagtcgggtttataaggcccgatattatctacagggttcttttttgagtgcttctcttgggccgaatcctagcttcatttggaagagtatttttgaaacgcaagctttgattaaggagggcgctcgtcgggtggtgggtccaggtacgaacattagtgttcagtttga

SEQ ID NO: 149495 - DNA, 1118 bp, Cannabis sativa
  modified_base (927)..(931): a, c, t, g, unknown or other
atcatatgcaatatacattacatatatagtgttaagaaaatattaaagcattatcagatttaagaaaatagtaaataaaaattatattatgtaaataagattttagcattatgtgcaacccacctagaatcgattgtttgattacgaatcgactcatctatcgattaaataaaattgaaatcgactcacctatttattaattaatataaaataaattcaattaaataatattgggaagaagatattagataacagcaacatcttctacatatatatgtgcatatcactatattcggatttgtacgcaaaaaaaaaaaaaaatctcaatataattactattaactatatcaattattcgaattggttaaagggtttaatttcaatttgtttgaagttaacgtgagagttaacctctcttattttttaatataatttttttaaaaaaaaaaattacccaataatttctcataaaccaaaaattctgttatatagccacattttatatagaatagatatattgatattgatatattgatgattgattgatattattacatttttttaaatcttattttctctattttgtaattttctaatttatttatccttttaatttatttattgtattctatttatattgtttttccttaaaaaaaaaattaaaagattgctaattaattgtttaatagttgtcataatcttattattatgttttttttaattattttatcggtttagttcatcaatttttttagcatatttaattaattattatatttttttatttatatttatttactttatctaataaaataatttttttttgtcaaaccaattattataaatttaaatacaaacaattcatattcttctcttctttgtttatttatttattttttttttttttgtattttctaatttatttannnnncaatatatagttatattgatttttttttttacatttaaacaaaaaaaaaagtaatatatgtgttttgaattaaactaataataataataataaaactattgtaataaagcatataaataaataattttaattactatttatatgattatttaaattgttaaataaattctaatcatactttataatt

SEQ ID NO: 149496 - DNA, 609 bp, Cannabis sativa
gcttaagaagtgtctaaagagtagtgagacactaaaactctacctatatggactagaggtggtgcaaccttttacgaaaattgggattattcttttgaaattctatgaattggaattttgcacatgaccattaacagtgtaagagcgagacatgtagtctcaagtgagcattagcaagtgtgtgtgtgtgctatcaccggtttgtactaaaagaatagtggttcaatgctacgacaactaaattttatcaacctttgtgttaactacactaaggtaaaatttaagtcgaaagacattttacctaatgtacctaagcaagacttctataatagtgtgtttttagtcaatcaaagtgcgagaaagttatattttgatataatattttttattgattaaataaatgttataaaagttacaagtttataacaaaagagataatatctaatctagtggagaatttttatattatttataaattatataatatatatatttattgtcggaattttaaattgcattttacaattttgccctacaccaacaaataaactaatcaattttaccaaggtcaatttagacctttccctatccctgacttttcaaagtcag

SEQ ID NO: 149497 - DNA, 579 bp, Cannabis sativa
aattaatataaaatttaaattttaataataaaatattttattcacttacataatcttttgcagtggcttcattaacaaaattgtcagatggctgtttcgtatgaaccaccttccatgcatcaactgcatgctcttcaggagggccccctatacgaacataaacaaataaattaatttataatacattttaagaaaaatcatattttacaattaaaggattaatacttaccattccgtgtcgtatcgaagccaacgatcttgtcccttgcgttgttggatatttcatctgttgcctattcactttgtttttacttgagcggttcaatttttttttttaatttttcattattctcacagaaaatatattacacttcaaaaatatacacagataaaagatgtatatatacacagaacagagcatctcatcaacaaaaaaaaaacccaaaaattaagaatccaaaccctaaatcattaacagtgatcttgaaacaaacaaaaataattttcatagaagaaatgttaaaaactatggagattggagatgactttgttggaacttattttactaggatcttagat

SEQ ID NO: 149498 - DNA, 844 bp, Cannabis sativa
  modified_base (28)..(33): a, c, t, g, unknown or other
tcacggctgctcaaccttagccttgccnnnnnntacacatgcaaacaatatctgtgaatcgacaaactcagtaagaaaagtataaataataatatagcaataactcaaattataatcatgagcccatacacccaaccataaccctatcctcgtgtccaacacggtgctgagtcaagaatattcgtacgacaatactatcaaccataatgtcaacctatacttagtatgttggtcatactccagccatactgatgtgacagcatcgatctgagccaaacatacatctatcagcatccaatataactctatgtaaactgatattgctatcaatgtaatctaacaggcataaataaaatgtacgctaaacatgtaaacacatatgattaattgtatatctagtgatgtgggttattaatttaagtgattgtataattatacactattaagaaaaggagatttcccgacaatttaaaataatcgagtattgtattgtcatcggtatctatgattgacgcctattcgactgtcataaaaactaggtagaataggcgtaggtagaaaatagttagtaacgagatttactgatagtagtaggaagaattaccgacggttttggattatcgcctattagtaggagactctttaaaaacgttgaaaggttaaaaaatcagatatattcaaccatttcagatctaagccacaaaaaataactaccatttcagattgaaatattcaacaatataatgtcccacattctataaaaatagcagattcaaataattctcaaataatacactaaaaatcaccacaaaagaactacagatttataaaaaaaaaaaaaaaa

SEQ ID NO: 149499 - DNA, 572 bp, Cannabis sativa
ggttcggtcctaaatttccaattgtgactatatataccacgccgacctgtcaaaaaacctctgaaaagacaagacataataatatagtccataagcacatcataatataagttccatagttttacccttcttgtgtcaaaatgactaaaatgcccctagctcaccagcggggtcttaacatgtcatatattttattaatttacatataataaattatataataatataattccataataatacacacttaactagttagggtttgctaatctattttcttaatcttaggttattacaaaatatatatgactgtgtttttttatcttggggttgatcggaaatttccaattacttacacatttctcgacagtgccacgaacgttttaaatagagcgacctaatctgcaattcaacccaaaattttgttacaacaatgtaaactatatatgaaatagttttgaattcaatccccactactacaaaattgggctttagaggcggtttttaaggggttttggcgtcggttttgacgaaattcgctaccgacactgttccaggtgacgctatagggt

SEQ ID NO: 149500 - DNA, 549 bp, Cannabis sativa
  modified_base (182)..(183): a, c, t, g, unknown or other
tatttttgaaaaaaattccgtgtgacagtatttttgtaaaaattaactcaaattccagtatttttataagtttctcttaatgaatgggaccaagttatgagtactattggtgcctactacccttttagtgttaatattgttattggtgtaattaagtatcgaatcccatataatttaatatnntaatttttagagaatatcgctaattaatcgcaagacgaatgtcaagtactaaaaatagtgaggaatctttatctcagccaccagcactaactttcattcagtctgtttattattttttagttgaaaaaaaattagttttgttttggttaataagagaataattgacggatttttggaaatatagattttctttcttttttttttttttcttttgataaagtttggaaataaagattttgatttgaaaaaaaaaaattatttttgtttttttggggtaaataccattttaaatcttgtattttgtaaaattattaattggaccttctattttgttaaatgaaaaatagaccttgtatttttcaaaat

SEQ ID NO: 149501 - DNA, 528 bp, Cannabis sativa
gaggtgctttggatacgtggacccctcataccttctctgggaggtatgtttcttactgatcatcttgattaaaaaggcttagtcgaattgtctcaaaactttactcctcaaatccacgtgttgcagccgcgttgatccacatattttggataaaattaagggcaacatttacccccaagccttgtttagtgggaagtaaacgaggcttgcttaggtgcctccggttgtcttattaacttcctggcacgtgctttgggcgcgtgggggtgcatttatgaccatcatcattgcagtttttactttttgcaggcaacgattcgtttcctatgcatttaatgattcggcacattaaatgggtgtcagtcgagtactcaagcgtttccaaccgccttgatgaacggttgtcccaaccgttgaatctgtagaatgcgaatcgattactattctcaccgtacgatgacgcctgatcacagctgcttcacacccgttttggcctataaaagccagccttctcatttcatttagtta

SEQ ID NO: 149502 - DNA, 503 bp, Cannabis sativa
  modified_base (134)..(134): a, c, t, g, unknown or other
cacaatatacacgtagcacaattttattggtccacgtaaataattatattaaaaaattaaaaaaaataaaattaatttaaaattaaaaaaaatataaataataaatttgttttttcttttctttctttcttttntttttcttttctttctttttctaatgccctttctctctctcgctcgcatgtagcaccgtagcagcaagcagcagcccaagacccaggtgccatctctctcgatctccctctctcttgatctcagccatctctctcgatccccccctctctctctctctctcagccatcttctctttctcgatcctcctctctctctcagccatcttctctttctctccccaggaccaccgagtcgtcgccgtcgtcgtcgaggaccacggacccaggtgctgtcgccgttttcgagaccaccaagccaggtaaaacccgaccctatctctctctctctatctgccctcctctctctctttctctctctttagatctagg

SEQ ID NO: 149503 - DNA, 589 bp, Cannabis sativa
aaagccaacgtaccatgaagttatagtttaagctccttgaaagcatctcttttggactcctaagattgagaaaatcccaattagggggaagaagagtttgaagttggcaccagcagaaaactccatatgcttgggcaaatttagacccgacctctcctactgcggtcgacaaggtctcaatggccttgctcgaagaagcagtagcgggggtttcctcgtgacgaggagcattggcgtcggaaacaactggaggaggaacttgttcttggatctcgttgtcagagacctcgagatcgatgggctcgtccagtgatctcttcttatgggcagtggttttcctttgcctcttgggaggaaccacttcagcagttgtagggaccctaagattggttgcccttttcttccccttccggtccatgatatcttcataacccatgtctacaaaacaagacaaagcgttgtaattattgaaaaggccgatgaaaaaagaaggaatacaattttccacctaaggggtttaccaaaatcactagaaggcaagctatcactagatgaaggggtagaggaaccataatatccactaaaatcc

SEQ ID NO: 149504 - DNA, 755 bp, Cannabis sativa
aggccttcagtattaagaataatggaggcaaacgtaaaagtaatagttctggcatgattggtggaaaaaaagggaagtttaacacttcccctacaccactaaaccaaagggagaaggaggagaagtacacatgcttgaccctcctaattgaaagtcctaagaccatttacatggcaactcaagctattatcccatacaagaaacctcattcaatcaagaaggacatcaacaagagggacatgtccaagttctttcgatttcaaaatgacttcagccatgacacaaatgagtgtacattttaaaagggggattaaattcctattaaggaaaaataatccccacttgcgttattatgtacaaaatgaccaagctcaaccacaagatgtccacaatggagacccaatgccaccaccagtggcgggtaacttgggagtcattataggcagaaaccacatagcacgttaaataagcaaagctagggaacgctatgcttggaccctccatcatgagtaaaaaagtgtcatcctcactgtggaagaaagagactccaagctaatcaagctaggagagcgtgccatctcttttacaaaaggagatgttgcacaggtcaagtttcctcacaatgaccctctggtcattactacacaaatagggaacataacagttgctaggttcatggttgataatggagcctcctccaacattctttctatgtcaacttatgaaaagatggggctccaactaatagacctagc

SEQ ID NO: 149505 - DNA, 745 bp, Cannabis sativa
tattgacaacctcgagcctaattagaatgcttgggtcaattttttttcttttactttttctttattttttgaaataaaaaaaaatgtttatatgtttgtgattgtgtttcagattcaagagggaaggcacatttactagtatggaggtgaagatatggaatcaataaacccacgaccatactagccacatcttccgagtaagcgttcccaacattggccaccgaaacccctcggcgacggcactcgaccaagttgacctgattgacgcccgcactggaagtcaccaccattcgcaacgctagaagcagttggagtaggtcggcgttgacggaggtggcgtggctggcaatcatcgctcggactgagtttgcatgcatttctcttcaaaaactggtccataggtagctccgactccaacgctttcgccaatcggaagttttgaatatcaaacatgatgagaaaatagtgggtagcgtctttacaatcagtaggagatggggccgagatggtttagaaaagccaccgaatttgaagtggaaggagaagagtaaaacaaaatgtaaaaatgaatttaaaaagtcagttaaaaaatatttatgtaaataaagatttatagaattgaattttttttaaaaagaacgtaaaagtgaaaaaaagttggaaaatgtggtacaatgggtaatttcccttttttgtttttcgaaaaaaaaaaattaattatttttttgtgattaaaaaatttaaa

SEQ ID NO: 149506 - DNA, 642 bp, Cannabis sativa
ttcttcataagccttccttttaagcttaatgaagatataaaccctacaaaggctagtcacccaggcatgaatccagaacaccaacaaatggcgtccaatgagtacaaagagctagagcagcagggtttaatagagtcaacttcctctccataggcatgtcatccattttatgtcaataatcgatcagagcaagctcgaggaaagcaaaggttggtcataaactacaagcccctaaatgagttcttagcaaatgataaattcccaataccaaataagaattcattgtttgcatgtttatccaaagcccatattttttcaaaatttgacctaaaagcaggattttggcaattaggcatcaaaccagatgattggcccaaaacaaccttttgcattccaaatcattatttccagtggaccgtcctacccttcgggctcaaaactgccccttccctattccaaaaggctatgaccaaaatatatagcccaatcttggaaaaggctctcatctatatattgacgctattttacttttttctcctgatacaagagcccatcaagcgttattggcccaatttgcttctatcattagagcccatggtatcatgttgtctgaaaaggaaatgatcattggacagacgcaaa

SEQ ID NO: 149507 - DNA, 815 bp, Cannabis sativa
  modified_base (134)..(134): a, c, t, g, unknown or other
  modified_base (670)..(673): a, c, t, g, unknown or other
agatctttaaagttttacccaattagttttgagccaatgctagaaattcctgaaacttctcaaacgttttagatttcttatgcataagttaaatatgaccatatctaatataatcgtcaatgaaagtgacaaantactcataaccatctctagctttgacattcagtggtccacaaagatctgaatgcactatacctagtggttctttggcacactctccctttgcagagaaagaatgttttctcttttgccttctaggtaagactcacaaacaggaaattcacctaaggtgacatttttcaatggaccaactttggttaacccgtgaagtctattatagcctatgaccaagacgtaagtgtcatagatatgtttcatcttcattatcaatcttttgctttttgtggtttctaagtttagctttcttaaatagtttgttattaagcgcaaatgattcatctggtctaagaacataaggcctttgttccatagattcaacacaaaatttgaatgtcatttcgagaaatgatagaaccagaattcaaaaaattcaatttatattgttgcaactgtaaacatgaaatagaaatcaagtttctactgaaatttagaataaacaaagtattgtctaaatttaaaattctattctgaaacttgagttttgcttttnnnntagctctaaccgatgccatttcgccattaccaactttaagtttcaattctctgaatattaaattattccaatgttcaagcaactgcaatgaacaacagacatggttagtagatctagaatcaacaatccagatggatttgtc

SEQ ID NO: 149508 - DNA, 577 bp, Cannabis sativa
agggcacaaaacccaacagatttcccctagccgaccactgccataaggaaatggcagtgctctctaattttggggggcactgccacaaggaggtggcaatggtcggccatgaagaggggaagtgagatttttttccaacaaggagttttcatcaataatatgtcaaaactaagtgaaagaagacaccgagtggtaaacaaaccagttggccgaccactgccataaggaaatggcagtgcccacaaattttgatgggcactaccacaataaagtaacagtggtcgacccttccataagaaaaagagtttcattggccaaattgtatttttaacatccatgtatcaaatacaagtgagaaacgccacccatggcttgccgcaagccatggccgaccactgccactatccgctccaacttgtggcaatggtctcccgatagggtttcaagcgtcaaaatgaggtttttgggtcctgagatccctaaaatatgaatcaccatcaaaaaacgagtcaaaatacacccaaagggattcgagaacatgcacgggcaagcactgccatttggccatgtcagtgct

SEQ ID NO: 149509 - DNA, 793 bp, Cannabis sativa
tgaattgtcctttcggactgtccatcattctgaggatggaaagctgtactgaattttagtttggtaaccatagcccgctgaagactctgccagatttcaaggtaaactttagatctctatcccatataatgaactttagagcgccatgtaacctcactatctctttcacatataactttgcatattgatccactgtaaatgttgtttttaccggtagaaaatgtgcaggcttcgtaaatcgatctaccacaacccaaattgaatcgtacatttccgtggttctaggtaacccaaccactaactccatagtggcatcctcacacttccactcaggaagtgccagtggttgcaataatcccaccggtctctgatgctcagccttaatctgctgacaagttaaacatcggaatacaaattctaccacatctttcttcatcccgcaccaccagtagtagggtcttaaatcttggtacatcttggtagtgccaggatgcagtgaataaggagtggtatgagcttcctcaagaatctcatttctaagttccacatcacttagaacacaaaccctggtcttatacaacaacatctcattatctgacaccataaaatctttagcttgaccagctaaaacgtcttctcaaaacttaactaattccggatcagctaactgagcattttaaatttgttccaatagatcaaattgtaatgtcaagttatgaagtttgctcacaacaaactcaatgcctgatttgaccatgtcatctgctaattgaggtgaaatcttaatcatact

SEQ ID NO: 149510 - DNA, 589 bp, Cannabis sativa
tccctttggatacaattttaggttgaaccacttcgggcttttgaggagtggaaaccttggaccttgttcgagaactcacagtgggcaaagtcaccgtagctttgtcgacatttggagcaccattcgaagaagaggacttcgacaatgtgtgatcggatgaatgagattcatcatgatcaccaaacctaggtgttgaagaagcaattggagaagcaacaacaggtagaaaggcgagattgatcactgattttcgagcttgggtcttcgattttctagcagatttcgtcggagcagaggacgaaccagaagctccggtcactggttcaggcagcgcaggaggggtgatcggagatgcagaggcaaagccacgagagggcttcttggacgattgggcattcttagttttggccatatctctttgaaaccctagaacacaaacactctcacactttgaaaaaaaaaattagacctttggaaaaaaaaatagaaagataagtgagagtggtgatcgtgggtgagtggatagttgagaatatatacacatgattttacttacccaaaataaaaaaaatgaaaaaggaaagtaact

SEQ ID NO: 149511 - DNA, 923 bp, Cannabis sativa
  modified_base (45)..(65): a, c, t, g, unknown or other
gcaacataaaatgttatttcggatctttattaataagtaaatctnnnnnnnnnnnnnnnnnnnnntttagggcataaaaccaaacaggaactacgagagagcatacccaagagttgagttttttaaaaagacttcaaatataaatccaaggctcgttacaaattttaaagcttaataggttggtccaaacaatggaacttgttgaatttgttaaagccaagctttagttagagctcatcgatttgggcctagaaaggtgggatcaacagttatccaccccttaaacgcaatacaatacaattgttccaaggcctttacttgaatttttggtaattcgtcctctttacctctataatcaataacttctcctttcgtttattgtgaatatggaaaattcttggatatcgcatgatgactaatagaggactaaaataaaagaaatgtcatggtttgtgctttaaatgtgactagaacatcctttagggtttatgccttgaaaaggctataaagacatttctatttataaatataagttgaatattttcatatgtgattgaatattaaataatttatatataaatatcgaaatatgcattattaatacatgaagttaagacttgtattgtacggagagttaagatcacttagccatggataaaattgtgtgcaacatgttaaaattatggaatttttaatcaatgcttggtagtgtgattcactgatacctgttattctgtgcaagaaatctcgattcagattgctgatgtagtataatatataagtgaaggcgttgtatatgatagatattatatatgaaatggatcgatatataattaagttatctttgtcaaatatgtcatttactataaagacttaatttatattataaggatgatcaatgatcggcctaaatcctaagtaat

SEQ ID NO: 149512 - DNA, 1019 bp, Cannabis sativa
tttcaatggcgattgattccctactagtgatgatttgcaaccaacgagtaactttgaccaagatcgattatagtcaactatagtgaatccactagtagtctttatgggatgatcggggttgaataacggatcgtacatgccttcctaaaatgcccctagtcattatggaaactgacttttaatgacgattgatacccaatagtgatgatttggaagcaacgagtaactttgaccaagatcgtttctagtcaactatggttaatccactagtagtcttgctgggatgatcggggttgaataacggatcgtacatgtctttctaaaacgcccccagtcattatggaaacagactttcaatgacaattgatacctaatagtgatgatttgcaagcaacgagtaactttgaccaagatcggttctagtcaactataatgaatccactagtagtcacaccgggatgatcggggatgcataacggatgtttaatttattgtattttttgaaaataattatttaatactttaatgtttattcaatttatatttattttttaacattaatttaaactataactattttaatcttgaaaggcatatactacacatttattttttaaaattatttatttgaaaacccaaaactaacaacaataaaaaaataaaaaataaagatcggtttaaacgagttaacccgaccaaatcgacgaaaatcattgggcgggttacactttttaattttttttcattggggttacaattagatatttacaacccgacatttatattgggttggtaaaaatatactatatctcgaccaaaccgatcgatgtacacccgtagttattaatatttggtctaacatttgtcattgagcaacacaatgacaagtgtgtagtcttatcaatggtactacatcctagcaaaaaaaataataaataaagacaacaaaaaaaagacaaaagagttaggtatataataatcatccatctccatatatatatatctcactactcaataaa

SEQ ID NO: 149513 - DNA, 704 bp, Cannabis sativa
ttttttttttgagttagtaatagtcaaaatgataatttattttttaaaagttaaataaataattatattaataattgaattaataaaattttatgattttaaaatgggatttataaaatactgggtaatatataattaatatgtcaatatattctactacacattgtttcaatcaaaaaaacaaaaaaaaaattatcagcgtattttaaaaaaatgtgtcaaaaaaataaattaaatatatatatatctacatctacaagcaacatacatacaacaacaacaaaaattatcaggaataaattaaaaatatacactataaaaaatacacatgaataaaaaaataactaaaaaataaatgttcaacaaaagaaatctgataaccatttaaaaacaactaaaaaataacgaaaaataacaaaacaaatacacatatacaattatacacaacaacaaaaattgtctagaataaactaaaaatatacacgataaaaatacacataaactaaacaataattgtaccaaaaaaaaaaacacataaaaacaacaacaaaaaaataattataaaacacctaaacaacaatataaaaacaactataaaataacaaaaagaagactatataaatcaacaaaataataacaagacatcaaccttgttacaatatgcaaatcattcataaatcaactctgaataaactacaaaatat

SEQ ID NO: 149514 - DNA, 792 bp, Cannabis sativa
  modified_base (414)..(418): a, c, t, g, unknown or other
gatatagtctaatttaggattataattgattaattaaaaccaattaactgaatatacaatcagtaatatctcaactagtgtggggaccatgtccctatataatcaagcttccaataagtagctctagaggttaccaagtaaattctctaaattattaattccttcttgcgccacaatagattcagaattgcactcttaattacatagaatagactattacaaaagatagatgcaatttgaattacccattgtttcaatccaaatagtcaaagatcctcaatagatgatctacatcgagtaaggacaaatttaccattctacccttcaatgtattgtatccttataatacttagctacctataaatgaatttcagtaaactaatgtaattattgaaatgaggcctcaatcatttnnnnntattaagccaagcttgaaggaaataattatttcacttgtataaattatatgattccatatctatgattagtgctcccactcaattgcactacaatgttcccaagatgtaagtattaggccgatccattggccagctttagcgaacaactccaagaacataaataatacagttgagatagaacctaaccatatcaggattaagatctattgacctaagatcaactaactgatattgacttagatagatataacgataagtttatgatattttatccaattttaaaatcgatccagtccgatgtatactccatacatccgattctagcatacttttccaatgtcctggaaatgacataatacttatccaaggtgta

SEQ ID NO: 149515 - DNA, 922 bp, Cannabis sativa
aacatgaaatctatatagaccacaagagtctcaagtacttctttacttagaaaatttaaatgtgagatagagacaatggttagaactagttaaggactatgactatgagattttgtatcatcccaaaaaagccaatatggtcctgggcaggctttcagtaccataaagatctcaccttagctggcttcagatttggttagagctggtattgaattcttggttgggaaactacataacctgagcccctcagtcagacttgttagaaagaatcaggtaggcacaattggaagactctgagctagtcaagattcgagaggaggtattagcaggtcggcctaaggacttctcaatctcgaacattggaatgttactttagaaggctcgagtttgtgtttcgagtagtggcgatctcagaaaagaaatacttaatgaggctcatactacaccttactcattgcatttgggtaccaccaatatgtaccaagatttgaaaccctattattggtggtgcaaaatgaaaaaagatgtagtagaatatgtgtcttaagtgtcttacatgtcaatagattaaggcaaaacatcagaatttggctgggttattacaaccattaacgcttcctaagtggaagtgggaggatatgataatagactttgtggtgggtttacctagaaccacacaaggcttaacaaatgatcaagaatgttcttaacagaagtacgacctctgtaccacatgcatgaagtaccgctactatactagtgttggtaatgctgaaccatacctcgagtattactgagagttgtactaatttactgcatacttaattgtactagtattggtaacaccgaatcgtatcctttgaacatcatatactgtaccaatgcgctcagcactaataactgtactagtgttggtagtata

SEQ ID NO: 149516 - DNA, 635 bp, Cannabis sativa
aaacaactatattttgatcaaatatacagtacttttgggtttctccaatgctcgtaatcttcctgtttaagtagttagtaaacttccaaactttttgacttccgagcagttgtcaattctgcctcgcaattgcatcgcaattgcaattataatctgccctaagcaatcttaaatatactttaaggattttatcactttgtatatttttaatttgctcgtatgaatatttatgttatctatttattttctaggttaagtaatttatcaaggcatcgtgatgcctcattttgtactttcctagctccctagaactgttagtattcagttttatacgtgacttataacttttgatttttctctcttgttggataggttataatcaaaaattatagttgtttgatctcttctctgtaaaaaaagtttgatcaaggtgttttaacaattcaacccatctctcgtcaaaaaggtttggtcaaggagttataacggttagactccactttcgtcaaagaggtttagccgaggacctttgaaattaaaaaaaaaattgaaatgatgggtttgcattatacaatgtatttccagataaattttggttaatcatacataaatccccttaagtaatttttaaagaa

SEQ ID NO: 149517 - DNA, 692 bp, Cannabis sativa
tacaatgctcttgcttgattatttttcaacaattggtatcaagagccaaagttattgattttagggctcaattttttttttcacaaacccattttctcaaatctaaaatttgtgatgatttttcggattaatgtatttaaggttgtgtgaatatgagtattatcctctaaatgtgttcatatatgtcttggaaacaatcttttatattttttattgagatatatatgagatttaacaatggaaacccattttggattcatcattttatgatgtattattttgtgttttttgagtaaatgggtattggaaaatgatagaggattaaaaatgagacaaaacgcctcaaacggcgtcgaatttggtggccggatgtgggagatatggtcgggtcacggagaggtcacgaactgggtcgcgtgacccgagtttcagacccacggtcaatttctgggcgaaagggacgaagaaaaacgacctgtcgtttttcagccttcggaaacgacgtgtcgtttttggtatttgggaacatccaaaaacgacgtgtcatttttgcttatggtatctttcccaaaacgacatgtcgttttgtgtctttggattcaacctcaaaaatgacttgtcgttttcttgtccccagaggttcctgttgggttatatgccctaaataaaactctatttcaatgtaatccaga

SEQ ID NO: 149518 - DNA, 644 bp, Cannabis sativa
atatagatataattcaatttcaagttaatcaagatcttttgttgaaagattgtgtttcattgtgtattaaactaatctcattgtgacacattaattaatttgagcatgaaaaaactgtatatataaatggttaattttcaaataaataaataattaattgacgtgttaaacttatattggtttaacaacacacaactttttaacaggattagaaatgtaacacaacagacataagtctcttgtatattatatatgcgaaggcatgtaaaacagaactattgtaagccttttggcccaattttatagcaacaaaagtgtaatttttcgagcccattggcccaattatttggcaatgaagagttttaaaaaaagaattttgttatttattattattattattattattattttacaggagagtaaatttgaaattaaaattttttgttatgcatctttaagtagttcttatttggagggaaatgggtcttagagaaaatataaacaggccaccttataaacaagaacaaaattagcaatccagaatacaaatttattatatttaaaattattaggggtattatcaaatcgctcaaattgcccacactgcaaaaaaatgtggtataaaattttttgcgatgcggtcg

SEQ ID NO: 149519 - DNA, 551 bp, Cannabis sativa
  modified_base (385)..(388): a, c, t, g, unknown or other
ggccagcgatcaaagcttcatacttggcttcgttattggatgccttgaatccaaacttaactgcagcgtgcaggtgttgccccccgggtgtgacaagggcgattcctgcacaggataggttatctgtagccgacccgtccacatgtagtttccaagtcggcttgtcttcactgttacttggctgaggtgttagtactggcttagggttgccttctgatatgctttttctttgcctgtgcattctaccacaaagtctgctagggcctggcctttgattgctgttcggggttggaaggtaattttgtactgacccaactccactgcccacttgagtaaccgtccagaagcgtccggatttttcaatatttggcgtaatggttggtcnnnntacacccgaacaggatgagcttcaaaatagggccttaactttcttattgctagaattaggtagtaagcgagcttctctatcaatgggtaccggcctttggcctcaatgagtctcttactgatgtaatagaccgggttttgtatgttgttttcttctctaatca

SEQ ID NO: 149520 - DNA, 556 bp, Cannabis sativa
aatgatgtgtaaatcgatgatattcatcatccaacaacatgcctttgatacacattttgaccagatctttttcagccatggtctcatcacaatcaagagcttttttcctaaacttttggacgtaattaacgagtctttctccaaagttttgtctttctcctgataagtcagctatacttcatttatcttcaatcataaagagctttgcacaaaattgagagaccatgtcatcccaactccttatactcactgatggcaaactcacgtaccaagagtatgctcgatcagtgagagactttgaaaattctcggattcttaattcaaaatcatgcgcataaatacccaaatcatctataattgaatgatatgttctttggcattgccaaatttcccattgtattttcgaaataccgaactcatgtaaccgtgagggtaaggtttgactgcaacttctagtaggtggatgaaagtcgatggaagttacccatgatgatgatttacccctttcggctttaaggagaccaatcaattcgtcttttgtgatgaactcagagga

SEQ ID NO: 149521 - DNA, 549 bp, Cannabis sativa
  modified_base (339)..(341): a, c, t, g, unknown or other
cgacaaatgattcaaattattgtcggtaccactaaattgtgagtcacccactgtcggactaccacatccttaaaaacattatcgaaggcatgatcaagagaaaagagattgagattgattcctctcttggaaaagcggcgacaaatacaacctccttaactgagaatgaccaaataccaaacaatcccacacaaagggacataatttctgtaacatttgaagttgacaaggaagttacaatagtccaagcccactcagacatgccaaagccaggaaacccaaatattcctacgttgtatgaacttatgacagagcctaatctagaaatttgggaggacnnntatgatagtgaagaggatttagaaagtacatggcaatcatgtactcggaaaaaacttgcaaaaattccatttcagaacccatctggaaacttcagagtcaaattttgggctagactagatataaaggatcaaaagaataagaaaatgattggaaaacaaaaggtcgtttccaaaagaaatgaattcgaacaaccaaaatgaaatctag

SEQ ID NO: 149522 - DNA, 847 bp, Cannabis sativa
  modified_base (33)..(35): a, c, t, g, unknown or other
tctaatgtgctagccaaatttcgggtataacannngccccttaaaaagttctttttgataaaaagtgctttttaatgattacaaagggtatatttgtcatatttccttttgagaaaacgcatgtcctctaattttggcagttttgcggtttcgaggtacatcaacattaaatgaccatcttttccacttatactttgaatattgtctgtaggatcaaacatctctctgatccgacgaaactgacttcaagggtataaagtaagaaaaaggaaccacctttgcattatttcctccattttaaaaattctgagaaactcttaagcttctttgctaagaaacaacttcgagtttgcctgagaatttgcatggcatccctgtccttgacattttttctgcgagtttcctctgacttcacattctcaaagagatcctcactgcattcaaagattcgcaggccgaagagctatctatcgccttaaatcctaacttcaaacagtaagtagtttttcttcttgatatcttacaagcttgttacgttgcatttttgggtttaattgctgcatcatttgtttgtatcgtcaccatctcatttggttttagcaatttttagggttgaaatgtatttgtgtcaacattagggttcaggcaatacgtaggttttctcagaaccttcaactcgccacctttaggtttgataaaattctttccagggattgggattgctttcttcttgcagcaatgtcccaatctcgatcataaatttatcgtccagaagatttagaatttgaagttcctacagaatcaaacgtcccttataaacccaacccttcaaaacccacatccaaat

SEQ ID NO: 149523 - DNA, 1289 bp, Cannabis sativa
tgggttgtttgagatatcttttctggggcatactgtcgggaagaatggaattatgcttggtccaagcaagatcaagtcagtgaagaattggccgaggccaaaatctgtaacaaaagttcaaagtttccttggtttagctggtattatcgacatgccgtcaagggattctctaaaatctcgatgccattaactgagttaactaagaaaaatcagcgttttgtatggtcagacaaatgtgaagcaagttttcaggagttgaagcaaccgttgataaaatctcttgtgttagctttgccatcagatcgagaaaagttcgttgtttacagtggtacatccagacagggtttgggacactactgcaaaaatgactttttgcttcagttgtaaaatgacacaaaaactttttgtgtcggttgtgtaaaccgacgtaataacagcagacgcaaatagtcaagttatttgcttcatttctaaaccgacgcaaactttcaaccgaagcaaaaagtactctacattagcgtcagttttggaatgaagcaaaaaacttagcttcaaattataaccgaagctaattagattattgtgtcggttacaacttgacacataagtttacataatttttttttaactttttgtgtcggccataaagtgacgcattgcggtaggtaggggaaaattacatatttctttgtaacactgcctggcctccccctaatttcctctcacggttcctatcccagcctcatgagtagggaatttcagacacaagtgcctgatcgacgtgaatgcaccgaaatccaccagggtcggtcggccgaggattgcgttgtaagtcgttgggcagcccaccatcataaatgttcggtacttaaaagtgctttggggtgtgtctgggcacaaggtgactgggagcctcacttttcccatcgggataagtgttgttccattgaacccggtgagctgagaactgcttggtgagaggtcccggtttgtgaggcctgttgtcgtgaaggcttccttgaagagtaagttcatagaactcccattgtcgattaagattctggccacaatcttgttggcgatgagagtttctatgaccagagggtcatggtgaggaaaatgcactgtcttagcgtcctcttctgtgaacgtaatgggctgatccattagtcggggcctttgagccgcaagttgagtaacttcccaaatctcactgtgttttacggcccctgcgtaacgtttcagctcctttcgggtagtccctccgatatggggtcctccggagatca

SEQ ID NO: 149524 - DNA, 664 bp, Cannabis sativa
  modified_base (464)..(464): a, c, t, g, unknown or other
cacatccattgttataattctaataatcaatgattctctatagatgatctacattgagtaagaacaattaaccgttccacccttcaatatattttatccttaaaacactgagctacctataaatgatatttcaataaattaatataattactggaatgagtactcaaccatttatctctattaagctaagctcgaaggaaatcattattttatttctatgcatttttctatgattagcgctcccactctaatagaacaaccacgtccttaatctgtatgtcacgagaagacctattggccgactttaacgaaaaaattggaaaacataaataatacaactgaactagaacctaactatctcaagattcagatcatttgatctaagatcaactaggtgatattgaatcagatagatattacggtaaatttattatatcttatccaagttcaatatcgatcccttncgatgcatactccatacatctaatccaagcttactttaccaataccctggaaatgacataacacttatctaaggtgcaagtaaactacattgtagattatcatatctgtgaaatctgtgtactgataaatcataggaattcatttaatcacataatcttaattactttccactgtgttgacatcacaataatcaagaata

SEQ ID NO: 149525 - DNA, 903 bp, Cannabis sativa
  modified_base (735)..(762): a, c, t, g, unknown or other
aaattaatgataaagttattgtttattttatatatttttatcaacaaaattaataaattattaaatttgcataaaatttgtaattgtgtatgagagtacaatgctaaaaagtggtggaaatatatcataattttattttttgtactaaatattgcacaatttatacattttttttatcaaagatatgattaacaatgtagaaaagaacatatccaacattttgtagaacccttttttgttttaaataaacattttttgaagtggtatgtggttgattttacagtcataatggatgattaatttttcttgcaccaaagtggacttaatcgttactacataagtagacttgaaatggagacaaacaatgaaaaagcatagacaatattaatgataagtgtcactcaaaagacttgacttataaataatctagaattggatttgttcatataattacaaaataactgtgagaggttgcttgaataatttgtaattaatatgatttggttttggaaatgtttcagtatgaaaagaacgtggattaatggagacaatgatgttttatccatttctactaattttgatttgcattgtggccccatgccttgaaattttatcgaaaaattattattctaatctgttcaaaaattctagtatatcatggattaaatgaatgtaattggaaatggaaattagagttttgttttctgcggtttttctttttattattattattannnnnnnnnnnnnnnnnnnnnnnnnnnntattattattattatttttaaatagatttctatggtttttttcaagaactgttgagacagttatattagttttgagttagttgggaattagttatgttagttgatagtccagctgtacattctgttattcttgctgcattg

SEQ ID NO: 149526 - DNA, 1010 bp, Cannabis sativa
cgtacttttttgttcatagtgcatctgatcctcactaagtgcagattttatattttggatccgatccaatctacataatacctcaaatccaatctgattcaatctgcaaaactacggattgaattaattattttggattggttactttaatattaaattatttaatatttattaaaaaatatttttcttcacataactaacaacaaaataaaacaaaatattgttgctttatctataagtaatatatttattttatcttataattgcattctatatattctataatatatttccattaattacttgattttatggcataaatcccaacaactgtttattataaagacctaatttttatcacaataatgatcaatagtagatcgatataaatccaaagtaatcatgaactcatgttcatgttattagtttctttgattcactctttaaagtttcccaaatcacatgccaaaatatttttttccaatttttttcatagtagcatttgttatagttataatatcatctctgtaagtttttgaaattttttgaatagtttacaatgccaaaaataaagttcatgatattctagtttaccacgcgtaagcttcaaacttattttcagcactgtaaactttaaactaaaaaaaaaaaaaaattactaatgatgttgtaagcataacgactacctccataaaaaataaataaaaaagaaaacatatttcaacatgtgttttcaggcacgaaagttgattgaaaggttataataaaaggttgactgtatttgtaagaaagtaaataaataaataatggagcaattttggttattgtggttttgaatgatgatattatgagttgtttaatttattaattaaattacatgtgtcttttttgtatcacataataattgaatatctgttaaacaaaaaaaaattattaaaaagaaaacaagaaactagtatcaatgatattatttaaatgttaatttaaaattttaatttaataataaaaat

SEQ ID NO: 149527 - DNA, 1017 bp, Cannabis sativa
aagaggacgtacccagatttctttggggaacctctataaaatctctggtgcattcttttctttaatttcctgtattttttactactgtgtttatttattttctgatgggttttttattttctgggcggtggggataatttttttgggttgtattgatggtgttcttcatgttcttcaaagaagaacagtgaagaaagagaggatcgcggcttggggtttattgctgggttccttttctaggttgttgttcttcagagaagaacaaagaaatagatctgctaggttttctaagttggaggtcgtgtatgtgcttagatgaaaagaatgtatatatatgcataggttaaatctagtgctatacacgacttgtagtaattcaaaataaagggttgtcgttttttcttgggtgcttaaatcacagagtcaaaaggtgggtttgactggggtaaaaggtcttaattgaccttggcttttgagtagttttgtgctgtgtgtagggacatttcagagaagaaaatcctacaaatacattttgtatcttttgactatgttgacaattaacgattaggaatgagtgctcttgagttttaaatatttttgcctttttttgctctaaaaagtaatgttttgtgtgcagaatcttgatgtcaaaagattgtatgatgttaagttgttaaaaatgaatgattgaagattcccaactcatgaaggcctccatctattcaagtttctattgttttcctcaattggatctggtcagagcttggagaatttttttgtagaacattctctgatgctttagtcaaatagagaaaatcttaatgagaaggataacatggatttctatttctcaatgatatgccacgagctctagagagagagaataaatctagagatggaaattaggcggttaatgtacggcgaatgaaattcccgcccccatccccgctacctatttatatccccatctctgccccatccccgtctaataaccaacggattcggggtaggggaata

SEQ ID NO: 149528 - DNA, 578 bp, Cannabis sativa
  modified_base (165)..(180): a, c, t, g, unknown or other
ttacaatagaaatatatatatatataataacaacaaataaaaataaaaaaaatatataagatgcaaataaaattatatatcatggcaacaaaataacaatagaaaatagaagttaaatattattttttttttaaaaaaataccgtataataaaaaatacatatannnnnnnnnnnnnnnnatatactaacaataataataaaaatattgttatacccaaaattcgctaccatttcattggacacatgtcagattggaaggagtagggatcaatgcatgaaatggtaactatatttgaaaataaaataactcaataaatgcgtaagtgacagagtatatttacaatttgctgactataaggtcttacgcgagataaggatatacaaactgttgcctcatacattagcgagaaagcatacgtcaacgaatacgcaaggcgaggcttcaacctcgttaagcatgagtacacgtaagtgagatataatgaccgtgaagacacttagcgtataatatacagtatacagactaagtataatagacgggtaaacccatgcaagtgatagcgaggcatccatctcg

SEQ ID NO: 149529 - DNA, 550 bp, Cannabis sativa
actagatatacctggatttttcctttaactactaagtcccaagcctttgatgtgtttcttataaatgcatggtagaaaagcaatttaaccttcccattaaaaatgttcaagccgattggggtggggaatatagatcttttgctagatttctaagagatcaaggaatatggtttcaacatccatgtccacatgaccatgaacaaaatggaagagcggaaagaaaacatcgacatattactgaaactgggctcacactcttagcacaatctggcttatctcttgaatattggtggtttgcctttcaatgtggtgtttttacaataaatagaataccaactgccgttcttgattacaaaactccatatgaatgtttgtttggatctgcactagattacaagattctaaagaattttggttgtgcttgctttcctcatttaattttttttaggttagttgtagacacttttttttttcttttaggctaaaaaaaatatataaaaaaatttccataaatttaagtttgtaaaatattttgcaaaaaaaaaaaaaa

SEQ ID NO: 149530 - DNA, 625 bp, Cannabis sativa
aggttggtaaatatgatgttcgcagacttgattggagataccatggaagtgtatgttgacgatatgctcgtaaaatctcaacatgcaagagaccatgtcaaccatttacatgcaatgattgaaatactgcgacgatataaaatgcggctaaatcctcttaagtgtgtctttggggtcggctcagggaaattccttgggtttatggtgaatcagcgaggagtagaggcaaaccctgcaaagatcaaagcattagtagaaatgcgatccccgactaagccaaaagaaggccaaagtctcataggtaaagttgcccctctaaatcgttttatatcacgatcctctaataaatgcaaagagttttttcagatcttaaaaggcaacaagaagttccaatggaccgagaaatgcgaagattcttttcaagcactaaaaacgcatttggggcagcccccaatcttgtcaaaacccatgtccggagaagttttgtccatttacctggcggtgtcagaatatgcgattagctcagtattaatctgcgaagatcaaggtcggcaatacccggtgtactttgcccatagcattgaggttttaacaaactgccctttgaggcaagtcttagcaaagc

SEQ ID NO: 149531 - DNA, 1158 bp, Cannabis sativa
agagtatatatagtacaacattatacttggactacagataatcctattgttgtaacaatctcacctaatattgtattacgttttattttaaaaaaatatatattttttcttcaattattaattgtattactttaaataaagtagaaaataactagcataaaatttactatacgtgcctcgcacgtagctttttactagtatatatatataggaattgagggtatggtttactttttttttagtatacataaataacactattataagcaggaaagaaatcatccattctgaaaatagatctcaccaaaaagctagaggtttgtgaaaaataacaactttgagccgcccttttatatacaaaatctagtgacaagatagctaaagattgggaaatctaacggttggaagatgggcaaaatatgaagagatgaatcataatgatcctcgaaactgtacaactgctagaatcaaaggatgcgtttttcccaagaaaggattttgacgaaaatgtcctttgtaattattaaaaagctctttttactaaaaaagaactttttaaggggcaaattgttatacccaaaattctgctgccacctcaatgaaggacacgtgtcaagatgaaggaaatgtgaatcgatgcaattgctcttatggaataactcattaatcacataagagtcagagtatatttgtaactcgctgactgtaaggtcttaggcgaggaatcaatgtacaagctggcacttaatttattagcgagaaaccatatatcgctaaatgcgaatagcgaggcaccggagaaagcgacacatatcaatcgtgaaaatccttagcgtccaatgaacaaactaagtgtaaaagtcggatcgactcaagaacaagcaagagaggtgaccatctcgctatgggaaggctttctatagcttcatccagctaacgggagcgaggcttacaaccctggcgattcaaaagaattctttgtaaataaccgcgatcgacacaagacatacctcgtcgacctcggaaggaagaatggtcccagttcgctatttggatcactataacgaagtttctgtcgagacatctccaaatacaacaactaaagatgtgtttaatacacggttattttgacccaataaaagcgggaaaatcacagct

SEQ ID NO: 149532 - DNA, 500 bp, Cannabis sativa
tagtaccaaatatttttcgaagggttaaagattatatttctttaaatttttgttttttttacatttcaaaatatttttttatatttttaaaaaaatctacatagcaaccaacatagcaacttaaattacaatttaaattgacatagcaattcacatagaaaccaccataacaacattggagtaactctaacagtaaaaataaaaaagataaaaaagttaaaaaataatatataaagtgattctcctatttctttttgtattaatgttttgtttctaacttaatttttttttaaaagaaaaaatcaagagaagataaaaagatttattttttttaatttttaaaattattttttgaaaaaaagatatatctataaatattctaaaatctatgaagttaaattatcttaaattaaagctatcattttcttcatctttaataattgtgatttgtagtttagattattctcttcattaatttctttacaaaattaagagcaaca

SEQ ID NO: 149533 - DNA, 527 bp, Cannabis sativa
  modified_base (203)..(211): a, c, t, g, unknown or other
gagtttaaaataactatagaatttgtatcagtaataaaaacacatacacatacaaacataataaatataataattggtaattggtttatacgataaagtaatgaacttcaactcataaattgcaatttatttgtaaaaaaaaaaaaaaacattataaagtaaaaaaattgtttgcaatattatgagaaaagaacagggaatannnnnnnnnacttgaaatccaaattgttttaaaatttaaacaattaattcaaaaattaaataaataagtgagcttcttctttatctttgacgaactccatccataatccagctttcagatccaactcgctaagacaacatctgagtttaagaagcttgagctataagaagaaaaacaaataaacaaggttattagtccagaattaataatccattttcctttccgtgtatcaccaaaagctgcagcctttttgttcttagctgctttcgcagcttgagctcgcttcttggcatttttccatttcttcttattcttggatttggaa

SEQ ID NO: 149534 - DNA, 684 bp, Cannabis sativa
ttatgcgcttaaggcataattaagttagactctataatcggttttgagataaattattctaaggccttattgtaaataaacgtgtgagcgcaacacgtaggtctatgtcaaatagacaacataggtagtggcatcaatatttatatgaattgtgattatgctgcatattgttatttatactgtcttgctgagccttggctcacgggtgctctactgtacatgaaagggtaagtttattgttgatcaaccatgagatcgcgggctttgtggtgtattgtatatgttcaagccatattagaccacgagggttgggtctaccagaagaaacattttgtagtctttgcttttgccacttaggtcgatgtgtaatgataacttgtaatattttgaaaagttttaaggggatcccaaaactaatgtaatcttttgaaagttttggaaagttaattaattacaagttataattttactctgtatttgtcttaaagtttaaatttctgctcttagctttagtaatcccagtttagtgggattagcatatgtttagtcactgttcgcggtgttcctattgttagggcattagtatcagagctttgacttaaccagaagtgttgtcgacgaggacgtcgaaccctgtaagggggtgattgtgatagtcagtagtcccatgatctgtaaggggaa

SEQ ID NO: 149535 - DNA, 659 bp, Cannabis sativa
tatgacctctcttgatgaattactagacaaggtctgcccgcctaccgctaggcccacaagcggaacttgtgaccggggacttggcggctgaccatttgtagtctgggaagtattcatcgctgaatctttatctgtctcacccagggggatgacattcgatggttgctgtccgacagtttggtaggcttttcgtatcagcacaatggcttgccgagtatgattttctatctcattatgatgagcccttaacgcttccatctctttgtctctccactcagaaaacatgcgtctttgttcctcaaacgcgagatttaccacagcgcggagctcctcctgatcatgatgtagggtgttggtatgaccttgcatgagtctaagagcagcgtgaaggttttggatctcagtatcatctctaatggtcgttaaaatattggtagtaggcggaacgattttgttatgaatgccctggctgggtgctgaactggtattcccaatctcttgcacagcaggcgcgatttcatctacaggagtcgtcacaccatgacctacgttcaacggctgttcaagattaactgctggcggaacctttgcgtttcctgggttctgcaatgtaggatccaccgcctgtggatttgccgaatcaaccaggcccctacgag

SEQ ID NO: 149536 - DNA, 589 bp, Cannabis sativa
aactaatgtaattcttattacaatatctatgttacgaaagtaataaaatgttttaataaaaataaatgccaaagctctattttactttttctttgattataataaacttcttattctattacattcttacactaaaacaaatataataattaccattacaacattcattctattattatataaaaaccaaacacctcttataaggctttggtgtaattaattatgttatttgtaattaaataacgagtcatgaaaacagataataaaacaagaaactaattcaagtcggctcttaattttagtggaccttaggaaaatgtagtatatttttaaaatcaataaaaaaatatgtgtatttttaaattagaaaattattttgttcggtctcctaaattaagtgtttactttatttttaaaatatattatcacaattttactttttctattttacaacacacttttacattatatcatataccatacaccaatttctttaaatacattactaaaacttcacatttttaaaattttaatataatatattcattttaaatatataaatttgtaacgtccccgcttcaagcctcca

SEQ ID NO: 149537 - DNA, 595 bp, Cannabis sativa
aaaaaaaaaaaagatatttttgatatagacatataaacatatttttaattaaatattttgtacataaacatatttttgatatagttgaatagttgtatataaacatatttttgtatataaacataaaagagatatttttttaattaaatagttgaattaagataaaaattatattttttttttattattcacgattaaaatctaataacttaatatttttaaaattaatatttatacttaaatttgtttaataacgtaatgttctatatatatattagatagatgttacgtgccaagtcacgtattctaattttattttagtttttaattttttttaatatcataattttaaaattaataatattcaatttagtgataatcattgaaatttgaaaacataatagtgatttaaataaaaataaaaattactattatattttgtaataataattaaaatattattattattcgtcctaaatttattttcagaattaattcaaaataatattttaaatttaactaattctaaatattaaaatttgaaaataatttttaataaaaaaataaacaatatgaacaaatttattattaattg

SEQ ID NO: 149538 - DNA, 914 bp, Cannabis sativa
  modified_base (131)..(131): a, c, t, g, unknown or other
aatgcccctacttcggtatgttcttcatgcagaagcaaatgaaatcatcagagaaattcatgaaggcttctgtggggatcatgcgggctggaaaactctgcctaagaagatcattagacaaggatattacnggccaacgatcaataaggacacacgagtttgtcaagaaatgtgataagtgtcagaggttttcatgtacctcgcccgccgacagaacttagaatgatgacctcgccctacccattttctatatgggggatcaacctaattggggcattacccactgggcgaggatgagctaagtatgtggtagtagcagtcgacttaactaaatagacggaggccgagcccctcatctctataacctccaagaaagtccttgactttgtcgtcaagaacattatctgtaggtttggaattcccataaagatagtattcgatgatggagcccaatttgatggcgacttgttcattgaattctgtgagaggaataaaattatcaaaagcttctcgtcagtatccaggcctcaggcaaatggacaagtggaagccattaataaaaccctaaaggatacaatcaaaaagaagctagacgctgccaaaggcagatgggttgacgagctacctcaggtactctaggcccacagaactaccgagatgatagttatagggcacactcctttctcgctagcatttggctcggaagccatgctgcttgttgaagtgaacatatcgactcaccgaagagagttttataatcaagaagaaaaccaggaacttttaaaattttccttggatctacttgacgaaaaacaagctaagtcgcaaatcaccaacacaacataccaacaccgagttacaagatacttcaacaaaaaagtcaagaaaagactattcaatgttggagacttggt

SEQ ID NO: 149539 - DNA, 612 bp, Cannabis sativa
  modified_base (447)..(465): a, c, t, g, unknown or other
gaatacatttaatcacataatcttcattacttttcattgtgttgacgacacaataaacaagaatatcaatgtcataaggatttggatgaatttctaaattagataaacacatacatgattacatgaatcaaatgatacactaaataagtaatgaaaataaatctgtttctttattgataattgaatagaaaagattacattgaaatggagttttatttagggcacaaagtccaacaaactttcacttgcactaacataaaactatcagtacatttcaattaaacctaaattcagtctgtgcttttcaaatgtagttgcaatcaaaacattggtaaatggatcaactaagttgtcttcaatatccactttctccaccagtacatcccctcttgcctcgtattctctgatgatgtgatatttcctcactatgtgtttgcttctcttgtnnnnnnnnnnnnnnnnnnngttggctatggctccagtgttataacaaagtaaagccagtagtttttccatttcaagaacaacaccaagtcctgtgaagaactttctaagccagacaagttccttattagcctcggtgacagctatgtactcaacctccatggtaga

SEQ ID NO: 149540 - DNA, 554 bp, Cannabis sativa
  modified_base (288)..(291): a, c, t, g, unknown or other
  modified_base (456)..(474): a, c, t, g, unknown or other
agtaattatattagtttattgaagtatcatttataggtagctaagtgttttaaagataaaatacattaaagggtagaacggtaaatttgtgcctattcgttgtagatcatctataatggatctttcactattaggattgtaacaatggataatcataacgtatctatatcttggtacatatagagtattctatataattgagagtgcaatttaatttcgaatctatagtggcgcaaggaggaattaataagttagagaatttatttggtgaattctagatctacttannnnaagctcggttatataggtccatgatcccctcactagttgagataatactgcttacagactcagttaattgtttttgattaatcaattagaattctaaaattagactatgtcttatttataaatttttagtaagcaagggggtaattgtgaagaaaagagattttnnnnnnnnnnnnnnnnnnnagagactttgtatggtctaattatctaatataaatgatagttttatttgacaattaattataattattaaataaatagtt

SEQ ID NO: 149541 - DNA, 1082 bp, Cannabis sativa
tgttacaattagatgaactaagtatgaggtctcaagctagtcaatcgataacaaaatttgtatatctatctatctatatatttatatatcaatataattttaatcttctaacatctcctttttctctccttttaaacttaatacatacattcattacctagtttatcattaatggttaatctattcggtaatttagtcttatctccctagctagatgttattcttactaaatcttttatagtttgaaagatttgtcaaattttcacttgaccataatttacaaaagtttgaaaagatattactttgaatttatttatttatttaaagattattgagtatttttctttctcacatcatatgtttagacaaaatctcttctaagcacaatgttgttgaactatcactctcacattattttcttcatgctttatgctaactttaaggtcaactcaaatatatattgaaatacataatcttattataaagatattttctcaatatagtgtacttgatttgattcaagattcgcaccttgctagaaaaatttgttagttatttttttaaatactacttactgacatactttggagtaaaacttttgtgaagttgtggttgactttttccaagcagaatatatgcgtaaaggcttcaattctcaaaggattttgccggacaactcaaggcacagacaagtctcaaaggactctgcccaacaacaaactattccctctacaacactatgagaacactctaaaaagaaagtgaccactttttatagagttcaaatactcttttgaatacttgaaaattatccaccaactccatggctatcacaaaatattttattggatgtttatgaacacaaataacaagatcaaacgaccaattagaacaagcaataagttgtaaaataactccaaaatagagtttttatgtacctgatgatgacacatcgtctgatgcacactataggctaaggcgcttttgtagattctgagaaaagggaagaagttgtgagctactttaaatatttaattcttcaacgagtgtagctattctttttctagaaaatctttcaactt

SEQ ID NO: 149542 - DNA, 559 bp, Cannabis sativa
  modified_base (507)..(507): a, c, t, g, unknown or other
tggctgccaaggtgaagtccttagaggagttacaccaggcggacttggagtccagggctaacttggccgtggagctgaaggagcttaaagacttcaaacactaagccttgaagaaggctaagaaagatgagctcctttatcctatctcctgcagccgttgcatcaagcggttcgatgatggcgtctacatggcctggtcaacaaatggccagagcatcaagctcgacttctacccaaaacctgtagagatgatcgtcaaattccgggagaagaagaagaagcttgacgccaagttggaggcgtgcattggccctcgccttcctcctcgcgtcgactaggccgttccgaatccaacccattacaacccaaatttttcttatccttttttttttatttacagctaatttgcttttatttaagacaatccttgtttaatagattttttatttttttgaggggaaacaatggttaaggcctatccccaggccctttgtatatatatatatntatatattttttgacctgcccttagggccatgatttctatatatatatgatc

SEQ ID NO: 149543 - DNA, 1207 bp, Cannabis sativa
  modified_base (157)..(161): a, c, t, g, unknown or other
  modified_base (356)..(360): a, c, t, g, unknown or other
ttaattataagattagatatttacttattttattaataaaatttgaaatgatcttattttgacattaaaatattaataaaacttaaagataatctagatagaatttcaaatacctaactatatcaaattttcaaaatttgttatttttaaaatatannnnnttaatttaaattataagattagataaatgttagttttgacatttttatcttattagtgttgacctcgcttttagccaatgataatgagtcaattaataagcgataagaaatgtaattaagataaggtaagaaccaataaacagtaaagaacacaagattttaaagaagttcggcccctttagttcggtaatagcnnnnnccccttagattgtattaactcaagaacaaagaaaatacagtatttcctctcttgaagctctcacaatgaaatctctgaatgtttacacttagatctctctgaagtaattctctcgaccctttttacagtgaggatggatcactatttatagggctaaatgcatgagggaaggtttcccttttgcttacaatatctacagttggtaagaacacacattacatattcagaatacatagattgagggattcggacagcttgccagatccctttgatacggtctctgaattgtagggattccttttatgcttcacgatgtgagtcttggaactgctaagtcttgatacattgttcggattatctacacttgccttgctcggtcagacagactctttccgtgcagatgtatactaagctctgttcgaaatatctctttagccagatgtaggaaataggagtcacgtgtcacgagtatgtgttgccacatcatagatcgaaaaatgggataacaattaaatatttatcttaattaaaaatttatattttttttattaaaataacatgaaatttttaaaagttgttaattttagtttgaatagatattttagggttttctaaacataaaattttcaaacttatgatattttttattttaaataaaattgataatatcctaaccatcaaatctcctattttcaaatttatttattttgttaaatttaatttattaaattataagatttgaaatatagtattagaaatatctcaatttttaaaattaagatattatattatattatcttattagaatatttgaaaattaattggatatttgaatttaagatattat

SEQ ID NO: 149544 - DNA, 517 bp, Cannabis sativa
taatacgtacaagtttttatgagaataagaaggcttgagaagccaccaaaaaacaaagctaactccatggaagagaaccttgaaacgccgatgaagataagccaaaccggccattaaaatcccttgtgaagctaatagtggaaaacgctgatggaattggtttggaactacacaaaaccaaaggagttacaaacctagaggagctcaatgttgaaaaggagattaactattgagactttatgcatttgggaatcaaattggtgtagctttgcttagtgaagtacaaaattggtatgaattaacggttattgtgttgtagattgttgtagattcttattgcacttgcactactactatatatgaagaaattgataagatatttctatgagctagcaacagcaaaaagatgtgacttgattcactctaccatgtactttaggaggcgtttggttggaagaaatgaaaatataggaataggaatggaaatgggaatagaaataggaatggaataaaattt

SEQ ID NO: 149545 - DNA, 1177 bp, Cannabis sativa
tcaggtttttgcaatacttgttataatggttggttagtgtatactcgaacaggatgagcctgaaaataaggccttaacttccttattgctaagattaggcagtaagtaagcttttctatcaatggataccgtcattcagcttcaacgagtcttttgctgatatagtagactggatgctagacattgttttcttctctaaccagcatggcagttacaacatattctgtaacagctaggtatattcctaactcttctccgtccaggggctttaagagtacaagaggctttggaagttgtctttttagctcttgaaaggcattcttgcattcctccatccattcaaatttcttcttacctcgaaggatgttgaagaaaggaacacacttgcctgttgactttgaaacaaatctactgagtgcggctatccgaccagttaagctttggacttctttagtttttgttggtgatttcatatccaggagggtttgtattttctttggattggcttcgataccttgagcattaacaataaaactaagaaacttacccgagctgactccaaaggagcactttaagggattgagtttcatgttgtattttctaaggattttgaagcattcgtccaggtcctctacatgccccagccttcctggatttgacgagcatgtcatccacgtatacttttatatttcatccaatctggtctttaaacattttattcaccaacctctggtaggtagctccagttttttttagaccaaacggcatgatcttataacaatacagacccatatatgttcaaaaacttgtatgttcttggtctggtggattcattttgatttgattataccccgaataagcgtccataaagcttaggatctcgtgcccagttgttgcatccacgagctgatctattcttggaagtggaaaatagtctttggggcacgccttgttgagatcggtgaaatcaatgcatactcgcctttttttttgtgggcttaggtaccagtacggggttagctacccaaagcagttagaaagcttcaatgatgaacttattatcacatagattttctacctcctcttttaatgcatgtgctcgttctttatccaatagtcttctttttttgttgaacgggacagaagtttggatcaatgtttagggcgtgagatatta

SEQ ID NO: 149546 - DNA, 702 bp, Cannabis sativa
  modified_base (624)..(633): a, c, t, g, unknown or other
tatatctgatgcaagatgaaccctcctgtggatttgaagagggaggaagaagaaaagggtttttgtaataattggggcggagtgagcgaggtggtgatgggtagagaggttcacaaaggtgttggtttagtgttatgttgatatttatagctgagaaaagtgaatgaaagggacttgtgtctactttctctactatccctatgcctattgcctatgcttatgcaataaatactataaaagcatctatttcactaactcaaaaggccacaatccaaaagattcctttggacaatagggtgttcattagaatacatccaatgtttttaagtctattcagatccgatctaattatattggatgttaaattttaccattcgatctgattcaattaatttcgtcatccaatcgatccaacatccatcggatgttggattggatcggttctatctattggatgtatatcatatatatttatttatttattttgggtttatccaatattttggacttagtaattttttgaatcggatcgaatccatcaaatattttagatccagtatgtattggatcggactagatccatttaatccaagaaaaagagagtaaaattttaatgttaatttnnnnnnnnnncatataaatttgacgtataacaatataaaatctaattactcatccaaactaaacgaaaatactaattag

SEQ ID NO: 149547 - DNA, 504 bp, Cannabis sativa
ttattgtttgtcaatttttaggttaaactatgaaatctcgtttttatttttttttctgaaagttattgtcttagtaaaatagtcgtatttctctcaatacctattcgatttcagcgatcttggtaccgttgcaaagataattcgatgatctaaaatttttctgaagaaaccattcaccaattcgatgttattctatgtcgaaaattatcatctttatgctgctattgtaatttgttattcaaaagtactttcacttaaaatataataactctctcaatgctcatccatttttaatgatctatatatagtttcaaagcttattcgatttcccataagcttcatgaaggaaccttttgttagttcagagtcatactatatcgaaaagttagtttccttctgtatcatgtgattcgtttcttgaataacgttcttgcaaatatgttttagtaaaattacaatatctctctgaatataattccaatttcaaagattttggtatcattg

SEQ ID NO: 149548 - DNA, 639 bp, Cannabis sativa
tttatataggaaagtttaaaccctcttacagataaaataagtagatatttatatattaaattagtaaaatacaaaagactaaaaaacccgttagaaataaatatttccatctactttcgtgggctgctagcccaattcgtagtctagcttgctgtccacatataatgttatgcaccaaagtcatgccaggccaagttctggccggccatgcacctgtaggatgcaggctggctggtcttatgctatccagaagcttgctggtctatcactcatcgtctcatttgagtgctgggaccttttggctaggatgctgggtagatgacttgaccttcttcttggtgagttgtactgctacgtggcactgattttggctatgtgaatatgccacgtcaggtggataaaaatcaaaacaacaaaaggagatggtgtagatgaagaatgagtgagaggcatttatttattattttatacaagaaaaggaaaaggaaaaaaattaggggcagtagctttgatggaagtcggatgtaatatccagtacaagtatattattttttggtatattatatataatagattgttgtatatataataggattatatatatatgtaggaatatgattttgtcccgttattgtactt

SEQ ID NO: 149549 - DNA, 625 bp, Cannabis sativa
ttctagacgatcggggaagattggttgggcagctattaagcttgatatggagaaggcttttgacagagtggaatggccttttttaaatcatctgctcaatcatgttggtttccctttccagttttcatctctgataatgcgttgtctttccacggttcaatttcgtctttccattaatggctcgcttactgacactttccattcaacgcgtggtattaggcaaggggatcccctatctccctatcttttccttttaattgctgagggtctttcagcagcaattcgattgcaagaagctcaggctctgttttctggcattcagatttgtaggggtgccttacccttgtctcatctcttgtttgctgatgatagcatggttttctctcctgtccatcctcaggccagtgcttcccttaatgttattcttgatctctacaataaggctacaggccaattggtgaatagagaaaaatcctccattcttttctcccccaatacctctgctgaggcccagtatcagtttcgtcaacagcttcaccttatgggagaaggtttcattagtaagtacctcggtgccccccattgtgttggcagggtctccaattccatgtttcattatctgctt

SEQ ID NO: 149550 - DNA, 862 bp, Cannabis sativa
gaggaaaatcaccccaattcttccttttttttttttggaatcaagctaagtatcaagtgttcttgaggttaaggtaatccctagttcttttgctctttgttttttgaagcattgaactagtttgagtatgtgattttgaaaattaagagttgttagggtttaaaggttgtgtaatttgatttctaagctgattttgagttgattctaagttctggatgttagttttggtgtattgtgttgagattgagcaagtttcagctttgaaactcaaacttgggtctctaatggcatgtttgaattcagtgattttttttgggatttgttggttggaatatgttatgtataccctgtttcggtactctggaaagtttggtggcaatttggcaagttttgagcaagttttggagtggttggggaaacctggtgcaaaccgattaaccggtgtgccaggtcctgtaaaaccagttaactagttttgacagattcctcgaacaactcattttctcaattcttgcccatctcagtgccttagttgggtgttttcctatttcctaggctagtgtaattcctagtgatgacaatagagccttgagttgtagattcgtgtttctcggatcagggttttggaacatgtgatttaccgattttaatatgtgattagggcatccatccagcacgagactttccgttcaggtcggcctactcacttgagtgtatgtgtaatatcaatatctgagtgtatgtatatgttaagtgtatgtgcatgcctatatgttagttacactaccaacacttgtacggttatggtacagagtgtattggtatagtgtatattgttaaagagtacattacggtgatacca

SEQ ID NO: 149551 - DNA, 500 bp, Cannabis sativa
atgaacatttttatatattttatcttatttatttttgttcgctatgttatttatgtacaccatccgcataaaatttatgtataataaatatatatatgttattgctaataatatgaaataactcagttaaaaaaattgatctcacagactaaatatatattgtaatattttatttataataaatgataatattattggtattgaaatttatttattaattcaaaaatattattcaaagtaatataatggaaggtaataattcaatcctacccttttttaaggtatgaacattacatttctcaagggtagttatattactaggggaataacattccaaggctaaaccctccaaacaaacaaggtcatgtttcacattataatatgagatagtttaataaaagtggaattatcctatatattattggaaaattctataatgtaccctctcaaaatagatatattgatacacccctatttattttagcatccgaaataatttt

SEQ ID NO: 149552 - DNA, 1662 bp, Cannabis sativa
tgaagggaaccccttttggccaattttggaaggctgaaacttttgctttctcttcagttttggtgcaccaattaatgctgcacaaaatgaaggttcaagttgagaaggtggacgaagtatagttttacattggaagaaacgaggcaagatttggcgtggttgagtttgctctcataaccgggttgaatttcacgcaagggccatccattgaggagagaaatgctcacttgggaaacgaccgattgttgaatcttatttcaataaatcttggaacgtgaagatggaacatcttactgcgtaattcttaaactgtgagattgtcgaggacgtttacaagctagggttgtgcttgttcgtggagggagtcctaatgggtcgtgagaggaatatagagattacaagttgtaaagaccgcttagccttaatttggaaattagcaaataattagagtttaattatggaaattatttattaattttaaattattaatttatggtgattgtttgaattcagaatgcattttatatgtcatacatagaaatttcataattttgcatattcagtgcccgacaacatgggaatacggtgtttagctattagaatcacatcctagtatttttagtatagcggggcgatatagttagacattggaaatgtcgggaatagtcgggattttagaacttttcaaaatacccttaagtgattttatgaaggttttatgtggacaagggcattttggtcctttttgcccattttgtattttgtccttttgtgtattttattaagtaatataatcagatttttttaagattatgtttttagtaaaacaaagctttttactcatttattttacaaaaaaatcaaagaaaggaaaatcacactttctctccaaactctctctctctctttttcgaactccatagaaccagctagggttcttgtttttcctcttcaataccagtaatttccagcaactctaagtgttttccaagctaaggtaatctttgagcaactctctctttagtttctttgagttttaagagagaaaatttttgcatgaattaagttattagctgttgtggttgctgtagttgtttgttattgctttcaggggttaaattatgttaaagtatgttgaattgaagctagttggtggcttgatttagttgttagaaaaagtttgagttcttgaactcaaactttggtctttaatgggaagttttgattctgtgtatgttaggatgttttgttgccttgtatatgttatttggaatataaagtttggtgtgatttggggttgttttaatgagatatgaatttttgaaactttcttgcactgaattggaattccagttcagtgggacctgtaggaaccagaattctgcttggtccccaagaaaccccacagaaccagttctggttgggaaccggtgtatcggttggggcagttttgggaaccctagtttttcccattcttgagatgttagggtattgctatgttattcatcgatagggaaacttttagtttcaagtttaggtccccggaaagtgattcaacgtgtcacatacctatgttatggttgatgtgatttaggagcctgtaattcgccaagcaattgttccactcaggttggtcgacacacctgaatttggaatcgaggt

SEQ ID NO: 149553 - DNA, 889 bp, Cannabis sativa
gtttgggtagagtttctggtacctgcctacagcccggcaagtcatgaagctgcaagattctttttgactgcctattgctaactttccttgtctaagcttgtcgaagaacttttttagtttgatgaagttgttagctttgttgatgaactccttcatgttattagttgagatcctccggatatctttccagaagtcactcaatggatggttaccccccagtatggccgtatatcggccctcttctgtaaggcctttgaccttggtggcctcagccatgaacctctagatgtaattcttcaaaggttctccttgtcaatggttaactttgacaaggtcttctagctgcgatggcatatgccttgaggaagagaactatgtgtagaattctcaggaaagctcattccaagaattggatcttcctggggcaagcttgaagtaccattgcagagatatttctgacaaagttttcgggaatatacgacatcgcacatcaccagtaatattctagagattgagttgcatcttgaagtacttgatgtgtgccattgggtcttctcgcctgctatacatcttccatatcgacatcttgaacttgggcaatggcaagggcaaggcatttatgtatgccaagaatggtgatccccttgactggtctagctcaaggtctgaaggttttggactagctaggcccttcatcatgtcccttatttggtccaactgtgcttgcatagaaggatccgttgctgtagagacttgactaactggccttctttggatgggctatagactcgaatgtgccagggtctagctgaccatagtctgggaaagtgtatggtggaggtcggccgaccctgtgcaaggtttcaggccttggcaggccactcccagg

SEQ ID NO: 149554 - DNA, 758 bp, Cannabis sativa
  modified_base (418)..(419): a, c, t, g, unknown or other
aacgtctagctagctgtgcgacgcgacgatagataaaaacagcgctaattgggaggcaacccaagttttctttatgttttagttgaattttgttatgttttagacgttctttctagtcttgtttagaaaactggtaaaacaagttttgggttttcttattatttttgtactgtatggtaatgaaaaaaaaaaaaagattttttgggtacgacccagtggccgcggccagatctagtgccgccgcggccaaaagggtcttacagagaggccatttttcgaagcaatctgggcagagaggccatttttttgggcctatttggccgcggcgagcccatttctggccgcggcgaggtggtcagacacgtaaaagcctttaccacataatttcaaaatcaactccctcattctcaaccctaanntccacaccgaaaatacttctcctccaccatatttttttcatctaatcccattcaaaaacccttttccttcaaatctaacaataaatcttcatcctaaataatcctaaacaattatttctctcatcaaacaccctttccctctcaaaatcaaccccaaacccctaaaagctcacccaaacttcaaaaatcactattcatcttcttccttctcaaaaacttcaaagttttcttcaatggaggttgaataaagatggattctcattaaggtaacaattttgagactctctatacaatttttattggattatttgtggattgttagagaattttggaattttt

SEQ ID NO: 149555 - DNA, 862 bp, Cannabis sativa
tatcactttttaagtaacattgttaatccatttaacctacaaaatatcttgttttgttactacagccaaaacatatttacccaaagtcgcttggttccgttagagcaattttctaaatcccaaaccataaatacctccatgatcatctactcatttccataaataccttcaacaaatgtttatcacatcaaatttttgtttcaataagtatatccaagtaaaatatgaatgatcatcaagtaaagtgataaaatacttgtagttcgaatgagaaggaatatgatagtgctctcaaacatcacaatagattaaatcaaatttattttttgcaaagttattgttatttggaaaaaaccattttctttgtttagctataggaaagatataacagtgtgtttgtttatataaagaatttactaagtaaggctaaaaacttttgagataagagtcctagtcttgaataccataggtctacaaagattgccaaaacatgagcaggtggtgaaagatctagcatgtacaatcattcttggttctacctctaccaatcaccttctggttgagtttgtaacactctaatggcttaggcatgctacagcgctatctaaattattgtgcaatctttgctaattaaaatgtttgatgaaaaacaagatttaaatttaaacttttataataagcataaattgtacaatatgtttacaaaattcgggatcatgtttctacattttataaataagtacataataagtatgagcccatgtcgtccaaaagatctgaatactccaggtctaatcgctgagatatgtacaatcttcactaagctccagacttattgttaattgtgacagtcaatagtccc

SEQ ID NO: 149556 - DNA, 531 bp, Cannabis sativa
  modified_base (36)..(69): a, c, t, g, unknown or other
  modified_base (340)..(340): a, c, t, g, unknown or other
tgaaattaaacacataaagtttcagaaaaccttacnnnnnnnnnnnnnnnnnnnnnnnnnnnnnnnnnntcagatctctaacccttgtatactgtctatcgcggagtatcaccaggatctgagcccaaacgtccttctcttgaatctggattcttcacagttccacactatgattgatataccacttgatgtgtgtgggcactcactctatcactcaagggtattaaaatttgaagaagaaaagagagagaagatggttcggctatgggtatagaaaaggtggctcagtttttctctctcaagacaagaaatttcatctcttttaagtgtgagccatcantatctatttataggtaaccactagatttaggttaggaattattaggcattaaacaaatgtaaatattgtgaggaaaatcccttaaaagtcgctggccatagttagtgggccccacttgggtattttcccttattttctcaaaaatgccacttttccaattctaacctatttaaatgccgaaactaattatt

SEQ ID NO: 149557 - DNA, 1790 bp, Cannabis sativa
agtctagtcgcattcgtatggctcacataatgtaggaccaatgaacagtttaagactcgcatgtaccaggatatatgcgagtatccccgagatcctcatgtgaatcatagagatcgatcctttgttatgcgagctggtccagttgacccaacaaccttgataaaccggtacagactcgcatgtcttagtttatcaactcattacaagatgtccgtataagcgacttcaataggacgcagacatcctagactcgactagtctcgaatgcatcttaagcctgcgaacttatgcaagaatgtgaacaccaactcgcactacagaagtcacatacgttgttgtatttagtgaattaagctggaagctattcttcatttattatgtttacattttttagtttaattattgtaattcaatgtacaattagattgataataaattcaatctctgtgtcaatcaaaggacacttgctttgtatataaaggagtgatccaacgtgaaatggaaacgagacagaaatccttgcagcagtggagtaagcagaccgtgatctgactgaatcactatactctcttgtgttctttgtatttccaatttttattaagtattttgtgtccttaatttgaatacttgccattctaggttgagtactcgcataaactcccctttatataattattatatttttattttggtgttgttaaaattccttcaacaacattaagtatatttttttgttaggaaaatggccctaagaccgagacaatagtttgccccttgtgaccttttgtaaagacaaaattattaaatgcctcgtagtttaatatatacttgtttgcttgcgttttcattcacaatttgaacaattatattttgatcaaatacaaggtactttaggaatttccattgctcgtatatccctttgatattatttaactagttaattatctactatgtgtgcgagcagtttgttatctgccatgcttttgatctgcgagctgttatcaattctgccttgcaataacagttatagtctatttcaagcaaacttgaatatacttttaatgattaatcactttgtatatttttgattgtttatatgaatagttagatcgtctactcatacactaggtttaagtacttttttcaagatgccttaatgtatcgtttaaagtagtgggctatatcatgtatttccagataaatttcgattaatcatacacataagcccctcaagtaattttaaagagtaacactttataattacttgaaaaaagaaatgattaactttattcataactaaagttcaaaatattacatcagaaatgtgagttacaatcatcaatttactgatagtagggtcgcaaatgttccatgttccagtagttttttatcagtgagccattcagtcgagccaatttgtaaacctcagttcctactatcatttcaatcacataaggaccctcccagtttgggttgaatactcctacagatgcatctctcgtatttgcaaatactcgccttaggaccaagtctccaacattgaatagcctctttttgacccttttgttgaagtatcttgttactcgatgttggtacgctgcattattaatctacgactcagtacaatttttatcaagtagatccaaggacagttttaagagttcttggttttcttcttgattataaaactcatgtctatgagttgagatatttacttctacaagtaacattggttctgagccaaatgctagcgagaatggagtatgtcccgttgctgtcttctcagttgt

SEQ ID NO: 149558 - DNA, 714 bp, Cannabis sativa
agggtaaaatgggaagttcatataatcaatggtattgatttgtacaaattagtggagggtctaaattttgatattgggggttttattaggggtaaaaagtaaaatttccctttctaaaaggattaaaattaaatacatataaagtatgaaaaaccttacattgattgcagcagagttaagtaactctttccgctcacatgtctaacacttattcctttttgtcgtagagtataatcaagatctgagcctgacactccttgttgtttagattcttcacagtcttacatactatgattgaggattaacttgttatgggtaggcatgcactcaatcgctaaaggctcgaatttgtttgtgaagaagactttaggattcgaaattgaagaagaagaaagaagaagaagaagaaatctcaaactgtctcgttgtctgacaagatgaaaactaggtttttatagtcattaattggattatgagaccactcttttctttttatactaattcacttaaggttaagattgaattatatgaaataaaaaatgataaaaaaacacagccaaaaatagagataagtggtcggccatatgtgggcccatcactagttatatttttactatttttcttaaccatttatctattattattcgataaatgtcatattttctaatttcaattctataaatgccaaaactatttatttaataattataatta

SEQ ID NO: 149559 - DNA, 604 bp, Cannabis sativa
ggcatatcgctcttgagatttccgggagtctcctgcgatatggggtcctctaatgattgttaatatattgtgaggcgttctcgaaccactcgcgttctgtttttcttctatgtcatccgctcagggatgaccttcctcattctttttatatttgttgaacttttccctccgaatcagctcttcgatttcatcctgcaagacccaacattccagagtagtgtgaccaatatctttatggtacttacagaatttcttagggtctcttttgtcgcggtttcccctgatcgggggcggcttcttgaagactccgttcctttcctcaattacatagatgtggtctcgtggcaccgcgagttcggtatagttcacgaagcgcggtgcaccttgcctttttggcgaagactccttctttggaggagatttggccaacttcgggcttcgctgtctccgtgggctgcatcttcttggacttcgacctctggaattttcccctcggggactgcgagatcgtgatcgcgacactggtgacttacgcttgtccttgcccttttccaactctgctagagaattctcaattctctatgaggttcggccatagcgaaga

SEQ ID NO: 149560 - DNA, 783 bp, Cannabis sativa
ttggctccagcaatcaaatgcaaatgggcaagagatgaggacatggctgatggtttcagcttgtagattacaaacaggacaagtgactgaaatatcgacatacttgcccactagttggacacaagttgggaatgcacctgtaacaactctccacaaaaagttttttacttttgggggaaccttcaattgccatacttgtcgccaaaagtctaagtttgcacccatctcttcggtacgcttttgttgttggagcatgttataagcacttttgaccgagaactcacccgttctttccccctcccaagaccatgtattaatggagacatttgagcttagtgggatgcccaaaataataccagaatctcgattattgaacatatctcgtacaaggtcatagttccaagagcagctatgcacatgaaaaagggagctaacatgttggttcattaaaccagggtgtattgttgaaacatatgggttatcatgtacaggtagccacgggtggtttagtatgcttactgtgtcccctgatccgattattcttctgacacccgaacggagtagagattgggtagtccaaatacctctccagacaaagcttgggttacttcctagctctactgagaagaaatcaaaatggggaaagtatctagctttatagacttttccaacaagagtatttggattgcaaagtagacgccaaccttgtttagcgagcatggcaatgttgaaatcatgcaagtgctgaaaacccatgccaccatcgtatttatgagcagccat

SEQ ID NO: 149561 - DNA, 602 bp, Cannabis sativa
cgcatccttcaccacagcaacccaaatcacacctcccagctgctaactcgaaccaaatcccagctgagagtcatctgtcgagccaagttgccatcaccagcactggagtcaagtttcccagccgagagtcatctgatccatcacaacaaatcccactggtttgtcaagaataaattgctaataattttttctattttgatttgttcttggctgtcgagtagtgagtgtttatgtgtggatgttgtgatttggataaagctgatattttggaaattgttgggagggttctgaatgattgaagtaatattgggaaatttttggatgtgatttttgtgcgtgcaaaagggtgccgtgatttataggtgctgattgttggtgtgaaaattttcaatttgaattagtgatcaagtgttggggtttgtcgagtgacatatgtgatcaatttgaattggggcttgttgattgttagtgtgttgttgaacaatgggctgcttgttgtgtttatttggttgaagtgttgaaatcttggatatatggaattgtcaatcatatatacagggggaatttgttgtgttggggtagtgtgcaattgaaaaaaaaaa

SEQ ID NO: 149562 - DNA, 663 bp, Cannabis sativa
  modified_base (488)..(491): a, c, t, g, unknown or other
gttccgcctgctaccaacactcaaacaaccattggagatgatactgagatccaaaatcttcgtgctgctcttgggctcttgcaaggttataccaataccctacataatgatcaggaagaactctgtgctgcggtaaatctcgcgttcgaggaacaaagacacatgtttaccgagtggagagacaaagacattgaagcgttaagggcacatcatagagagattgaaaattgtagtcggcaagctactgtgtgatacaaaaagcctaccaaactgtcggacagcaacccccgagtgtcatccccctgggtgagacagacgaagatcaagcgatgaatacttcgcagactataaatagtcagccgcccaatccccagtcacaagttctgcttgtgggcctagcggtaggcgggcaaaccttgtctagtaattcatcaggagaagtcaaacttgatagttccaaccaggctaacggtgccattccacctgtnnnncaagcaaatcaatcactgagacagctaggcgcttctgtattcgatacgttgggacgactcatgacctaaggagcgatctaaacagaaggagaggagtataggattagattttcacgacgatcgtacagcccagagcccgtgctcgaagtcctgctcagaaagatactgatgt

SEQ ID NO: 149563 - DNA, 719 bp, Cannabis sativa
tttctatctttgcttatttatatgttctctccagttctatttgcataccattttcgtctcctgctgaaaaccctgttaatctcttctgccctaccttaatggcttcctcctccaccaacccaaaccccattactgctcttgatgacgaggacagcctcgttcatgactttgatcacatttcaatccattccgctactgataccgatgttttctgtctgtttttcaagcttttatctcccaaatctgctaaaccatcttggattgaaaaagccatgtctgaggcttggaccctccgctttccttgtcaaatttctgaatatcattctgggctctatcttgcttcattccaatgcgatggagataggcgccgtgtgcttgaagaacaaccttggcattttgacaagttcttgatggtcttcacccatcctgatgtgtcaccaacccctacccctgattctattagatatgcccccttttggatccaaatccatcgaatcccttttggtcgtaaaagtccccatctcgcacagttcattgcggatgaaattggtgatcttctggaaatttaccctctttccttaatggaaaatttcggtccttaccttcgaatccctgtactctttgatatcactaagcccctccgtcgaggtatgaccattcggttcagaggcatttctgaaccacgatgggtcagcttcaaatacgaaagtctccccaat

SEQ ID NO: 149564 - DNA, 540 bp, Cannabis sativa
atgtttgttgagcttggattgtgattttaggttattttctagcttgaaatccatgttattttgatatgtggctgctggaagataattgtggatgatggatttttagctcaagttcttaagtttgggtattgttagtttgaggcatgaattatgtgttttttgcaatctgaaattgtgagtttattattggaaattgatacatatatatgtgtatttgatcagctattatttgctagcaatcttacttgttgatttggaagtttggttgtgaatttgaagtgaaatggatggaattgttgctgaattttcgtgttcttcgtggctggtttctaggttttcaaaggtgccgcggcatgctctgggcatgccgcggcctgcctctgttgagggaacctaggagttggccccaggtgccgcggcatggctagggcatgtcgcggtccgccctggtgtttttgggcagttttgagttgaatttcgaaaattcataacttttgattccgaactctgatttgcgagttctttatatcgttggaaagc

SEQ ID NO: 149565 - DNA, 754 bp, Cannabis sativa
taatggcccagatgcgcgagatggctgagcgaactggagttctggagcgagaaaatgcaacctttaaggaggagaacgcagcatttaggagtgaaaatgccacaataaaatcacaaatggagtcggtgaaggctaccatgacgactcccaatgttgctcaaagtccgttccgagttccaattgcaccaatggcatcactagactcaactcctataagaacagagacccaagtctctgatcgacaaacacttggaggaacatcgactccaacgttaggaagtcattctgtcgtaggaggttctcaacctcaacaatctgaacatactgatatgcaaacagatgggacaaactctggaggtctaacgaccaacaatgtggcctccgacctgcctacggtcagccttcctgcaactcgccttcctacaactggcctgccaacggtcagccttcctacaactggcctgcatacggtcagccttcctgcaaatggcctgcctacggtcagccttcctacaacttgtctgccaacggtcacccttcctacaattggtctgcctacggtcagccttcctacaattggtctgcctacggtcagcctcccatcgactagcaatttgggggttggaactacaacatttaatcctccgaaaatgtctcctcttgaaggactcccaccatcacaggtaactgccacacaggttatgctaaactctaacctgaatccatcttctgttgatgcaggtcataccaccat

SEQ ID NO: 149566 - DNA, 580 bp, Cannabis sativa
  modified_base (29)..(35): a, c, t, g, unknown or other
aaatatatttttgtgtgcaaatatttatnnnnnnnatgatttttgggtttattcaaaatgcagttgttatgttattgaattttctaagaaaataaaaaggaatgtgttcttttgttatgcttattatttgtctgccttggttatactggtgagccatgttgatcacgttgggtgcatattgttgtttcatgacctagtctctttatcttcataggtagatcaagtgtgcagtcacctgtaggtaaaagacctagaatatgtacaaggagtgaattaaatctgagccccggtactatggtggatatcaggtgcgactacccggtattgggtgtcgttttctatgattggtattgagagttaggggtctggtggacagtgtgatatgcatttgacatttgatttgtaattatttgtggtctctctactttatttatatattttgatactggtgatgagatattttatttttacaaagctaaccatgcacaaattttattaaagcaagggtcatttgacattagttgttttcctactgggctttataagctcaccccctattttctcccattccaggaactca

SEQ ID NO: 149567 - DNA, 2167 bp, Cannabis sativa
  modified_base (116)..(116): a, c, t, g, unknown or other
  modified_base (2005)..(2016): a, c, t, g, unknown or other
tattttgtgatcattctacatacattttgtaactccataatgtatgttacaatttgacaaaattaatactttgtcacacttaattatttacaacttaattatttaatctaaatatnatattatataaaataatataacagggaacacagtcaaggtcacccacgatccgggctcacgtgcatggtgtcctttaattgtgcatggccaggtttcaatatcgaaactaagctcacatgcttttgagcattacataggtgtataaatttgacatataaattaattttcataaaattaaaaactgtttaaaaaaaaatatttaaagcgcaacacacaaacgcacgcacgcacgcacccacacatgcacgcacaattggattggattggatgctaaaagttggattctaattggattggatcagttattggatgtcaatctcaaaatccaattaaaaaccaatccgatccaatccaattacatttatatatattaaaaaattatatatgtaataaaaaatattaaaaaatataatatatatttattatattcttattagatttttttttgtatgttaaatttgtaatacttgattgttttgtgtatttgttttcatgatattttgttctattttattacttagaaatgttattgttttaattacttaaaatttttagctacatttcacttgtaagaatagtatgtatacaaagtattaaacttaaatagaaggtgatacttagtttttacgtattttttttcttcatatttttaagtaaaaattgaaatttaggtgtataattggatgtccaattaaaaaactgatccaatcaaattagtaattggattggattagattggattttgaggtctaattggattggatcagatgatgattttttaaatccaattactaattggattggatctgatgagaaaaaaaaaaaggttggattggattggatgcccacacacacacacaacatttaatgtatacacattcatagaactgctcttgataccaattattagttttatggtactaaatcaggtacgcagcagaagagtttcgtatgatctgattattattgtaccatatcctattggatctccagatgtgtgtacattaaaataaaacataaaatagtaagtttagaacacatatctcttgaagactatcaaagtattctcaaaacttcttgtatgttgtatcccttaatccaaatgatgaagatgatgcaattggacttacgccagtatcttccaaatcgttccaccacacacaaggaatagtgtgggctattaggataaagtgtataatgttattcttattgaattctcaatacatgagcaagaactattcttgagagaaaaatagtttttcttctctctttagtgtattcaaaatttatgtagaaagagaagtgttttgatttctcaaatcaagcttctgtttatagtagttaaattttattgattaaattatactttattattcaaatacataaatatctataaccgaatttggttactagtatttatgagggaatctctcaaccacttgagagaatatctcaacaactttgaaatatttataattactttttaaatttaaatatttatctgattgaattaattaaataattaattaaccgaaaaaggcaaaaatgcatagggataggtgcctacccttgtctgtttaggacaaggatagtgtcttttgtcctgacaatttttgtcttgacaaatattatcttttccccatttagttaattttaaaaaaattatttatttattacaaaaataaacaattactattttggcaattcaaaataacattatactactctttatacctacccttgacaatgtttcaaggtggcaattcgaggatcatggatctataattctaagctccaataaactagattatttattgagtctcattaatcaatcattgtttattaattccatgattactttactaaaaatatagaattgaactcttannnnnnnnnnnnttatatttactgagttttactacagtgtctattgctataatcaattccagtgatttgtcctccatgtgttggttcataactagttttgatcaaaatactgttttatccttctaattacttctttatcctttagtactattaattcactagt

SEQ ID NO: 149568 - DNA, 884 bp, Cannabis sativa
  modified_base (28)..(41): a, c, t, g, unknown or other
  modified_base (89)..(105): a, c, t, g, unknown or other
atatacatataatcatgaagtaaatcannnnnnnnnnnnnncattaaatgttatttgtgatctattttaataagtaaatctgattatannnnnnnnnnnnnnnnntagggtataaaacccaacactcattacaaccgacacaaaagatcaagaacatagcagacacaactgaataaactaactactgacactaaccgaaatgccagaatggatataacaacctatatgaacaccaaccacttaacatgatatagcatacatggaaacaaatataaaatagtaaccagtaacttaatataaaccagtaaccagtaacttaataccccctcctcaagatggagagtgtatgttgtacactgacatcttggagacatgagaatggagaattggtgaagatagtggcttggtgaaggcatcagcaagttgtagagtagtggaaatagggattagtctgatggagcagtttgttattttgtcacggatgaaatggcaatctagctctatgtgcttcgttctctcgtgaaaagtaggattgtttgcgatatggatgtcagaattgttgtcgcaatagatgaatgtggggtgtggttgatggatgtggaagtcatctaggagatattgtagccaagtgatttcacttgttgtagcagccaacgctcggtattcagcttcagctgaacttttggagatagttggttgtttctttgttcgccaagaaacgaggcaacctccaagaaaaatgcaaaaaccggttgtagatcgtcttgtgatggggcaagatgcccaatctgagtcagagaacccacagagatgcagtgaagaatttcttgaatagagcagcccctgtcctggattgcctttgatgtatcttaggaggtgatgaa

SEQ ID NO: 149569 - DNA, 670 bp, Cannabis sativa
tggctaatacagccacaccctccaaaataatacaatacaaccttatacactctttttattcagtatataataatactggataaattgtattaaaattaaggaatgtaatatctagtacaatacaatgtcccatccaaacatggtagtcctacaatttaatacaatacgaagcccatataaagggatccaaacaagccctataatgtttacaaaagatttggggtcaacaccaatctctgacccagacccgaacctagacccgaactcggacccggacccggacccagacccaaacccggacctggacctgggaccccaaccctggactcggacctgagacccggactgggactagggaccccggactcgggactcgagacccgggactcgggactcaggactcggggcccgggactcgggatacgagacccgagactcgggacccagacccggaccctggaccctggaccccggacccaaacctggacttgtagttggtgttgagatcgagtgtaacgccctgtccaacagggacgcaacgtgtgtgcaattaaataaaatactccgatttatataatatgtaattatactgaaaagtgtgggtaattaaattttgataattaaaattcaacttttaaaactgtttaacaaaagataagtgatatagact

SEQ ID NO: 149570 - DNA, 544 bp, Cannabis sativa
ggtaagcaaggttggcggttacttctgcaccaggattcccttgtgggtcggatatataaggctcgatattttcctaactgttttttcttggaggccgagttgggtggcaatccgagctttatttgacccagtgtcttagagtcacaaacgctgcttagagatggtgctcgtaggagaattggacctggttcatcaactgaggtgcttaacacaccttggcttttgtctgagactaacccgtgtgtggtatctactcatccggcactggccaactgtaaagtgtctcagctcatgaagccagacagtagacaatgggatttggagcttattgaggacttctttgattcccgtgatgttgagctcatcaaacaggtgtctttgagtgttagtcttaggagtgatagttggtattggaactaggatccaattgggtttttcacggtcaaaagctcctataatcacttacagacggtcaatggtagttggaactcatccatggaggatgatgtctggaaaatgatgtggaagattaaagctcctccta

SEQ ID NO: 149571 - DNA, 538 bp, Cannabis sativa
gtgtagtgaagattaagttaaatgggtctgtttgggagctgaaggatgtcaggcaaattgccgacctaagaaagaacttgatctcagtaaaattgttggctagcgaaggctacactacaaactttccaaggtgataattggaagatttcaaaggttgcactgacagttgcaaacggtaaaaagagcaacactctttacatgacagcaagtgcgagctgttcaattgcagttgcaataggaaatgaaaattccaatatttggcaccagagacttggtcacatgcgtgagaaagggatgaaacttatgcattcaaagggaaaactcccagatctacgatcaattgagatacatgtgcgaagaatgcgtacttggaaagcaaaagagggtaagcttttagacaagtagtagaaccccaaaaaagaaaagattagagcttgttcactctaatgtttggggaccaacgactacttcatccattggtgggaaacactactttgtgacttttatcgatgatcattctcggaaggtatgggtttac

SEQ ID NO: 149572 - DNA, 1033 bp, Cannabis sativa
caagccatcaagaagctgtaccaccatgtctgaccggccaaggggagtctataggttgaccaagatgagcttgtatggctggccagggtttgagcacaagctagccaaccaaaaggtgactttaagactaagggagggtctgttcaaccaaggaagcctgagctctacaaggagaaggtgtacaaaggttggccttcacctataaaggctggcctctacctacaaaggctggcctttaacctgcaaaggctggcctctacttgtcgaagttggcaggaacatgacctggaagaccctggtaggcacatggtcgaccaaacctcgacaggtacatggctgggttgaaaaataacctgacgaaaccaaaccaagataacccaacgaaaaatacaaactgaaaaattcgaccaaaatataacccgcctaatctttatattgggcgggttgaaaattataccaacccgtccaatcaacttgaactaacccgaccaacccaattaagagaattttttatatatatatattgatatgtttttaggatatatatttatgtatcatataatttatatgattatttaaaaaaatataaaaaagttgaaactaatatattttttttatggtggttgatttgaacttttaattcaatctatatatttgtcttattattacaatcaactaaaatataataattgaatataaaaatttaaaaattttaaaaaatattagtggtcggtttggacgggttaatcgaccaaactgaccaatttcattgggcaggttactatttttatttttcttaattagacgggttgcacttagatttttataactcgatctttatattgagttgaataaaatgtagtgttatacttaaaatttggctaccatctcagtggaggacacgtgtcaaaataaagggaatacggatcgataaaatcacttttaatgaaataactcattaattgcataagtatacttgcaactccctgactgtaaggtcttatgcgatgaaaagatatacaaactgttgttt

SEQ ID NO: 149573 - DNA, 651 bp, Cannabis sativa
acgagttcgaggagttccttctcaagggaacttagaataagttggtctaaggaattgtaaatcttgataagtttataataaaaaaatgcttatattttttagatttgtcatgaataacagctataatattcgtatgttatgtttttaaaataataaatttttagaatactctattctattccactattaatttggtctctcttggaacaatcattgtatatataccttctgatatgttttacagatatagaacttgttttattatggttttagttttctaagttttttaaattgtgtttttaagagtgtgaatagaaaatagttttttatcattttaaaaatttaatagtgtttagcacaagttttttaaaacaatttttaattttttttactaaaaaaattaatattttaacaccataccataatatgaatctattctgtctgggtctaggatctaaatatataagcaactaatgttagacaaaaaaattatttttaaaattgaaaacaatattttgatattatatattttttagttttttaaaacataatttttaaaaaattgtttttaaattttttttccaaacaacatctattagtttttaaaaattattttctattttttaaaactgaaaaataatttttaagtta

SEQ ID NO: 149574 - DNA, 504 bp, Cannabis sativa
tcactaaattctctagatcctgtgttcctgaacatgtcataggaattaattggttctaaatcccagctcgaatctatatgacctgacctatcaagcatagtcctctactgctcgactatcccatagtaggagtaagtacagctaatttgaacgtggaattctgggtaccaactatcgaacctatgtgcaatgcgatctatgagaaagggattccaggtgtaaaaattgtactgactatctctgaaacacactaatgtggtacgcttggccctaagcactgtgggtgaccatccacattgattacctcgggattctccttcttcagcttcccgaggcactgcgttctgaaggcaatgcgcccaagccacatagtcctgagtttcctcgttggcggggaccggaaactaatggcacgacgtatacttgggatatttaaaatcactagtatactcattctcagcaaggaggcccacggacctcaggttggccttgttcaaaaggaac

SEQ ID NO: 149575 - DNA, 859 bp, Cannabis sativa
ggaggggtattatggtcatttgagtggtgataaaagttttgtctttagtgttaattaggctgaaatggattattggaaataaatttaattgttttaatttatttattaaactattaggtgtaaaacaaaaataggtaagtcacataaccttcacttttcttctacttcttagccaaaaccctaaggagctacaaaccaaggatttctcttgcttattcttcagctcttggatcagattggaggggctagaagcttgtttatacattaaggtaagatcttcaaactttattcttgaattacttaggttttcagaaagaaaagttgattttctttaaggatttagagctgtatgtttggattcaatttagggtttgtgtttttagatctgttttgaagtgtgttaaagtttgaattgaataatttctactcgttgtttaatttggattgaattaaatgaaataagattagttttcctcacttgagtacgtaatttttgaactaagggttgagatgttgtaattgatacatgggatgcattatatttatgatattgtacagttctgcagcttttgggttgcattgtttgtgtttggattgaatttggaggaggaaaatttgaaattgcagccctgccagaagcaatcgaccggttggttccggtgcaacagaactggtcgactggtttgcctgcagggggaatttctcaatttcgctcagggccagttttagggctcgaggtgatttttgtatttggtatagattgtttaaaagttttaaagctattttggagctaatggaagttagggtttgctggttatgggaattagggttattcccggaatgattgatttaagttatt

SEQ ID NO: 149576 - DNA, 756 bp, Cannabis sativa
ttttaaaaacagaaaacataaattttgattttttttttataaaaaattttgaatatcatttatttttatttttcaacaaatatataaaaattaaataaaaaatacgtattaacatcttaaaaaaattcaagtaatttaaaatcacgaaactcattatctataacacaaaatcgacaaagtcatcataaaatatgaactaataattgttcaatcttgacgaaaaatattaaaaaagttctaattgttaataagcttcactcattatcttcatcgtcgatttgctcttcatatatgatcaacaatttcattacgaacattagccattttacgaatttgatctcttgaaatgctaaacttaacactatcattcaaagtttcgtgagtgctttgtatagtagcatcttatacttcaggaatgtcttcatctccatcaaaatatagaagctacaacaattacagtaatggttcctaatcctaattaaattattgtaatagagaatattctataaaattggatgtatatactcactaatttgaaaggaaactagaaagggattttactcttgttcatccacaaactagaatactaaaaaaatttgataccaataaacaaaactatacaaaacaaggggtaacaactcccaaacagtgaaatgcatcagcaaaggactcaaaacaatcctaaactaacaaacaaaatatttatacatgactttaggcactatttattctatgtattaaaagtgatacttttag

SEQ ID NO: 149577 - DNA, 502 bp, Cannabis sativa
gtatttttgtaattttttttccttttttgtatttttttgtttttttccctataaaaaattacatttaattaattttattaatgataaaataattaataaatttgttataagtataattaatgaaaggatattggtagtaaaattatttgaattttatattttttaacacttaattacaaaaattaaaattttagtggtaaaatattatgttatgtaagacatgtacacatggcaattttttttgggtaaaagttactattggattttgttgatataaacctctacttggacagaaatgtaattacaagtaaaaactctaagttggccttcgatctttgaaattcttaataaaaattagttagaatggatttggttaattccacacttaactaacttctgtatctacctaactaacagatacagaagaaaaccagaagccctaagtgctatatatacctgcatcaaaacccagatctagtaagtgctatatatacttgcatca

SEQ ID NO: 149578 - DNA, 603 bp, Cannabis sativa
tcttcattgtgacttggctgaggtgtttgtaccagctcggggttgctttctggtatgctttcttttatgcctgtgcattcttccacaaagtctgccaaggttttgcctttgattgttgtttggggttggaaagtgttttcgtacaggcccaactctactgcccacttgagtagccgtcgagaagcatctggtttttgcagtatttaatgagtggctagtcagtgtatacccgaacaggatgagcttgaaaataaggcctcaacttcctggttgctagaatgaggcagtaagcgagtttttctatcaatcgatatcgactctcagcctcaatgagtcttttactgatgtaatagactgggtgttatacgttgttctcttctctgattagtacgacactcacagcttgttccgtgatagctaagtatattcccagtacctcaccgtctggaggttttgagagtacgggaggttttgcaagttgtgcttttagctcttggaaagctttttcccacttgtctgtttattttgaaaggaatctgctgagcgtggcgatccgaccagttaagctttgcacttctttggtttttgttggcgagttcatat

SEQ ID NO: 149579 - DNA, 834 bp, Cannabis sativa
gccaaatatacaatttttacatctacccgttggagatgttcttgcaaacttatgtataattaacaaaaaaaattgaaattctaatcgtagttataaaaatatgtacatattaataacaaaaatggtaagatacacattaagatgacaagcaccacaaaaggcaccatacaattaatgatgcattttaataccaactctaaaagttttaatttatataaatgatttagaaaactgctaactaattattagataccacatcaattggtatgtattgagcaccttaaggtatcacataacaataatagtaaaaaaaattacttactaaaaaaaaatagtacaaagacaattcataacaaaaaaagaaaaaaacaataaataaataaattttgcatcaagttttgcaattgtgtattggaccataatgctaaaaattaatgcaaatatatcacaaagtatttttttttgccaaatatattacattttttttacatatctcattagagatgttcttgcaaacttatatataattaaaaaaattaaaattctaatcaaagtaataaagatgcgtacatattaataacaaaaatattaagagacacattaaggtgtcaagcaccataaaatgtagtatatcgttattggtgcatctcaatataagttctcacaaattttaatttgataataatttagaaaactactagcaaattattagataccacaacggtatggtattgagcaccttaaggtgccacatatcaataataataccaaaaattatttaccaaaaaatagagtacaaagatcattcataaaaaaaaagacaatcgaagctaa

SEQ ID NO: 149580 - DNA, 579 bp, Cannabis sativa
  modified_base (530)..(530): a, c, t, g, unknown or other
attctttgaacttaaaaatataaatattttacaaaaaaatagtaccgtatgtaattattcctttaaaataatgtgtttttggtagcaatatttattttttttctaaattggtggtagcaatttttttaataataactaattatattaaaataaatatagcatatataatttattttctaaacaaaataaaatatattattttataaataaatactaaaattaatatatttcttgaaagaaattatatttgtaattgctatattttagtattacaaataattttagtatttatttataaaataatatagcataattatgtgatgtcttattttataagaaattggtttttatgtgtgttttgtaattgcttttttaatttgttcactttagtaactggtttgttcacaaagaaatatattgatacttttataagtgtttagggtacaaatataatttcttttaagaaatatattaattttagtatttattcataaaataatataatttattttgtttagaaaataaattangctatatttattttaatataattagttattattaaaaaaattgctacca

SEQ ID NO: 149581 - DNA, 700 bp, Cannabis sativa
tggtaaaataattccaacatacgggagtagtataagcggtcttggccaggaggctgtaggagtgggatggactggatagcttgggagatatcggtcggaagaggtgttgaagttgctaagaatcccaatctcgattaggggttatgagactggaaactttattatcaagggtagctggcgtttgaagatagagaagtttctcatatcccgaaatccaggcatccttgtaaataaagatggaggtaccattacccacaagactgcgtaacccagatcggagaagtgtttttccccaagagatgctattccaaacaagagaagggtaatgtcctctaccagagtcaaggaaggatgagtggggttagtatcgtgatttgagaagttgggcaacaagagaggaaggagcctgaagaatacaccaagcttattttgccaacaaggcttggttgaaagctttcatagaacggaatatgagaccaccatgaaacttggatttacacagggaggaccaactcttccaatggattttcctactttgatttgtaccgccccaccataattgagccatcatggattccaccttttgataaaagtagtggggtaacttaaagcaagtcattgcataagacggaatcgcttgaaccactgatttgagaagaatttctttgcctccttttgagaaaaaagttgagttccacct

SEQ ID NO: 149582 - DNA, 1211 bp, Cannabis sativa
tggactacgtcagtgaggagcttgctgcggcagttcctcatagaagacagggtgccttgggcgccacatgggtaagccctctgtccaagattacaaaggcgcgccttcgaactcttgaccgcggcagatatctgggctagttggactgctacattcccgcccacaacaatcgtgacacaaaccctgaaaaggggatgtgtgcctggttgggtgcccatggtcaacaaggagcgttgatgcctttgcatcaatacttcaagaatgtggaagacttctttggcctctgctcggcttaattcactcctaagggcatcaagtatctgtctaccctctttgtcctctatgcgtcccagaaatggggtatgccctctccccatgaggttgcttggttctttgatttgaagtccacccccaagcaaggcaggtcggggtatttttacttctctcagccaggcttcaagtggttgacgggcacggacgatacggccataagcaagattgggtgctttgttgatgagtagttcatggtggatggcatgggcatcactcccactcggttccagcagatttcgacctatcaccgccctcgcctcactcttgctcttcgggatagagctcaaaaacttgcccagcttccgggggaagaccggaatattatccagttgacctccgaagataactttgtgaggtacgggctctatcccaaggaatttactcctaaatgcgggaccgggaagaagaagaaatctggtgttggctggaccgaacgagctcatttggaggatgagttgattcaactgaagcaagagggtaagttgaaggggtgtgcaagggccaaggagtatgctcaggagcttttgaatcctgaagatgaggctgaggaagagcaggtgactccactgaaaaggaagaagaaactcccagccctccgtaggcctgttgagcatgtgattcgcataagggagcccatttcacctgttcggccatctcctcctgtgttcggaaaggagaaagctattatgtttgaaacaagatcggtgtcaggtgatgatggactcctgagtcttgttcgggcagtcaccttgcatatgacttcgttcatgtttttcatgtctgttttctaaccatgttgtttttcgttctgtacagacatgtctcagtagatgctcgacgctctgaggaagagaataggcagaagctctagcgcctct

SEQ ID NO: 149583 - DNA, 524 bp, Cannabis sativa
  modified_base (56)..(68): a, c, t, g, unknown or other
acaaatataccctctataatcattaaaaagcacttttttattaaaaagaacttttnnnnnnnnnnnnnttatacccaaaatttggctagcacttcaaaggatgacccgtgtcaaactcaaaagaataggattcaacaaatgcaatgacaattatatttgaaaatggaattgttaacacagattttcgttaacaaaatttgagcctcacaatgataattcaacacaaaaatactaaaagcgatagaaaaataaaatatgaactccgagttgtttacgttgttttgcacttaaaattctgcatatcttattcaaatttttgagtatttttttagggcctcttgcataagaaatttttcgtcccttttttgagattgtttgccactatttatagttacatagtggaagttaattacaaagctgacctaaatatgattacagtcattatccctaaaattgtgggatctgattacatattacaaaatgtaaatgcggtgtatgattttgaaagtcatatagctgtgatt

SEQ ID NO: 149584 - DNA, 845 bp, Cannabis sativa
tttttattattattattattctcactttcatctaaaaaaataaaaaaatcgaaaaaaaaagttcgaaaaaaaagagaaagttaaacatatctatacatacatatatatatattgttatatattatatagtatactatatataagcatataattcttggtagttgatggtattttgtgcctcctacatatttgctagttgagtgcatttttgcctcctaacctctttttttctctttagtagttgagtacattttgtgtctcctacattcttgatagttgagtgcatttttgcctcctattatacctcctctagcgatggcattagttcctcctagcttttatttttatttatcattttagttgatggcatcttgtgcctcctaaaatcttattattagtactattactactactactactactattactattattattgttatagttagtttatggcattttgtgcctcctaactttgatataactatctatcattattattttcatttttcttaattattgtatttagttagtgtaattttatttactttgcttaaaaaaatacttgaaaaaaaaaactaaaaacaaagcttgttctttcaacataagcaatttttgcttaaagaaaatttggtaaactttccatccacacttaataattaaccccggggagttgttattaagtcgtgagtaagtggaatcaaataggcctgggaacaagtcaaactaaaaaaattcaaaaattaaaaatgtaaaaaaatcataatctcttcgtgttataagtatgctctgtggttgcagtttataactgatcttccacatcagaaatttgtcttcttgagatt

SEQ ID NO: 149585 - DNA, 837 bp, Cannabis sativa
gaagtaaaattagctctaataaaatttctaagagcaaacctagacatttttgccttgtcacatgaggacatggtcggaattgatccatctataatttcacataccctaaacattaatccaaacatccaggccgttcaacaaaaaagaagactactagacaaagaacgggctaaagcactaaaaaaagaggtagaaaagctgtgcaacaacaatttcataatcgaggctttctaccaagcctgggtagccaaccccatactggtacccaagccgaacaaaaaatggcgagtatgtattgacttcactaacctcaacaaggcgcgcctgaaacactgttttccacttccaagaatagatcaacttatggatgcaacagccaaacacgagatattgagcttcatggacgcatattcataatataattaaatcaaaatgcatctaaccaagaacatacaagtttccgaatagatatgggtttatactgttataaggtcatgccatttggtcttaagaatgttggagttacataccaaagattggtaaacaaaatgttcaaagaccagatcggatgaaatattgaagtatatgtggatgacatgcgtatcaaatccaagaaggcttcatggacgaatgctttaaagtcctcaggaaataaaacatgaaactcaatcaaaaaaaaattcaagccctcctggatatgaaaactcctacaaaaaacaaagaaattcaaagtttaacttgtcggattgccgcactcagtagatttttttcaaagttaacaaacaagtgtgttccattcttcaacatcctgtgagtgttgggttttgtgcccaaaat

SEQ ID NO: 149586 - DNA, 677 bp, Cannabis sativa
  modified_base (40)..(43): a, c, t, g, unknown or other
gcaacgagctgcacaatatgtttgaaaatcacgtaatacnnnnaagttagttagggtgttacagctcatgtcttgagaaagaaagaagccaggggtttgttagttcaaaaaaaaaagcatttttcaaaccgtcgagaaatctgcgttttgtagtagtgtctgttgggaagtatgcagcaaatcaatcttcatctccaaactatcaaccttttcagaaaaaacatcaagcttgacagatatgtcactcttaaccacaaaggttgttccagaacaggaaaacttttgtaagaattgtaatcagtgccaaacttgaaactgctccattttaaagctttgaattcagcagcagtaggtttcatatatgatagttgcagctgaggaaaaattaaaaaaaaaatgaaaaatatcaataagagtgtgtctttaaaatataaaacaacaacaaaacagctaataaaaaaccaaaaaacaacaaacagaaatactttgtctttggagacatcaaaaatagtagtctttaaaagtttgaaagtcggctggctgctacaagtctaatgaataattcttgaaatactagaaatttccttttggcaatacttaccattcatgtacttacaacactcataaaaccaaacttgaaatacatgaggacaaccaatcaaagtgtaaaatacact

SEQ ID NO: 149587 - DNA, 700 bp, Cannabis sativa
aaaagcggataaatcacagctgtgtgatattcaaataataaccgcatttatgctacgtgatatgtaatcaaaccccacaattttaggagataaacattgtaaagattacagtgaactcggtcattaactgcctactatgtaataataaatagtggcaagttagataaaaaaaaagggggatgaaaaatcataagaaaaagaggccctaaaaaaactatcagaagtctaataagattgactcgtggactatgcagaactttaattgcaaaaccacataaaaaatctcttgagttcatactttttactttactgcttttatttttctgtgtgaaattatcactgttagactaaatttttggttaacgaaaatctgcgttgacaaaaatatttttaaaggatatcaaaataattcctagaaaattcaacttaattattaatttcaaaatattctaatttaagttgatccaaaatcaatttaaaaaaaaaaaaatcaacttatatatatatatattctatgtaattttaaataattaagtatctagaaaaatctaattagtcataacttcttttatttaattgaatacaaaaaatacatctagtttatcttgaattatcttcattaaactaagtgcatttttctgaaattaattgccaaataatctgatgaaaaataaattttatttatttcaaaattaattat

SEQ ID NO: 149588 - DNA, 780 bp, Cannabis sativa
catgtatattaatgtgtttttcttattaggagaataagagcttatttgtggaatccaggtaaataaactcaaaacgtctattttctttagtaaaaacaccctgataagtttacggggtgaaatcaaggaggcgttgggaattgattaccctgaaggatgcattaagtatttagggttgcccctttttcgatcaaggcagaaagatgcatacttcaatttcatccttgacaacctcacgacaaagcttcagggatggaaagcaaaaactttatccaaagcagggcgagctactctaattaagtctgtgggattgtctatgcctatgtatgctatgcagaacacgaaactctcttctcgactggttaataagattgatggtttggttagagacttttggtgggggtttgagaaagggaatcatgggatccatctcaaggcttgggataaactatgtcttcccaaatctctaggtggccttggattccgaaaaactaaagagatgaatcaggcctttctggctaaatggggatggaatattctcaatggaagccaatctctgttctgtcgagttcttacggccaaatatctcaaagggaaagacattcttagttgcaggtataaaggttcagattcttggttctagaaaagtgtcgtgaaggcaacgtctatcttacgacaaggggcttgtaagttggtagctaatggagagaacactaagatctgggaggatccctggattccgcatcgtaaaggcttctgtccgaaaccaagtgggggtac

SEQ ID NO: 149589 - DNA, 680 bp, Cannabis sativa
ttcaagtatttccactaatcttactttttttccaaaatcaagattagctaacaacctacaattgttgatcgagcaaaagtaggtagacaaacatcaaacatccttgaatgaacaaaacatcgccaaaaatattcataaaacatcaacaaaattcacaatccaaggttcattaaaagttctaactaaaagaaattagttcatgctcaaaatgaaaataaagaagtataaaaaggaaatacaaaagattaaaggagtagaagaaactatatggatggtccttcttcctccttccttgtgcattccttttcttcttcttctttttcttcttcctcttcttcattcgtctaggtattttcaataatggtggctgccaagaattgtgttccccgcttttcttttaacctagggttatatcccattttttacctttccaaaaatgccctccacatggtcccttaattcccacttagagacttttctgactacatcagctctaaatcacttctctttcgccacctcagcctcatatttgccacctcaatcaatgcattgtcgtatcctctttttctacattagttttaataaacaggccctgctactatttgttggattttgtgccctaaataaaaccaattttaatataatcagatttactaattgataaagatcagaaataacat

SEQ ID NO: 149590 - DNA, 598 bp, Cannabis sativa
  modified_base (180)..(180): a, c, t, g, unknown or other
gggcgggggaatagatacccgcccgaacttgtctcgatatgatatatgtatatatttaagttttaaaattataacaactacaactaaaataactacatgatttaggttttttattgattatagtaatgagacattttagttttcatgaaaatatttgcggtgatgcatattaataatcanacttaactgctttaaaaaaatgacacttaactatttatttttgattactaattttgtatttactaactccatttactataccaactattacactcatgtttattgttttaatgagtttttatgatttttttttaaaaaaattctctttaagatattattttttttttcaaaaataaatatgtaatgggtactcgatgggaatccttctcccgtcgggtaattcccgccccgtccttgctttgatttaaacttgtattggggtaaatttaggaagcatgtatggggtgggggagcaatccccgcacctgctttaccccgtttacatctctagaggtcactcattctaaaattatcccacgtcaagcacgcttaaccttggagttctttcgtgatgtgggctactgaaaaataagatgca

SEQ ID NO: 149591 - DNA, 688 bp, Cannabis sativa
tcccctcaaacaaaggaccacctcacctctccttaaataattctacattagtcaactctttactaactattctctctaatgtgttggggtacacgccttacatggagtaccacccctacatcgagagttcttactctttctcagaattgaggctcatctcctttgtttgacaccatctatctcgatattgataaaatattgtttgctttggattacagttttatttttaggcaccttccaaacactactacaaatattggaattcacgactgtcctaaaaataatttttttttttcggaccgtcgctaaaaaaattaactgtttaaatctgttaggaaaaatttagtattctcgacggtttaaaatcgtagtaaacaaaatagatgatttttttttaataaaatgtgaattttcaggagagccttatactcgacggtttaaaaccgtcagatatcagggccattaaaaaatcgtcacctacttctcgccacattttccacgtgcccacttacttcttttctatttcccacatgcccacctatttcttctctatttcccataccctaaaacaaaaattttaactctccaaaatccagggccgacccaaatattttgggggccttattcaaaaaatataaattgggctttttgtaaaaaaaaaaaaaaaatagagaaaattacattgtat

SEQ ID NO: 149592 - DNA, 817 bp, Cannabis sativa
ggattctaggatctagatcctcttgtttctccttgcctccttctgttatgaccaccattaattgatggttggctcttctattttgaagttctatgagataacattcacgagccaacaattggtcgcctcgtaccacacccactccagcttgtgtaggagctttagagataggtgtttaattgaactgactacccctagtccaatcaatgcagggtgacccatcaatatgttataaattgatggaagatcgacagctaagaattcctgcattagtgttgtagataacggtggctctcctacagttaatgggagttcaatgataccttggctggtgacactatcacctatgaatccacataagctaaccatgcaaggttttaactttgcatcttgtaaccccattttcttcaatgtatccctataaaggatatttatcgagctcccattatccaccaacactcttttcactctcttgttagcgagttgaactgtaatgacgagaggatcaacatgtggatacctcacatgctttgtattttcctccgagaatataatcggaggttcttctgtctttgcttttttcagtggttctagagcaaacactgattgttcattctttatttcattaacatatcttttttgggcattattactgtctccagtgaggtgtagccctccctagataaccaatatatcctcgacctcaacagtgggaggttgaaatctctggttatctgggttattgaggtgattgggctggtttggctcgttcccttgacacttcacatactgtttgaaatatccacgtgagattagg

SEQ ID NO: 149593 - DNA, 840 bp, Cannabis sativa
  modified_base (812)..(812): a, c, t, g, unknown or other
aggagatccacagatctcagattgacctcatttagaaggaagtcgcacgacctaaggccgtggggaagagtcagcaggagcctgtgccgattgaccatctcaggagtagggaatggtcttttcgagagggctgtaaacaaaacattagttagaaaacttagaatgaaaagatacggattatccaactgagcctgatgaaaacaatcacttacgaattttgcggaaggtggttgtgccaattgggaagaggccagttgtccagaaaaagttatatttgaaagatatcgtgtttggcaagtctacaataattttaggctcgctagagtgagtaccaagatataagaagccccctgcgacattcttctcgttggaacagccttaacagagtagagatacttgatttccacaggtgtatggcactcccacttcagaattttatacaaaaccttcagactggcaagaattctataggagacggggtttagttgaaatggggcaagcccgaggtggtttatgtaatccttgaagtagtcacgagggaaattatggccccttcattgatgtgttcaagattccaggcaccaatgccagtcgaaccactagtactggtctcaccactggcttcctcaggggtctcacctgtaaggcgcgcaggggggtaacagctaaactcaccagctcgcactgacctaacttcgcatgctcgcccaagtttgattccataggtcctaagtataattacctgtgtagcctgagatagttcgcacttttgattctattaactcggcctcaaaggtgacattaggatcctngggtgtctttgatgtacgtggcttggga

SEQ ID NO: 149594 - DNA, 649 bp, Cannabis sativa
aaaataatttgttttaaacattttttgtaacgtgaaacatttaggtctgatatgtccttttctaccacaaaaatgacaagtaggaacaaatatttttacctcagatcttactctttttgtaaatcctagggattttgcaacagtagaaactgcttctgcaatgacaagttgtgaaattgttgcagcagactgcacatttgcagcatcaggaagattcatcggaacactaaattttacaaactccgtgattccagatctttccataccatttgatccaatgcctgcaaaacctatttgacctgcattttgagctttttcaaaaataagagatccaggataaagcatttgaacatttttcttaaaattttcaagttccttctttaaaagagtgattttttcatctttaacacaaaaatttgtctcatattcttttatttttaactcaaacatttcaatttgatgagacagttttttatttagtttaattaactctctattttcagtagtaacctgaatccagttttcatacatgactttgtatgattaagcaagagactcttcataaattttagaatcatcagaatctgattcttcttgtttagtggtattattcaaacataccagtctagctttcacctgtgaatcacac

SEQ ID NO: 149595 - DNA, 530 bp, Cannabis sativa
ggttccaaaccctttatcataactatcatgcgatctatccaactaactaaaaattttggctgccacataagagtgagtggccccacactctaacaatacatagaagtaagagttgttgattgaaagctgacctgttacaactgaggggctagcttttgcattagcttgagttatagcaaacacccttgctggagcgagttttgcagctatcttctgctcttttctcttaagttgtggtctgtctcgtttgtaatgtcctaacaacccacactggaaacacccattccctctacactcacttagatgatgctttttacaactggggcattccgggtaagtgtatcaggtttcagaaccaccctaacggttgcgtcgaccctggttccctcagaacctcttattctaacttgagccaccgggtgcagttggtgcctttcttttctaattagtggttgagccactaccatccctaccataacaagaggtaggaggagtaggggccccaccaacaacctgagtccctcgagact

SEQ ID NO: 149596 - DNA, 514 bp, Cannabis sativa
aaagctgtaacaaccctgccggtctctgaggtttagccttgatctgctgacgggttaagcatctcgatacgaattctaccacattcttcttctttccgctccaccagaagtaaggtttaagatcttgatacatcttagtggtgccaggatgtagggaatatggagtagtatgagcttcttcgagaatttcattcctgagttctgcattattaggaacacaaaccctggtcttgaacaacaacattccactgtctgacactgtaaagtctcaggcttgtctagctgatagctcttctctgatcttttctaactctggatcagttaactgggcggctttaattcgttctaacagatcagattgcaacgtcaagttgtgaagtttgcctacaacaaactcgatgctatatctgaccatgtcttctgctaactgaggtgaaatttgaaccatattagatatcggcctgggacctttcctgctcagggcatcggccactacactggccttcccagggtg

SEQ ID NO: 149597 - DNA, 734 bp, Cannabis sativa
aatataaagtaaaattatcattaataaagagcaacaagaacacgaaacagaaaatccactaccccaccttacacaaaaactaaagttttatgaaaagagagtactttctctattttcaaaaaactggggggagtagtggcccgtacaaaatatgataaatggggtgttatataacgccgacggcgtaaacttacaaaatttacataatacaaacccaaaatatgaaaaggtgccgacgtaagcctacaaggtaaataaaaaaaaaggagaggagaccccctacacggagaaactctccctctgctgaaacatcctccgcattgcaagccacccccgacggttggagaaagaaggagggcgtatgatctcggataccacccgaggtaactcttgagggaaggaagaagcagatatacagaaagctgagggggaaacatccgtaggagcagggacttcttcgaagttcttggattgggcagtagactcgatctcgggataataagccgccatcgtctgagtcgaacttccttctgatacttcaggctcctccttagccgcttcgactggtgtcaatgtgggaggaaaaatagcaaaaggacacatagccaaaggtggcgcaacatcgacgtgagaagcaacataagttccaaggcccaatgcagcttgctcaaaccaaggacagctgcagacctctgaaaaatgcaatggaggaagtgtagtgggctcgaaatcac

SEQ ID NO: 149598 - DNA, 518 bp, Cannabis sativa
aggtcggggtacttctacttttcttagcctgaattcaagtggttgacgggcactgtggacaaggccgtgagcaaaattgggaattttgttgacgagtactacatagtggaaggcatgggcaccacttatactcggttccagcaaatccctatatattaccgtccacccttcatgctagctcttagggacagaggtcaaaggattgtttagctgttgaatgatgctcggaatatcactttgttgacctcagaggccaactttgtggagtacgggctttatccaaaagattttgttcctcagcctctgaacgagaagaagaggaagtccagtgctggccgggctgacagagctcatcaaaagaatgagctgatttaacttaagcgtgaggctaagttgaagggaggtgctggatccaagcagtatgctcaagagcattctgagcaggagaatgagctcattcaactcaagcgcgaggctaagttgaaaggaggagttgggaccgaacaacatgctcaaga

SEQ ID NO: 149599 - DNA, 938 bp, Cannabis sativa
  modified_base (556)..(557): a, c, t, g, unknown or other
  modified_base (882)..(882): a, c, t, g, unknown or other
aaccaatggttcaattgtcaataggtcaaataaataatttgtaataggtaaattttgcaatcttctttcatctatgtataaacctagtaacataataggattcatccgaatcagtgtgcatgtgtgagcctatatatttgctttggacttagatgcatatagggagcccatttaatttttgtaattaaaatagactaggttgctaaataaaattgtcacatttgatattttttatttaggcccaattactattgggactattcaattaataacagttgtttaaattaaggttaaattcctctcctttgggccttgtgtgacagttaggaggcccatttgtgaaggcccatttgcatgatttgaataattgtaataggttaattaaactagtttaacctaataaaattgatcagcaacataattaatttcaaaatatatgaaattaatttttcattagattattttaaaattaatttaagaaaaacacactagtttgatgaaatataattcaagataaactagttgtatttttctttatttaattaaataaaagaanntataactaattagatttttctggatacttaattatttgaattttcaaagaaaatatatttaagttgaacattagtttttcaaactaattttgggtcaacttaaattagaatactttgaaattaataattaaatagaatcttctagaaaattagttattcagatattctttaatatatttttaggttgaaaatttgttaaattttggatcaacttaaatatgaatattttttcaaattaaggtgattagttcaagatacttaatttgagatttaattaaattttggaaaactatttaagttgaaaattttattattttagaacaanttaaattagatatttttttaaaaatttattttattatattttatataattttgaaa

SEQ ID NO: 149600 - DNA, 1042 bp, Cannabis sativa
ttttacgtgattgtgacatagggcttccatttagcgcgcgattttccatttaggtcgactgtcacacttgaattcaaaaacgaggtaaaactagcataaaatgtaattgtatatgaatatgtgtatgcgtaatatatgcatgctatattttcaattcatatgctaccaatactagtacgttagtggtactgagtgtattggtacaatgtattgtaacaccctgatacttaggcgcgctacagtgattttctaattaacgtgccacctttgctaattaaaggatttttcttaaaaattgtgccaaattaaatttttgatttaaactattaaacttaataaacatatatatattttcataaactaggatcccctgtttaaacttttacaatcattatcaaaatacttttacagatatgtcacacatcgactacaaaatatactccaagttgtctcgagaccgaacactccaggtcgcaccatctcgacatgtacaatcatccactgggcttggaactcactcctatttaatttttccctttcttttatgtaatatcctgataagcttaatggtaaataattaggatttatatttatattatgggttaatcaggtaataagtgggattatgatcctactaatttatttcagcataaaatttaaattttattataagtgagtaaataagcgtaatttgttaattacggagatttatatagcatgcgtgaatataatatgagctatatgtagaataaaaatatttttaggtttgctgaccctaaagactcaataagtggatatataagcttaatttgtcaattacgaagattcatttgaaatacgtaaatataatatgagttatttgtgaaataaaaatatttcaggttcgacaaccctagagacccgattagaagccaaaaatatcacaatggttttaattaaaaatatttatggaattattgagataagttgattttagaaataccaaagtattttggaatactagagttaaccaaataccctaaaattaaagatttcttagtgg

SEQ ID NO: 149601 - DNA, 1019 bp, Cannabis sativa
  modified_base (27)..(29): a, c, t, g, unknown or other
actaatcagattgtaaagagttttatnnngggcataaaacccaacactttgttggactttttctgttatgaacttggaaaaaaaatctgatttattttttttatttttttagatattttttttttttgcaaggttaattgaagtgagtgtcttttttaaggatagaagtgaatggttagatatacaattttgaaagaattatagtgtaatatatataatttttgtatataagtgtgaatcattattattgataccataaaaggaagttttggtatcatatatgatattatcaattgatatagagtattggtattgattattgtgttaaatgaaattagtttcaataacttttaaaaaatttataaataaataaaatattttaataatttgttatattatttacaaacataatatataacaatatatattttttttaacataataaaatctaaaacaaaatatcttacaacatatgtaatttaaattttattttttatctttatttttattttaattaaataataaatataataataatatggtaagaaaagtatacagtgcagattttttaaatataaaataataattgtatagaaaaatcataattaacaataatattatttctttttaaaaattttattttaagtgttactcctaactacttttaaaaaaaacatatataaatattttattattaataataaactaataatatatatctataaataaaataattgaaataaataaataaattcctacttttctttaaaaaacaacattgtacttaaatatggtgataattttaggtgtgtttatttgatacttagagaccaccttgaattcaaatctatatatataaatgagagatatgaggtagtgatatgtcatttttaaagggaaatttgacaatatatactaaaaaatagtatatattgttttaatatactaggtaaaaaaaagtaaaaaaaataccctccaattaactttaatcccaacattaccctccccatttcaaactt

SEQ ID NO: 149602 - DNA, 543 bp, Cannabis sativa
tctgaaaacaactaaaaacatcaacaacatcacagcaacagattcaagacatttctttgaaaaatcatagttttagcatagaaaattcataactttaactaacttaactatcaagcactacaagaagcttaattaaaccctaatcagcaagtttaaatcacagaaaacaacaacaagatcacagcagcaacaacctcaattaatcatgcatgcatcatcctctttacaaacattttctaaaaattacaaaaaagaaagggttagaaactttaccaatgctagaagaacacttagaatgaaggaaaaatagctagaaatcagaaatcccagcccttggaacacccttccagccgagagagaaagagaggaaaagagagagtgttttttttgcaattttttctaattttttctaagtgttgagaatgaaaaatgaataaaaggaatactttaaacaataatctattttagccaacaataaacaattaacatttatttttttttcaattaataaagtcactagaagacaaaatatcattggggcaa

SEQ ID NO: 149603 - DNA, 766 bp, Cannabis sativa
  modified_base (174)..(177): a, c, t, g, unknown or other
ttttgttaaatgacaaaatagactttgtattttctaaaataataaaaataggatcctgaatttaatttttgataatttttttttaatatgaccaacttaaaacaattcttaacacggatagatacagaaaatataaacagttttgtcataatacttttagatcggattattatnnnnttttattttaacaaaaaatcagtttagggtcatttttataccattttagaaaatacatggtctattttatcatataacaaaacagatgatccaattaataacttttacaaaacacaatatataaaatattatttacccatgaaacaaagtattcactttgaaaagtctaagtcgttatgcaaggaaaacttaataaaattgagtacactaatgcaccaaatttctttaaaagtagtatatattatagaaaaatttatgtaataaatctcattaaaggatcattttactagattttttttatgtatttagaatatttttttaataaatatttttaatataaagtagtacatatttaattttttaatgatgtttttaattatatatacttactttaaaaatagggataattgcggcaaaagtcctcaaaaacttagagttggtgcagattagtcctcaacctcgaaaattggcggtaatagttcctaaggtcacattttttgtgagtccgttggtccctaagataactgtccgtttattaatttttaaaatgccacgtgttgaagtattactggtccaaattataatttta

SEQ ID NO: 149604 - DNA, 582 bp, Cannabis sativa
agtgaaaactaaccgaaaatatgacccgaaacttagactaattttagcctaacacttccccactactcaagtaattcgagctgaagtggtaagcgttccaataacaaccacaagcaggggaatgagaagaaagggaagttcactagcgaattcgaacaagctccctgagagaaccatgcaaaatagactggattcactattctgactgaagatatagaaagtatgtacatggcaactcagtcggtggccccgtataagaagcccgggcccatgaagaaagatgctagcaagagggatatgacaaagttttgtcggttccacggagactacgaccacgacactaacgaatgttacaacttgaagcgagaaattgaattcctgataaggaaaaaaaatccacacctgcaaaagtatgttaagaccgatcaaggtaagaggaacaacattaatcaagatttgttgcctccaccgatagatggactgctgcaagtcattgttggaggcccacatattgctggagattcgggcaaagctcgggagaggtatgcccgaacagtacagcacaaacaagaagaagttatc

SEQ ID NO: 149605 - DNA, 1095 bp, Cannabis sativa
aagtataaaattttgaaacatttaagaaatattaaactttaagttttttcataaatattaaactttaaatttttttataaattgtttaaatctatcataacctatatctaaatctaatcttattaaattaaaaatttagcctacagataatttttatttaataagatttcatatttaagcatatttgtacattagtataacatgattcatttaaacttcaaaattatacaataatgataatgtaattttattacatcactaatttctacaatactagtagaaattttcaaaaaatttatgataacttcatttagaatgtacaattttttactgtacaattaagaaaaataaatcacacttcattatcaccaataaatttttaatatattctatatgaattcattctaatatagttaatataattattaacacatgatgaattattttagattaatcctcattcataatttcttgcaaggtttaaaaataaacctaaggaagtcagtaactgtgaaaaaatcctatccacagacaatataagttctcacatttagcaatttaaaggaagaagcgtatagtggtgacttggttttaaaattatcaaagacccttatgctccaagtttctttagaaatttaatttatacacatatttaaaggtctttactacattaatttataaaatgatgtcactcataaagatatgcatgttcaatcttacaataagaaatgtgttattaataaaaaaatttctaaattatgacaccaaaaattatagaatatatctccataaaaagaataaatattagtaaatagtggggatattcattacacttgatttaactaattttatttaaagcttgtgtggattgcattaagaaaaagtataccaacaagctaaaatggtgcactttataattttgtcatattagaagtcatacaagtcaattaacacttgtacatatggactcgtattttacaaaattttgcataacatttttaatgattactcacataaattatatttctacaaaagtaaagaattatatgtttcaaatacatttaaatcttaagtagagaaataatgcattttgca

SEQ ID NO: 149606 - DNA, 720 bp, Cannabis sativa
tgctcctcccgcagaatcttcttcaaggcctccacctcagcatgcccccggctgtactcatcaagggcttagttatgcttggccacgcggagattgtgcctctcctcatccgcaaagaccggggtcaacactatgccatgcggcacagtgtattcctccgcctcggaaggaattccagagtcgtggctcaacgccggggccggagtgtccaccctgtgggtccgcttagaaggttcctccaccaccatctttcccttttgcttgcactcaagggcggccgtgtcctccgcttcaccttctttaacttcctcctcttcatccaccaagacgatggtgtctgaaggagcattggaggaggacctcccgggagtagttaactgggaggcagccggaggtagagaagcattcggactgtaggcctcaacaagagttgccaggagatcgtccgtgggcctgactgctgcaacaaagaaataagtgttaggacatttatgacaaaactacacttagcaaaaatgcaataaaactagtcctaccctgactccctaattcggccctagcaaactcctgaatcatagcactgacttcatcatcctcgagaaagttgttcgagggaaggaaccagctggaagataaataggctgaatgatccaaggggataggcgccggaggcccaaaacccatccgggaccgacctaaataatggcctaagtgggaaaa

SEQ ID NO: 149607 - DNA, 599 bp, Cannabis sativa
aatttaaaactggggctggtactggatgttaaatcggctaatttccatggcccactttattagttttccgaatgactcaagtttttgtaatacttgacaaagagggtgattcgttatacctttatgacatggacttgatagtagggttttaactttcgtgacgcaattagcaagcaaaaggataacttttctatcatggggatatctagattctacaccagcagtcctttgcttatgtagtatacaggtagttggactctgtcttcttcttgcactagtgcgacacttacatcgtgatcaaacatgaccaaatataggcacaatagttctccctcaactgacttggataaaattggagctttggtcaaatgttccttcaacttctggaatgcctcttcacattcatctgtccattcagacttcttgttttcacgcaataagttaaagaatgggatgcacttgttcgtagacttggaaataaacttgctaagagcagaaattcttctaattaatggtgctgaaatggatagtgctactcaagtaagtcttatcttgaatagcctaactccagcatttctaccatacacttcaaattatgt

SEQ ID NO: 149608 - DNA, 667 bp, Cannabis sativa
tgaatttatgatgagcattggatataactgaagcaactatgatccatgtgtgtactacaacagtgaaccaatttggttattgttgtatgtggatgacatactgataattggtgaaaagagataggctattgacaagttaaaacaaaatctaagtgttgaattcgaaatgaaggaccttggtgaagctaagaggatacttggaattgacatcaaaagagctagacctgaaagactttcattatcacagaagggatacattcagaaactaattgacaagttctgtatgaatgaagccaaatcagttagtactccattggctcagcatttcaagctaactcaaaatcagtctcctaaaacagaggaagaaaagatgtacatggattctatgccttatgcctcttgtgttggaagcctcatgtattgcatggtgtgcactagacctgacttagcctatgcactcagcatggttagcagattcattgcagaccctggtaaggaacattggtctgctgtgaaatggatactcaggtacttaaagggatctatggatattggacttgtttatcacaacaagttgaaagaagaaattgaagtgaatggatatgttgactctgattatgcagggggcatagacacaagaagatctataactggttatgcattcaca

SEQ ID NO: 149609 - DNA, 736 bp, Cannabis sativa
  modified_base (673)..(689): a, c, t, g, unknown or other
tttatttttaactttgacatttataaataaatatatataacctaaaataaaactaaatatacgtgcattgcacgtaaactttcttctaatatatatatatatatataactattgaacagtgtagcaaatcaaataacattagctttttttcaaaaaataaaaataaaaataattaatatcacataccttattattcaaaatatatatctctttaaataattagtattttattccttatttaaccgtagttgtgttgcaaatttatttttgtaacttctcaattttttttttaaatctatctcccattctatttaatagagcaaaaaatattaatatagcatctccttcaataataatctttaattgtattgagataatattaatatagatgtggtttgaataataataagaatacatggagttatttcaacgagatggtatccccaagtcaacattcgattgagagtgtcctcggagcagtaagattctctatacttttcatactaaactaatatgttgatggttgtaaattgataaattttacaaattatgatgcaaattacaagtgagatagagtggtaacaacgactttaatagagtgatgacaataattttaaaattatttgataagttttattgatttataataaattataggctaattaggattttnnnnnnnnnnnnnnnnncatgtaccaaatcatgccctctgaacttttaagaccattgaaaatgc

SEQ ID NO: 149610 - DNA, 995 bp, Cannabis sativa
  modified_base (930)..(933): a, c, t, g, unknown or other
ctcgtaggggcgtggttgatccggtgaatccacaggaggtggatcatgcactgtagaacctagggaacataagggttctgccaaccgtaaatctcggacagtcattaactgcgggtcacagtatgacgactcctatgactgaaatcacgcctggcgtgcaagatactgggaataccagttcagcagccaaccagggcattcataacacagccactccgctcgctaataatgtttaaacaaccattggagatgacactgaaatccagaacctctgcgctgctctagagtcatgcagggtcataccaacaacctacatcatgatcaggaggaactccgtgctgaggtgaatcttatgtttgaagagtagaggcgcatgttcgctgaatggagtggtaaggagatagaaacattaagggctcagcaagcagtcattgatgaccatagtcggtaggccactgtgttgatacgaaaagcctatcagactactagaaaacagcctgtaatcgtcatccccatggaggaaacagacgaagatccaacaatgaatacctctcaaactataaatggtcagccgccaaaatccccggtcacaggttccacctgtgggcgaagttgtaggcgggcagactttatctagtaattcatcaggagaagtcatacaaaataattccaacaaacttaatggtgccggtcagcaaattggccaaaccaatcagtcgctaaggcagccaggcatttctatatttaatagattagggacaactcatgatctcagcaatgatctaaactggatgaggggagtggacgatcaaaatcccgctcaaagatatgttaatttgactcagggtggccaagaggccaaacaggttagtccatccatgcaggcacagttgaacgaactaaaaagtatgttccaaggcctggccggtnnnnggaacaacgatcttgagttagaccgagcacgtggaacccctttctcccccgagattaatatc

SEQ ID NO: 149611 - DNA, 772 bp, Cannabis sativa
atccagtgtattgataaatcataggacttaaacttttgaacatataatcatgattatattccactgtgttgacaacattataatcatgaataaatatatgtttcgaacttagtataatttatacattaaacatataatcatgaaataaatcatgtgcaccatgcaaatataaaataatttctgatcttttattaattagtaaatctaattatttgaaatagattttatttagggcacactcccacttgcactgatatgaaaataaaagtgcatttcaataatctcaacacattgatatccggatcaagtgtagtacgtagtattcttttgtaataggatctaacatgtggtatttaatacaaactttctccatcattacatatccttaatcacaaaatccttaaaattgtgaaattcctctctatattctactcctcttgggatactagattctttattttttagcaactacttctgtgttagttaggaagtaacactagtagttaatttattattagtacaatgccaaaaaccttacagaacttttcataggctgaataagtgtccttcctagaactataacattgagtctcactagtagagttagagacttcagataggtttctatacttctccaaactcattactccacccccagagtaatcaccctttcatctgtagactttctagcattggcaaaagtctagaaacttgatttggtgtagtctaagagtattaaaataccacgcttatcaactaacatatagttcct

SEQ ID NO: 149612 - DNA, 676 bp, Cannabis sativa
  modified_base (102)..(117): a, c, t, g, unknown or other
tcactaaataacataaaatgcatttcagaattcaacaataacagtataaataattatttaaatatctataaataatgttccataattaaacataattaactnnnnnnnnnnnnnnnnaactaagcggtctttacataaatgcacatcaaataacttacctcgagaattacggttgatagaaatattcaaactcgctgccacataggcagaagcgagataagaataataattattaacaagcgaaattggcgagacaataagtccatctcgagataaagagaatacgcaactcattgacccatatactcatgagtaagagcttgcaactcattgacatacatactcgtatgtacaaagaataacaacattcatccatctcaatttttatacgttgaagtaaccacctcgctaatgccttccaaattagcaaaagagaatcgcgagaaggattatatctctgtacttcgcattttttctacaaagatagtaaagaaaaataacatatactcagcgagagtcatccaatatagtcagcataactccctatggataaagataaaagagtagatgaacggttatttaagattatcccatatgcacaataatgaaacatgagggatgtccacatttcatgagcggttatgaaagaatagatctcaagggaataactgtcacc

SEQ ID NO: 149613 - DNA, 1133 bp, Cannabis sativa
acttactatcttctcggcaatttccttgtcgtaatcagtgacaagttttgttctcttggtccgagatttgatccaaacacggtgacatgggagatcttgaacgtcgagatcctttttctacattattttataacaattaaattatgagtacaaattatattttaaagcacattattagaattcaagcattacttaccacatcttcatgtacgttcaccattccactccgactacttcaatgtctggattggatttttgacgaactttccctttgcaccttactcaattcctacaatgccaaaaaaatacattagatatacgtacttgtattttagagtttatcttagtacaaatataattagcgtacctaaaattcaggagttagtcgactttcaacaaatttcaaccaatcaataagatcgatttcgggatgcttgttagggacttgtgccagtcattgcacatccttctcttcaatggcgggcattataacgtcttttgtcatcctattcttgaagtctttcattaacttcccaacaaggatcagacaatcatgtttgaaggaatctggcattataaaacccatctagtttgaaggaaaacaaacacgattagagttaacatctgaattaatcaaaaataaatcaaaattctaacaaataactacttacctgtacatctgtccaaactttatttttcagtgtagggttgacttcttttcaatttttatagaacaaccctatcatctgacggcatctaactcctaaagtcgatactagcttggagtagcttttgccacagtattgtcctttgtcattcacctcgagggtcactcttttgccttgatctatcagcttggatatttcattcatttgagtagctcctcgtgtaggcatcggcctataacactctgcctctgggtctgaatctgatcctgaacccgagttggccatatctacaccattaacaaaaaaaatttaaagttagctatatatatataataagtattctatacaaaaaattaaatgcataaacaaacattatgtattcagcataaacaaacacaatataaagtaagctatattgtaacaaacaaacaaaacaatacaaaaattagtttattctaattctac

SEQ ID NO: 149614 - DNA, 581 bp, Cannabis sativa
tggaatattagaaacatactatgatcatatttgataaaggttagattatcttataataatctcttccctgatgaggtgtttatttaaaagtcataattaaatgtaccaccggttaggtagcttaataagtgtgttatgagagaaatattatatagatgttcactgaattaaataggctaggcagcctattagctagccttatctcctgcgttgtttggaatatataatgtgtttcatgtctccatgctgagaaaatatgtatcaaactcgacccatattttgagctttgacgatgttaaacttcagacaaatttattatatggaaaaaaatatcttgtcaaagttttgcactagaaagaggaggtagtatgaaatgagacaattccactagttaagagagtgctgtagaaaaaaaaaatatagcagatagaaacaacaatttgagagttagaatcataaatacaggggtaatttcttgattggtttaaataaatttcgaggataaaatttctataaggaggggatggttgtaatatcctgataagactaatggtaaataatagggtttatatttatattat

SEQ ID NO: 149615 - DNA, 845 bp, Cannabis sativa
tttcatcagggacaaagacaagcggacattgtgaatttttcgttgcaaaaaaatcaaggttattttatttttctgtcttttaaataaaaaaaaaaattaaacgattctgtcatttgagctttgttaaaaattcttgttatttttcttgttatgtttcattattttcttagacactatatttgctcttaagtgttgattggtgccttatgcgtcttttagtgttgccttgttcgttctttgcaacaaaatttgggggacaaattttgaaaaaaagaaaagagaaaaaggggggcataatttttgaatcttggcttttttcttttatttttttttcttttacggaaacatgttttaattgcattctatctattgtgtttcctttatttttggagatttgatcttatttttgtggggttttaggaaacttattcttaaataattaattattttgtggttttctcttttggtggcaatttcggattagggtggtttttttaattcttagattttgtggggatatggttttctttctccatttaaggtaaccttgacaaatttttgaaaaatcttttggtttcctttttactctccacacgtggtgtctaaggtaaggaagttactttccttttttcattttttttgcttattgggtaattaaatttgaaatgttatatatactcaactacccactcacccacgatcaccactctctcctctcttcttattttttctcaaaagcctactctttttcaagtgtgagagtgtgtttgtgttctagggtttcaaagagaaatggcaaaaacaaagaatgctcaaccgtccaagaagccctctcatggctctgc

SEQ ID NO: 149616 - DNA, 720 bp, Cannabis sativa
gctgcctctctttccaactcagcattttgttggttagactcggccagacgttgccgaagttgttaatttttcaattcaactaatggtacatacctagtgggatcataggcatcctcactcctaggtacataaccaccagtattagtattggttttctcattcctagtttttgggttttgatcatgaccaccttggcttcttcttgaacgtgttgttcctgaggtaggtggcctctattaacccattggttctttctcaggacgaccattatcgtttttattatcattagccatggacaaacttctggttggtttggaggggatttttctgagctattatcacataggctcttaatgaaagcaccaaattgttaacgcagatttttgttaactaattaataagcctttttcgtaataaattaaattcaaaaactataagaaatttgagatgaataataatagtaataatgacaccaagttttttacgtggttttgcagttaactctgcatagtccacgagtctatcttattcaagatacttctggatacaaaatgcagtattataatcaatgatttttttctctcaaaggtttttcgtccctttttgtgtatactctgcccctatttattggaatataggttggcagttatttacatttgaatttgaaatacataactgttttcacgaaacgtgggctttgaccatgttccattttaacac

SEQ ID NO: 149617 - DNA, 530 bp, Cannabis sativa
aattacgacattcgacttaaggaaggcgttccaaaaatgctccttagaaatttaaatcaaacagaaggattatgcaatggcacaagattgattgttacacatcttgggaaatggtcaattagagctgacattatttctggaacaaatatcggtaaaaatatcacaatcccaagaattatcatgtctcccagcgaatcaaaatggccattcaagcttactagatgacaactttctttagcatcatgtttttgctatgacaataaataaaagtcaaggacaatctcttaagcatgttcaattatatctctttaaacaagtctttacacatggtcaattatatgttgctgtctctcgagtcattacaagagaaagattgatcatactgaacgacgatgatgagatggaacatagaaccttcataaatatttacaaagaagtatttcaaaatattatttaaattatattttatcataacattctttcataaaattaataactatatattgtttatactaacaatataaaatatt

SEQ ID NO: 149618 - DNA, 559 bp, Cannabis sativa
tcccactcagttatgctatatcatttacatagtctcggaatgtcccaacttgctttaactctctcagctggcgtcgagccaagtaggtgacattctctggcaggaattgtgcattcaattctttcttgaggtgttcccaagtctcaatggtgcacttacaactttgaatgtcttcatatttcgtcctccaccacaacttggcgtccccggacaaatacatggtagcggttgctacctttgcttcttcagagtcggtccgcacgaccctaaagtattgctccatgtcaaacagaaagttttgaagctctttcgcatccctcgcccctccataacatttgggctcgagtgctcttggtcggccatactccatacctttgtgcccccggtatttgcatgctctgttgctacatggtaagatttagcttagttgacattcctactaactcttcctaaatggctgtggcagacacattacaatcctctatcgtatcattgagggagtcttgtaatgcagcttgcccattttgtagcacagtgatagcagccttcatgtctgttg

SEQ ID NO: 149619 - DNA, 554 bp, Cannabis sativa
catttaagatctcaggtaagaaggtttgttccaatctgtcatttttgtggtattaaggggcataattgacctaaatgtttcaccatgcaaaatttgtacaaaacaaattattttggtaattggaattttttttaaaagaaaaatagtactttaaaacaaaaattgattgaaaaagaaaaatgtctagctggtttttctgataaaggtgctgcttgtcaaatgtagtatttcgatagtggttgttctagacatatgacacgtgacaaggattttttttgtgaatatcagaccaatgctatgtggtaaggttacgtttggcaatggtttaacaagaaatgtcattcgtatggaaactctcaattttgaagggttaccaaggttgaaaaatgttatgcttattgagagactaaaagctaatttacttagcattagtcacatttgtgatcaagggcttaccgtcaattttgacaatgatcattgttttgttcttaacagtgataaacaatgcattttataagggttaagatctgtgataattgttatactctcacatc

SEQ ID NO: 149620 - DNA, 584 bp, Cannabis sativa
ggtaactaggggtttatgttgccgcatagagactcagtgtttgagtggttcgtgaagctgcaacctctaacttttctgggaggtactgatataattaaagatgagcagttgatgagtataatcacccgtatccttgataatatgggggtgacgggaacaaagagagcaaattgtgcaactttcaagttacaagatcatgcccgcgtttggtgggacatagtgaggcagactcgtgatgtcagtgtcatgactttgaaagattttaagagtctgtttgaggaaaaattttataacatcactgtgaggacttcacatatggaagattttgtgaaattgagtcagaggaaatgtctgtggccgaatacactctggagtttgatcgactgtccaaatttgttggtgatcaggtgcctacagatttcacaagaaaacaaaaatatgtgagatgaccgaatgccacaatctgttgggacttgaagattaccactactcatgacattttgtacaagaaagtggtagagctagccttaattgctgagggggcggagctgttgggttttgtgccctaaataaaacttatttca

SEQ ID NO: 149621 - DNA, 880 bp, Cannabis sativa
cattaagattacactatgatatgaagttatattatatgtgagaataatatgtgatatgatatgttgttatatgtatgcaagcatggtctgaattgatttgatattgtgatattgatatacttatggttatgttatctagttggggggttatgtcctacatagctcttcttactaggcgttagctcacgggtactctgtgtgcaggtaaaggcaaaactaaacagtgaggatggcaagctcgaggctattacatgttaggggattgtcacgatgttttggtttaaaaatattttgttaaagattatgactcgattacttttgtcaaagttaatgtttaaaaatttataaatgaatcaagtgtttttgttttaaaataatgagatctcatgctttggttattttccataaattggtttattatctttattataaatgttttaaatggacttgcaagtgtgacgtctcaagaaatcggggtgttacacatcggattgggccgatattgacattaaataagatattgtaaacttactattatatctctctaagtcaatatcacttagttgatcttaggtcaatatatcttaatcttgagatggttaggtttggcttaaaatgtattatatgtgttctttgacttgttcattaaagatgacctattggatcggcccaatacttacatcttgagaacatggtagtacaattcagtgagagcgctaatcatagatataaaatctatagcttcgataacttttagaagtgaaacgatgatttccttcgcgcttatcttatagcgataaatgattgaggcctcattttagtaattatattagtttactgaaatatcatttacaactagctaagtgtttaaggataaaat

SEQ ID NO: 149622 - DNA, 1003 bp, Cannabis sativa
atctacttctagtgatgccgctccgagtgcctctaatgtgtttggtaaccctaatttttactctattttttggatttttgattgtggtgctacacaccacatatgcaataacattatgtgctttattgacttttatcataatattattgcttctttagtcactttgcctaatggccaacaaaataaagtcaccgcctctggtgtggttcagcttaacaaagatattaggctgaaaaatattctctttattcctgaatttagattcaatttattttatgtgactgatttcttagaaaataacactaacttgttgttttctgaatctcgatgtgtcattcaggacccctctcggaatttaacgattgggacagctaagaaagttgggaagctctacttctttgagcaagaaatccatttttttttacttctgatgatttaatttcagcaaataatacttgtactaatgatgatccttggcatttccgccttggacatccttctatatacatttctcgttcaatgaataaaacattgcaattttctttgaaaccgaatgactctcattattctatttgtcactttgctaagcaaaaacgtcttcattttcattctcaaaacaatatgactactgccccttttgatttgatacatattgatacttggggtcctttccatattgatagcattgaaggatatcgttattttttaccattgtggatgatttttctcgtttcacttgggtttatatgatcaccaacaaatctgatgtttctttctaattcctcagttttttcagcttgttgcaactcaatattccatgaatattaaggccattcgctctgacaatgccaaggaattcaaccttactgccttttatgcttcgaatggcatcgaacattttcattcttgtgttgatcggccctaacaaaattcggtggttgaacgaaaacatcaacatatattaaatgtggcccgagctcttcttttccaatcacatttatct

SEQ ID NO: 149623 - DNA, 539 bp, Cannabis sativa
tgaatcagttgtaaatattttaaaatcgggattccagttttataaaagttagttatttttaatattaatagtaattaagcaaagttttttttttttattgaaaatgaaagtcattttattaaacgaaaaactctgttaccaaactaggcaacaactcaactggaacaatgtccatattgaaaaggcgataagggtgagatataaaggccctcgcaaaaaaatgagccgctacatttagtgatcgttttacaaaatgaaaagaaacattacgcaaagaacttaacaaattcctacaatcactaacaactttgcaagataaaaaaaatcataactatagagctacggacgcgatttttaataaactcgttgattagcaatgaattgcacaattaatataaaatcacgataatacgtttaaactagtagtgttacaatttggtatcagagttgccaggttgtcttccgaagattgtcacgatatgtacaataatcattagagataagctcaactcacatatcagtaagcctttattacttta

SEQ ID NO: 149624 - DNA, 598 bp, Cannabis sativa
aagttaaaaggttgtaacttaagtttttatatttatgtatttatatatagtgataaatatgcaataataaaatatgttatgaagaagtggaaaagttataatattaaatttttttattattaattattaattaattatactttttataaatatatgaatataaaataataaaaaaatgaaaacttttacaaaaaaagaaaatagtgatagaatgaatgtagagtgccacctaaacctctattgtactttgctttatttatatatatagatccgttgtataatatttttgcgaaaacaacataaaaattacagtccatacaaaaaggaaaattaaatccataaaaaatttaaaataactgtagatccatatttatatactagtagaatgctacgtgcgagggacgtatatatactaagttttatgttagaggtgttttgctttatttcaaaataatacaataaataattaaagaaaaaatatatttttttgtttgtttgagattattaatatatatattcaattaatgtaaataatataaggcctcaccaaatgatataagaagtgatgaagataacccattcactcacttcgagcttg

SEQ ID NO: 149625 - DNA, 886 bp, Cannabis sativa
gctttcctttttccgaacatgggatgggatggctaaacaggtgaaatgggctccctgatgcgaatcgcatgttcaacaggcctggacgtggccgggagtttcttcttcctcttcaatggggtacctgctcttcttcggcctcatcttcacgattcaagggctcctgagcatactgcttggccctttcacctcccttcaacttagcttcgcgcttaagttgaatgagttcattctccttatgagctcgttcactccggccagcaccagatttcctcttcttccccgccacggactttggagtaaagtcctcgggatagagcccgtacctcacaaagttatcctcggaggtcaactggataatattctagtcttccccccagcagccgggcaagtttttgagctctatctctaagagcaagagtgaggggaggacggtgatatgttggaatctgctggaatcgagtccgagtaatgcccacgccatccaccatgaagtactcatcagcaaaacgccctatcttgttgatggccttgtcattcgtgcccgtcaatgaagcctagttcagagaaatagaagtacctcgacttgccttgcttgggggtggacttcaaataaaagaaccaggcaacttcgtgaggagaaggagtaccccacttctgggaagcgtagaggacgaagagggcagataaatacttaatgcccttagaagtgaactgggctgggcaaaggccgaagaagtccgccacatccttgaagtatttatgcaagggaatcaacgctccttgctgaccatgggcaccggaccaggcgcacatccccttgacagggtttgtggcacgattgttgtgggcgggaatgtagcagtcaagctcgcccaggtatccg

SEQ ID NO: 149626 - DNA, 642 bp, Cannabis sativa
ccactacgtttgctttgccgggatggtagaggatttcacagtcgtaatccttgactaactctagccatcgtcattgtctcatattcagatctctttgagtggaaaagtattttaaacttttgtgattggtgtaaatctcgcacttttcaccatataaatagtgacgccaaacctttagggaaaaaaccacagctgctagttctaaatcatgagtggggtaacactgctcaaaatccttcaactgcctagaggtatagacaatgaccttccctgattgcattaacgcacaacccaaaccttgtcttgagtcatcaaagtatatcacaaacttttcatcactgactgacaggcttagaactggtatagtaatcaatctcttctttaattcttgaaagctattctcacatttatccgtccacataaacttataactctttcgggtcagttcagtcaagggagtagaaatcttggcaaaaccttctacaaatctcctatagtacctagccaatcctaagaaactactaacttcaattgctatcttaggtcctggccaatcttgaacagcttcaatcttcactggatctaccagaattccatccttacttaccacatgtcctaagaaactcacttgggacaaccaga

SEQ ID NO: 149627 - DNA, 519 bp, Cannabis sativa
  modified_base (162)..(175): a, c, t, g, unknown or other
aatcatcgttggccaaaagtagccttgccttaaaattttctttgataagctttgtccggctgcatgatttccacaaaattcgtcgtgaacttcaaatagaagtcgttcagcttcatctggtgtgacacgtctgagtaatggcatcgagaatcctcttctgtnnnnnnnnnnnnnnactatgatgtaccgtgctgcctttcttctcatttttcgagcttgatttcggttatttgggagtttcctagagttgagataggctgctattgacgtcatccagtttggagatgtgtcgatcatttcgatttcttccgtgccagtgatgctaggctcttcaaggaactggaaagggaccaggttcgccttgtcacttatatcgttgctcgctaatcgagctaacgcatttgtcgttgtattttcttctcttggaatttgtctgaggttgtagcttttgaattgtgcgagcagatcatgtattttgctcagatatgctatcattttttcttcccgagcctcgtattc

SEQ ID NO: 149628 - DNA, 616 bp, Cannabis sativa
tttgcctggtcagttgtgtcagggagcctatacttaaggcctaaggaaagtgattagtcttactctttcactttactctcagaaaccctaagttctgcaactttcacacctttctctctaaaatggagaatacaactcccattgcagtaccccctgtcgctatgtttgttctatcagtggcaactactgttgatcctacagtcgagactacacttgctaatccctgtcgtgacattatcctctaccagtcggaggttggtggttctgctcgccactcgaatcctgagtcgactctgtctccgccttcacctccagtcaatcagaaacctcgtacgtttcaaggtaaggctcctcccctgactaaaaaggttagtccttctctgtcgtcacccccttcgtctgtatcaaaacgagtcactcgttcatcgtcgagtctacaacctccatccaaacccgtaggacctcctcctcctccatctaaggtttctattccttcccaaaccagtgaaagagttcagttaaaacgaaagtcctcacgtgataccacgcatcaaccacctgaaaagaaatccaagaccaaacccattccagtcccatctacagactcatctcccaa

SEQ ID NO: 149629 - DNA, 829 bp, Cannabis sativa
  modified_base (29)..(52): a, c, t, g, unknown or other
  modified_base (774)..(778): a, c, t, g, unknown or other
attaagtactaataatgagttaatatatnnnnnnnnnnnnnnnnnnnnnnnnatatgtgcattaggctcaactagaggagcaagttagtcaaggacaagttcaggtccatagccaaaatgacattctgacgcaggcgctcgggacaccagagcatcctggacgtgtcaatgctactaggtatgcatgtacttgaaaaaagttatttcattagttatacaaaataaattatagctaactttatttattgatttgcaggttctttgctaaggcatctaaaatgtttggtaggaagaaaaaggaagttttaaatgatgtggctcagaaatagagggagattgagaaattaaaagccgaaattaaatcccttaaacagaagaaaaatattgtcgaataagagcaaaatgaggatgacgatgaggaaggacatgtgactcatcaggcatatgttccacaacaatatgctcaggaggatgagggtcaaccataaatttatgctcaggagtttgtttccctaaatgagccacctctcatgtacaatttccctaaacagagggtagctaatcagctagtatatctctactcagaaaatatcaacaacatagtggcccgagcttatctgtgtgaacatgagggtccaatcacagttcacactaaagactacgatgattcacatacccatattctcatttcaaaaatgttgcaagaggatgctgaaatcccaatcacaatttaggggtgcaaatatattaaggaagtagcaaacatgttccttnnnnngcctaaatacctaattgtaacacccgaggtaacttttgttataaattaatt

SEQ ID NO: 149630 - DNA, 564 bp, Cannabis sativa
tcattccaaacagcattccctggttgccgatgaagtcacacgtagcaacctgctgcaaatcctctccagataacgtgatctgggtacgaggtgctataaatcgttggggtgcccgaatcgggatgatgtcacgtttatccttgactctcagaaattcttcaaccatccatttaagtgacttagggattagtggcataatctctggtgtgaataattcatctacttgatcaacaccgcctttttgacttggcatgtgatctttttccttcgacacatcacgtcttgatagtagttgagctagtagaccctatacaaaataccatataatatatcaaatttgatcctaattatattgaatttttagctaaataacggctgtaattgaacacccctaaaattttaaacatgcctaataacaaacaaaatagataaaataattgattattcatccaactgaccgcaacacatgtattcataaaatctactttactatggttgaatatttaaaatattcaaactccactaatcactgataattaatttataacaaaagttacctcgggt

SEQ ID NO: 149631 - DNA, 849 bp, Cannabis sativa
  modified_base (324)..(328): a, c, t, g, unknown or other
gatcctcctccatctagacggccgaatcctgttcggcactgggcaaagtggcgtgctgagccacttgaggatcaaatgcgtcagccagacgtgtcattttctttgtacgagccatcattctctggctggatacaaaggttggagaaggcccttcactagaggaaggtgggctagaacaaagacgaggatgatccacgtacagaagttgaagcagatcctggttgatccgatgtccgtgttcctaagactcaccttacaaaagacaacacacgagatgagtgtttggtcggaatactgaacaataaacaagcaaatatgccgacnnnnngtactcaacagattaaagaacgagtatgttcaaggaaaagccagaactcaagaagtgaaaaattttcttgagttagggaaaagaagttgatgaagcttagaataagcaagatgaagcacaggcgttgtgaagttcagaaacaagcgttctgggtataaaattgcatgaagacatgataaagaagaatcagagaggtttctaaacctagggtttcctaaaactttttctacagcatagtagaagagacattcgaaatgtaaacatgcaaagataagcataaaggaaataaaaaacttactcaaggttcaaatgtcagggttcaagcaacgtcaatccaacaagcagtttgtatgaaggcactttagcaactttgaagccaagaagttctcttttcgctttgaatcttacttaacaaagaagggtgatgaaaatgagttatgtgccaatgctatttatatttataggcaaggcacgaaaagaggtaatcatttcaaagaaaccttagacgcctcagtttccct

SEQ ID NO: 149632 - DNA, 600 bp, Cannabis sativa
  modified_base (560)..(574): a, c, t, g, unknown or other
atatcatggtcaatagcaccaactgttaagaacattcttaatcatctggtaagccttgtggataggtgtatgggcgcctagatagaggtcgatattatatgatttgttatattcttttcttactaagtcttttggctcacatattctacatttatgtgtaggttaaggaaaggaggaagcagaataggagtaaattctgagctcgggcaatgattgtacatgtcgagactgtgcgacctggagtgtttagtcttgggacaccttgggctatattttgtagtcgttatgcaacaagttgtaaaaatattttgataatatttgtaaaaaatttaaatacaggatcccggtttatattgataaatatatatgtatataaagtttaataattttaattgaaagttttaatttaacacgatttttgagaaaaaccctttgatttgcaaaggaggcacgttaattagaaaatcactgtagcgcctaggtatcaaggcattacaattttggtattagagccgccaaatttgtctacacatgtacaatctgttggatatattttaccnnnnnnnnnnnnnnntaccatgtatgtttcattaacatcct

SEQ ID NO: 149633 - DNA, 2251 bp, Cannabis sativa
aggttatggagatgaggggctcggccttcgtccatttagtgaagaagtcgactgctactaccgcatacttagctcgtcctcgcccagtgggtaatgacgcaattcagtcgatccacgtatagcaaatgagtagtcgatcccccagtgggtaagatctgttggcggtacgcgatgtatatgagaaaacctctaacacatatcacatttcttcacaaactcgtgtgtgtccttatgatcttttttgacagactttgctaacccgcatgatccccactgaagccttcatgaatttctctaaagattttgtttgcttcttcaggaagaacacaccaaagtaggggaattgaataccctcttttatatagtttgccttcgatcattgtgtagcgaggcactgaatacaatagttttcgcacctcatttttttcatttggaagttgtctgtcgagtaaataattgataataggcgtcatccatgttggagagctatctatcatctcaacgtcttcagtttcacatatacttagctcgctcagcatctctaccatgaccagattcaattcatccaggtcattctgcgaggctagttttgctaaggcatcgacattggaggtttgttctcgtggaatttgttcgattttaaattaatcgaatctttccatgttcttccgaactttctctaaatactttgccatttttaagcctttagcctagtattccccgaggacctggttcacgatcagctgcgaatcactatgacaaatgagattttttactttcaatgcctctgctatctttaagccagcgatcaaggcttcatactcagcctcgttattagatgcgtcaaattggaatctcaaagcatagtgaacgtaaagccttctagcgatattaatatacccttgcacccaaaccctgttcgttggatgtgccatccacatataactttcaggttttcacgtctcgctgatcaggtggaatttattcgggagttataccttctatcaagaagtcagctaaagcttggcccttgatggatgttcgaggatggtatgttatgtcgaactaccccagttaaatcgaccattttatcaatcttctagaaacatttggtttagataaaacttgtctcaagggctgatcgattaagacttttatggggtgagcctggaaatatggtcgtagtttacaagacgaatggacttggcacaacgccagtttttctagaggggttatctggattctgcccctagtagccttttactaacatagtaaataggttgttggtgcttgcatcttccgagatggttaaatagagaactaacgtctctccagttattggttttgccaaaacttgaggcattgctagatgcctttttatgttttgaaaggcctctttgcactctttttgttgacttctaaatgaacctgttaagtgcagccatccttcctgtcagggtctgcatttcctcaggctttgttggtgatgggatgtctattaatgcctttattttttcaggatttgcctcaatacccatcacgttaactatgaatcccaaaaactttccggaggggactccaaaggaacattttttcgggtttagcttcatgttatacttttttaatattttaaagcattccgcgaggtctgaggtatgatccttactttttatcgattttaccaacatatcatcaacgtaaacctccacgtttcgccctattttgtttgcaaacatttcgtttaccagtcactcataccttgccccagcgctcttcagtccgaacggtgtgactttataacaatagagtcccatgtttgttacgaagcttgtatgttcttgatatggaacgtacatttttatctggttatatccagaatatgcgtcgataaatgacataagctcgtgcctagcaattgcatccactaactggtcaatcttgggaagtgggaaataatctcttggacaccccttcttctgatcggagaagtcgataaagttctccaagttttgttaggctttttgacgagaacaggattggctatctacgggggataaaaaaccttgtgtataaagtcgttgactaacaacttgtccacttcctgttttagggccccttacctctcggaatccaagggtctccctttctttcgcttcgctgggtagtttagatcaacatttaagtgatggtagataatattagggtcgatccctatcatatctccatggctctaggcgaactgatcctagtt

SEQ ID NO: 149634 - DNA, 621 bp, Cannabis sativa
aataaaacaatagatagacaaaataaaaaatatagtaatgactacgtccccatagcatactgagtacgcatactgattcaatgtacgtatactaaaagattaaatcaattatatatagaacctacggcgaatgtattcaattcatatactgattttaccaaactctgtgtttgatatatattatatatacaatgaattaattaattaagaatatagatgtagatataaatatatagtgccaccaacttttgcttcaatgtatgtacggaaatctgagcattatagagtcataaaatataatcaatatcttattaattataataatattgatcatcaattaatatctaagatcaataattcaattttaaatcattaataataacaataactaaatatataaaaaatatatagaaaatatataaagaatcacgtaaagaaacattaattaaaatataatgaaaaggaagtgagaagtacatttggcttaattttattgggctagatgggaactaattaaaactaaagtttcacattaataaaagaaacagaaattatagagatacataaaaaaattgattaacaattaattaattataaaacaaaatatgtagtgaatcaata

SEQ ID NO: 149635 - DNA, 581 bp, Cannabis sativa
ttaaccctagatgaaattctataataaataatgatagactcttattttaataagctgataatgaaatcctataaatgataggctcttattttcataagctgataactcgaaatttgtcagacaaaataagagaggctcttattgaattcaaaattccttctcttctcttgtcacaacccgagacctaggtcgtggtagatatgtaatatccataacttgggtggtcaaaggtcacattttgacccttgtaggaagataaagcttataaatgatcttttaatttatatcacaaaatacttatttaaaaataatggattaagtcctatatcgataagaaaatattagtaacaaaatcaggaccattcattaatataaaagaacaataatattcgcagttatgtagtcaccgaaagatagatttaataggtcaataaagcaccaaaataatatctagcatccatcattcctcgtttctaactgacacttacctaatttaggtcatccaaaccatctattccaacttaaatacaaaattagtttcattggaagattatagagtagaataagactaaactaacaac

SEQ ID NO: 149636 - DNA, 858 bp, Cannabis sativa
cagctaaagaaatcccttgtaatagtgtagctgattcatcagctcaaatctcttgtaatgattctttcattaataaaaatactacttttctcactcattctcttactcctgtaatggctttagttgctaataaatataatatcaatcagtggcatgttaaaatgggacaccctgccccaaaaatacttgccaaaatgtcgacacagatgaacatcaaaccagatttgaaaaatcttcaattttgtgaagcctgtaaacagggcaagaatcatagattaccctatcccatatctgatgcaagggcatctcaaccccttgagttagtgcatactgacttatggggtccctctcataccccatccaaagatggatataggtactatattcattttttagatgactttagtagatatacatggatctttcctctcactctcaagtctcaagcctatccaacctttttacagtttaaaattcttgctgaaaaacaatttaatttacctcttaaaagtattcaatctgactggggaggtgagtataggtctttggaaaagttcttgcttcaacatggtatccattttaagcaccctttcctcatgaccatgctcaaaatggtcgtgctgaacggaaacatcgccatatcactgaaacggggttaactctattggctcaagctggacttgacttgtcctattggtggcatgcttttagcactgccacatatgtcattaacagaatgccatctgctgttataggagatatctctccacttgagtgcttgctacataaaacaccagattatgagttcctaaagcctttcggctgtgcatgctttccatacttacgaccctacaatgc

SEQ ID NO: 149637 - DNA, 1004 bp, Cannabis sativa
  modified_base (835)..(840): a, c, t, g, unknown or other
ccttagagcaatggtaattgatttactttcatgaaatttggacctaaaacgatttgtgtgtgatttggatggttccatgttgatctgcgtgttatttgatgattgatttgatgtttgtgaaatttttaagaaaaataattgaattttggttttggaattatttttgttggatagtctggaaaaaattaagcaatttaggtttttacaaaacttgatttcaattttatttgaattagttatgattttttgaaaattttaaaaaatctaaaatcgggtgcgccttccttacgcgggcggacacgaggcatcactcagtgtcacgcgcattcagacaaggttttgttcgaagcagctcgcccgtgtgctgtctgaaggacctcctacgcgcgcggaaatgctgcacgcagcatccctgtgcgtgattcctcggctgagcaacctagcacgcacacgcggatggtatgcaatgcataccatccgtaccacatgcaatatttctccaattttttcattttttcgtggtttttcatgaaattaattttggattttttgtgtacttttgtattctgatttttaaattaatttaagatattagtgaaatttgaatttgaaaataggtaaaaatctatctttttttcttaattaattatcttattttaaaattatgattattttatcttattttaaatttaaggtcagaaattaatatttttttttaaaattattctattttttataataaattgaccttatttaaatttaaaataagattaatttaatcatgatattttaaatagaaataggatattgtgctaacttttaaattttgttattnnnnnnatttaaattaaattataaaatgagtaaaatgatattaaattatcattttattttattgaatatttaattttaaaataacatgcaatttgaaaagtagttagcaatttttttgaaaaagattcttaggttagttgaaaaccaatttttcaaaattataggtttaa

SEQ ID NO: 149638 - DNA, 746 bp, Cannabis sativa
  modified_base (264)..(265): a, c, t, g, unknown or other
tatggtccctcccaattatccccgaagaccccatgtgctgggttcttggtatttggcattactcttcgaaggaccaagtctcctactcgcagtactcttgccttgactttggaatttaaatatcttgcggttcgtcactggtaagtcgcgtttttcaggtgagcctgatcgcgcttttcttcgttttgtaaaatgttgaaaacgtctcggcgtaaggaacctgccccaatctcgactggtaccatggcctcgcatccatagganngcgagaaaggagtctcgccagtcgtggatcgaggagttgtgttgtatgaccatagaacttgcggaagctcgtctggccgtacccccttacgctcttcgagttttcctttgatggtgtgctttattattttattgactgcttcagtttgtccattgctttgcgggtaagcaattgcagaaaatgcttttttaattcccaagtcgtcgcatctccttacaatcgaactgctttccgttatctgagatgagcttgtaagggatgccaaatcgacaaattatggagttgtaggaaaactcgcgtaacttagtcgctgtaatggttgcgagtgccttggcttcagccaattttgtagaatagtctactgcgactacagcatacttaactccgccttttcccttaggtagttcgccgattaagtcaatcccccacactgcgaaaggccaaggacttgtgatggaatgcaagtttcttggaggttgat

SEQ ID NO: 149639 - DNA, 517 bp, Cannabis sativa
atgtcgtttctcatgtagaggtgaaacctacacattccattgtgctggtaatctatgtgttgaatttttttgaaagtccactctcagctgttgaatatcatcgatgatattgatgatttgggagtggctgaccatcaatgtgtgtggctacatgaataatctccaatggattggctgactctcgatggtgatcgcagatgcggttgtcgacctccagagattttattgttaaaataataaatatctacggaatattatttaatgaaaaattcaataaaattttaaactgattagttacgtgcaattatgtttacgattgaatttaaagatacagtcagaattacctattttagtgatagattatattttgttattagttttttaattaatatttattactttataatttttttaaattttttattaatatattttgatatatatgtgaaacttaacgtaatagttaaaagttaacggaaacaaaaaaaaaaatctagtgaatgattaaaagttaaca

SEQ ID NO: 149640 - DNA, 984 bp, Cannabis sativa
aggtagctccagcattctttagactaaacggcatgaccttataacagtacagacccatatctgttcaaaaacttgtatgttcttggtctgatggatgcattctgatttgatgataccctaaataggcatccatgaagctcaggatctcatgcccggctattgcatacacgagctaatctattcttggaagtggaaaatagtccttgaggcacaccttgttgagatcggtaaaatcaatgcatactcgccattttttattgggcttgggtaccagtacagggttagctacctaagccgggtaaaaagcttcaatgatgaacttattattacgtagctttctacctcttttatcaatgcttgtgcccgttctttgtcgaatagtcttcttttttgttgaacgggatggaagtttggatcaatgtttagggcgtgagatattacaaaaggatcgatatcgaccatatcctcgttgaccaggcaaaaatatctaggtttgctcttaaaatttttattaaagctaattttgcttcgaggaataaacctttgccaattttgagtttcttggtcaggatatttgggtcgatttctacctcttctagttcttccactggccctacatttgtatttggttcccaaagtcggggatccacgtcctcatccccgccttggaaaacttattattaggtaatacttttctccttgcctgaactctggctggaggtattctcctttttgaccttggtcagggcaaggttatagcattcccgtgctattctttgcttccttttgaggcaccctaccctattctttgttggaaacttgacgcacaaatgaaaaactgatgtaataactttcaagtcatatagggccggtcaacctaatatgacgttgaaggctgatggaacatcaattatcgaaaattgtgccatcacagttatgctcctcggagcttgtccaacagtgagggggagacgaatttgtcct

SEQ ID NO: 149641 - DNA, 1031 bp, Cannabis sativa
ttttaaatgatgagtctattttaatttttattttaataattacacctcatttacttataaaactaaaattatctccttcaagtcttaaaaaagaatcattaatagggaaaaataattgaggttttatcaataaagaaaatttaatgtagagataaaaagtatttaattattttattacatttataatctctatattttttgtatttattttcgtatgaatctcacttatatatatacactaatatagtaatatatgaaagatttcattcatttatttcattattttttgatcatagaatttttatttattgttatgtatataaaaaaaataattgattgttaattataattataaaaagaaagatgtatatgtaagtatgtatattttgatatctaaaaattaatgattatttaaaagaatgaaaatgatgaagaagagataataaagattcagaactaaaaaaaaaatccaaatgaaagtagcttgaatatttattgtatggagtgtattttttttttcttttttttttttaagagaaacctaatttatagtaaataaaaaggggtgtgcttatcaaaaataatatttatataaataaaatggagtgtatttaaattaggggtgtatttataatttattggggtgtaaatataagcatctattattattttatgatgtgtaaatataagtttccatatatatatatatggaatgagaagaaaatagaaagaatagataaaaaataacttccatgtcatcaggtaataggttaaaataagaaatattaaatttaaaaatttaattaatagttataaatatcaaccattagatttgatccaatggctaataatagaatactcattcataggtaatacccataattataaatacccaaaacttattatataatgaatgtataaataggtagtggtctttaagaaacactagggtttatgtattctctcttccccatcagagaaaatacttaagaaaatagtgtattctggaaagatcaaaaccttctctgcaa

SEQ ID NO: 149642 - DNA, 1280 bp, Cannabis sativa
  modified_base (948)..(954): a, c, t, g, unknown or other
  modified_base (1228)..(1231): a, c, t, g, unknown or other
ataaatagataaataagcataatttattaattacggaaattttattggaatatgtgagtatgttgtatgctatattggaaataaaatactttgaggtccgacaacagtgaaaactcgataaattagctaaaagtatcactctcatatttggaattagtgctacccgtgtgattatttagcgggactaatcaaaatagtaaattttatggaaattatttatttggggtcttgactagtggaatcgctattttatcttatgaattaattataatttatgtagtgatttaggggtgttttagtcagctgggtaacattaagttacataagtgttattaataaagatttatattgattaaattagtatagatatgttttattatttctttctttaagttgttgacacataggcacatgacttttattttagtttttacttcacttgaatataaaactaaattaaaaaccaaaaagatcattatcattatattcactctttttttttttctagccttgtcgagccatcaccatatcatcatcaacatctttcttttctcccaattccaccactagtggtttcttgatagttttggtagctaaaggtttataagaaggttttctcttaaagcttgattcaggaatttaaggtaaataattatgttctttcttgtagttttaaatagaaagaatcatggagtgtttattaattatggattctcttaagtttttggtcaagctaagtttggagtgagtttccaaactgtttcaaaaatttaattgtgtagaaaaaaaggataaatataaaattcaagttttggaaactctagtgtaaaatggttgctcatttggaatagtttgggaaggccaaattttgtttgttggacaaaacttttcccctgagtgtctgttttagacattttatgtatggtgtatgttttagagccaaaatannnnnnntattttagtgtatttatactgtgggtaaaaaactctagattgtcttacgcgagtgttaagtagtattttgggataaacacttattggtttatcattgttatgagatagggcctgggattatcgattgttctccaagcacgtcggccaacatacctgaattggatcttgaggtaagaaaagtataatgtaccacatggcatgactggttctgaaattatcgattctttgattaggcaatgataatgtaatgatactatggacataatatatgggnnnncctgattaggtgatgcaatattcctggcaatgtatcgggcgtaggtacg

SEQ ID NO: 149643 - DNA, 554 bp, Cannabis sativa
ttagttccactgttgactaattgaaacgtatgattcgcactagattttgtaccaaaaattttacaacaaaaataatataccttataatttttttttaatatactaaccattttctatcatatttttctccatttgacaactttcgcatataataagaagtaggaaaacgtctaccattttcatcttttaggaattcgatgtctcttacttttattggaccattttctactaataattctattagtttattatcaagagtttttcaatttcctggatcataaatataatctaaatcatttttaagatttctagttccatgctcttttcaatattttcttgactttcttcatcatccatcacattatcacatatttcattattagcccccaaattttctctatttaattgttcattagttttttcatttgaattactttcatcttttttcttagtgacaacagatttttctaaagctcctctctgagagttaattaaactttctattcttttttttttttttaagtttttcattaccatatggatattttctacta

SEQ ID NO: 149644 - DNA, 743 bp, Cannabis sativa
  modified_base (584)..(588): a, c, t, g, unknown or other
atcctgataagggaatatgcgcctggtcgggagctcacaagggttagtcttttttgatacttcccttttaacttttcacacttagctccatatgttaactttttcccttgtgcaggccggtttgaagtttgcttacacttactcccgagctaaatctgtcacttccaagagtacggctctgtccgacaccttgagggcggaggcggatttggctaagaaggaagttgagcaggccagggcggaaactggacctgttcggcatgagcttggcaaagccaataagaagctgtttgctgccgagaagaagatcttcgtgctaacaaaggacctcgaggttgctgatcgctttgaggagaccatcgagatcttatctgctgaagttaatagtcttcaggatgagaggagttctctgcggtaagttcttctttggctaaaggaggagagggacgcaaggtgtcgaggtggaccaattgaaggagaaggtcaatgctatggagaatgctggcctcgagctcttcttcgatttctggaagactaatccccaggccaatttcgactacttgggcgatgctaaggacatgtannnnnagtactgcgcggcccaagtttcttatgatgggaaagaggcggctgcttcaacttctggccaagcttcttactagtctgtgttggaaattattttactaggatcttagatatactcacaagtatgttgattaacaccgtaaatatgaactttctaa

SEQ ID NO: 149645 - DNA, 716 bp, Cannabis sativa
  modified_base (26)..(30): a, c, t, g, unknown or other
agttggtgaaggattatgattgtgannnnntttatcaccctggtaaggccaacgttgttgccgataccttgagtagaaaggggcggagtcagataaatactgtgaaacaaatctcccagcagttagcaaatgagatgacccgggccaaattcgagttggttgtagggcagttggctaatattaccctgtaatccactcttttagaattagagaagcacagttgcaagatctagagttagtgaaatcccaagatagggtttcggctaggaagactgttgactttacagtggattaaacgggaatgctacgatatatgaatcgtgtttgtgtgcctatgaatgagggtattaaaagagagattatgaatgagtctcatacgactccttactctgttcatccatggtcaacgaagatgtatcaagacctcaaggccataaactggtggacgggcatgaaaaatgacatcgctgggtatgttgctaaatgtcttacctgtcagcaagtaaaggatcaacatcagaggcctacagggttactgaagccattgaataatccagaatagaagtgggaagacattgccatgggcttcgtggtaggattacctaaaaccacaggacagtatgactctgtgtgggtcatagtggacaggattacaaagtcagcgcacttcttacctgttcggacgaacttctccattgattagtatgctgagttat

SEQ ID NO: 149646 - DNA, 1310 bp, Cannabis sativa
  modified_base (488)..(488): a, c, t, g, unknown or other
atctggacttccacgaccaccgggtcgttgtgcagaaatctgatcttgacagtatcttcatcattaaatgttatggtgggttcccctgctcgtgggactcgaaccaggactggggacttggacctaggacacgggcatcagaattaggactgagacccagaatccgaccccagagccggaccaggacctgggacccgaagtggaactagactgggacctgagaccgtgatccacatctaaacttggggcttggacctgacccgtagtcagtgtttggatctaggacccataaccggactcaaacccaaacctagactcagacccagacccagacccagacccgtaccccaaacttgggtccgagtccgagtctgggtttgagttcgagaactggaatctgactacgacccagacccaaaaccgtattgggacgcagacttaaatcaaaactcggatcggccaagattgggatgcggatcttgacccangacctagggttggacccaacccgtagtcggtgtctagatcttggaatcgtaccaggaccctaacctagaaccatttctagaccaggacccaaacccagactcggaccagagacccgaaattggaacaagaaccggaataaggaccttgggtcaggaatttgtcttggacccaaaactagctctagacgcgaactcggaccaagacttgcgccaggacctgcgacctaggacctgtgactcgggacctagaccagatgccagacccgcacaagaaatcaaacccagacccagactcaaaccaagacccgaacccaaacactgactgaaacttggacccagaccaagacccggactcataccagaactctgacttgaatcgggactcaaacccgaaccaagattaggactaggacccagacctggacaaaaatcgataactgaacttggactaggaccgcgattgggaactgggaacgtgaccacgacccgatacttggacctgggacctaagaaccaaaccgtgacttagacccagaccaggccatgactcgagagaaggaccggtaccgaacaaggcccaggacctgcacttgggtgggacgctatcccagaccgaatactagcaccctgacctgaattggggatccaaacccatgactcaggacccaagacccaaacctagacccaaacctggacctgagacccgaaccaggaccaaagatatgagctaaaactagactaggatctagatttggactctggacaggacccaaggctcgaggcttggacccgacccatagtcggtgtctaaatctgggaatt

SEQ ID NO: 149647 - DNA, 510 bp, Cannabis sativa
ttctgcttctgcagacgcatactgttttatattttcttatatatatttgacatttgcaaaaatacggtttttcagtttcaaatccaaatgtaatggttaaaagtccaatttaattgaatatctagtggtgtctatactttttagacgtgccgtcctgtgattagctagtgatactctttaaaagttattacattaaactatatagatttaaaatttaattacaccgatattgaccggccgaaacaatttgggagttggccaaaaaattaaaattgagtcttttattaaaagaatatatcaatcaatacttcataataaattcaattttttaaaaaaattactttataaattctaaaatagccaaataataataataataataaataaaataaaatcgtatgtattgggaccacaagattttttttttttaagtattaagtacatatttactcttatgaatatttattatgttttttttttttaaagaaaagcgtatttcattaatataat

SEQ ID NO: 149648 - DNA, 678 bp, Cannabis sativa
  modified_base (32)..(35): a, c, t, g, unknown or other
caggaccctggaacaagacttggaccgtgacnnnnacccagacccagacctagaaccaaactcggacctagccctagacccaaaccgagactggaacttgggctcgaagacagtcgtgtagctaccgggaccgataccaggagttggacctaaatttgggattcgatcccaaacatagactcagacctagatagggatccggataagaacctgaactttgacccaaacccagactgggattgaaacttgggaccaagatctggtccgagatcttgacccaaacccaaacctagacctgcacctgggacccgaactcgaacccgcacctaggacctgaactcggaccttgaccggaacctagatccagactgggatccaaacctagacccaaacccagacctagactcggaccaaaactcataccccgacccagacccaaaatagatcccgaaccaagacacagaatctgagtgtgggtcagtgtttcagtccgggtctgagtccctatatagttttgggtctgggtccaagtccttgtcttggtcctgttcgtgggtcccgatccgcttcaggtttcagtaaatctagatcctggtaaaatatttccaacacaatcttcatctgctcgtcctcacggttcctcagctttggcaatgcccttacctacacataaacgta

SEQ ID NO: 149649 - DNA, 569 bp, Cannabis sativa
ttttagacaccccatccaacatcctattcgatccaattggatattcaaaaataacatcaaatctgatcttatcacaattggatatccaatatttgacggtcggttataattaaatcggtcgattgttattagattggataatttatgcacacccctaaattattttatatagacaaaaaaaaaaaatagttaattaaactgtattaagattactttttaaaaggttactaaaagtatatgtaattcaaatttgcgttcatatcaaatggataaatgacctatttttagataaagaaacaataggaagagagtccacatcacaccactacaaaaatcagttatttttgcatcagttataacgttacgagcttacaaaggaaaaagtaaacaaaaaaaaattagttataagcttcaacccaatacactttaaaactggaatacgtgtaatcaattacacaaagtgggtattaggggtctgcgaagtctctcttttttgagtgaattgtcagtctctcttttttgagtgaatttttgtcctgctctgttttttgggtgcaattctttttgtc

SEQ ID NO: 149650 - DNA, 837 bp, Cannabis sativa
agtgcgtaatcatctcatccatattaggaggaatctcattaatcttgccccggatgaatagattagcatacttaatcacaaatacaccacagtcactgaaaaatataacaaaaataaataacaatacataaccagttatttaagtagaaaaaaataaacaaataaagaatcacagaagtcataggactaaaaataaccagttatttacctgttgctttgagtgaggagcttgtccacaaactcatatgcaataggagtatccttcggcatagcataagggcctgactccaaactaatgtcgttcataccatcataaaaatttaagaaatcaaggaagtatggcagtaactcatagtacgcaaggacatcaggcaagatcttcttattcgtcttcgtattcttcatggaattgaatacgaagatcttcctccttaaaatgctgaagtgaagaaatatccaatgtcgttgaacaccgacatgacatggaccgacaacatcgtcaacaccgatccaaggctagaagcaaaagttatattgtcccagaatgtaatcggtgaccatgttgtcgtacctgatgacacttagatcacgttttgcctttataaaattagcatacactcccttaattgttgcatcaaaatatgagcatgtcgtcgtcactctcttattaacactaacatcatataagatgttcttcctaagatagcagagtaccacattcagatgctacacacaattaataaaaacaataaccagttaaaaattgaaaaaagcaaataaattaagaaaaataaaaacagacagaaaaaaaataaccagttaagtaccagatcagtc

SEQ ID NO: 149651 - DNA, 521 bp, Cannabis sativa
  modified_base (48)..(53): a, c, t, g, unknown or other
tttgttaattacggagatttatatgaaatacgtggatataatatgagnnnnnngtgaaataaaaatattttcatgtttgacaaccttggagaccagattagaggccaaaaatgtcacaacagttttagttagaattattgatgggattattatgataaatttattttagaaataccgaagtattttgtggtcctcggagtcgatcaaataccctagaaatataaatttcttagcagctaagaaataataagataactattaataataaaatttttattaatattattaatattttattatattattattattattagtatattattacatatataaatgaaagtttcgtttatcactttatatatatattatatgttttaaaaatattacagtagcaggagaatgaacgaacaaaccttcgttctcttcttttgacaaaaccttctctctttagattcattttcttcaatttttcaatccgaaacttagctatctaagctctggtagtagcaggatagcaa

SEQ ID NO: 149652 - DNA, 556 bp, Cannabis sativa
aaaaaaataattgaataatgttcaattataaagtaagaaaaaactaccctatttgaaaaatattagaaaaaataatgttttaataaatgtatactgtttagattataaataaatacagtatataaaaatttttatagcaaataataataaaaaatttaatcgacattacaatagagttataaatttttgtaaatgacccttgttattgtataggtgcaacagaattttgatcccggacaatttaatattataattattattattatttgataaaaataatacagaaaatatatatttatgcacataacataaaaaaataaaaaataaaaaaaagttgtaaaaggttatttatttattaaatactttttcttttttgttaaattattttgagaactaatggggtagttgtttctcttaaaatttttagttaaaaactagtaactttaaaataattttcttatttaaaatttatatatatattaataggcaatcttattatttagggcattttacaattttgtatacattattttaattaattacaaaatatgtgcaa

SEQ ID NO: 149653 - DNA, 798 bp, Cannabis sativa
atcctgctcggtatgttgatccgaccaggtgctctaagtagatgccacgtgtcaccattcttgtgatgccacgtcagagtgctaattttgggataacaattattttatttcatttgttctttttatcaaatattttattcttatctattttatattttaattattgaatttataggctagtgatgttttaattatatgttgacaacatataatatatttttgagtgaattttaattaattttagttaagtgataaataacaaagtgtggccaaaaatatacaaatatagtacaattttataggataaataagaatttatcccccaatactactatcactgtaaaatttggtcctctaaatttttgttctgctgcctaaatttttattctattgtaaaaattctttcgactagaaaatattacaatttagtgtaatttttgctatcttctattaattttttgatatgatgacttgttacatatatatttacattaccataatctatttatctaattgacattatttgaaatttaatttaggctaattaagatttttacctcccgaactttgacatgtaccaaatcatgccccttaaacttttaaggtcgttaaaaatgtccatgaactattgagatttttgaaattaatgacttttgtctaattttagtaaaaaaagtctaacatgatgaaagttaaggagacattatttagtacatgtcaaagtttgaagggcatgatttggtagatatcaaagtttagggagcatgatttagtacataaacaatcactgaaatagta

SEQ ID NO: 149654 - DNA, 588 bp, Cannabis sativa
tattcagatttctgagtattttttcagggcctctttcataagagtttttacgtcccctttttgaaattatttgccactatttataattgcatagggcagttaattacaaagttgaccaaaatatgattacagtcattatccctaaaatcgtgggatctgattacatatcacaaaatgtaaatacggtgtatgattttgaaaatcatatagttgtgattttcctacttttactaggtcaaaaatatcgtgtattaaacacgtctttaattgttgaatctggagatgtctcgacagaaacttaattatagtgatcccaatggcgagttggtaccattcttctttccgaggtcgacaagatatgtcttacgtcgatcgtgggtgtgcagaaatcttttgacttgccagggttatgagcctcgctcttgtttgttggatgaaagcataggaagtttcctcgtagcaaagtgtttatgtcgcattcttgttctttgagttgatctgacttttacacttagtttgcttattgcaagctaaagtatgtgttacttttctttggtgcctcgttattcaccttcagcgatatatggt

SEQ ID NO: 149655 - DNA, 605 bp, Cannabis sativa
tatcaagaaagcactttctagaaaaccctaaaagccttgataattcccaaagctatttccatgagagttttcttagtgattagagataggcggaaataagcttttggacaaaggtgtaataccctgttcaagtcatggtgatccccgctattctacacttaaggttgtgagtgagtatatatatttatatatatcttcttctacctttcttatatataacatatataacttatataaattgtacattatgcattgtaacacttatttaatctctttgttgatctttgtattatattgcaatacagttgtaacatcttgattttcttccattgtaataaaatctctaacacacgatggaaggacaactttactgtaaaatttcatttcgataggcattactaatgagttatatactataaggagctattagaagtagaacaatagttgtttaatgagagcaaaataatgttgtgtattattgaatgaaccaatggagagttatacatatttatagtacaaaagccaaggaatgaaataacaatggattttaatcactagtgtcttccaagtcataagaagtcaagttccttgaaactctcccacta

SEQ ID NO: 149656 - DNA, 791 bp, Cannabis sativa
  modified_base (501)..(510): a, c, t, g, unknown or other
tcttagacaaattccaagggaagaaaacacaactgcagacgcgttagctcgattggcaagcagtaatgtaagtgacaaggcgaacttggctcctattcaattactcgaagagcctagcatcaccggcacagaagaaatcgaaatgattgatacttccccaaactagatgacaccaatagcagcctacctcgacaccgggaactcccagataatcggaatgaagctcaaaaaatgagaaggaatgctgcactgtatatcatagtagaaggaattatgtaccaaagaggattctcaatgccattgctagagtgtgttactcaagaagaagctggacgactcctatgtgagctggacgacggattctatggaaatcatgccgctaggcaaagtttatcttagaaaattctaaggcaaggttacttatggccaacaatgattgaagattcaaaagcttatgttaagaaatgtgaaaaaagtcagagattttcaaagatacctcgnnnnnnnnnnaacgagttaactcagatgtacagtctgtggccctttgctatttggggaattgacttgatccgacaattacctaaggcaaaggaggagcgcagtacgcagtggtagaagttgattacatcactaagtggacggaagccgaaccactcgcaaccattacatcaaagaaagttaaagactttattgtgaagaacattatctgctggtttagactgccacacaggatagtttcatgtaatggcaagcagttctatcgccaatccttcactgaattttgtgcgaac

SEQ ID NO: 149657 - DNA, 568 bp, Cannabis sativa
  modified_base (229)..(230): a, c, t, g, unknown or other
  modified_base (368)..(370): a, c, t, g, unknown or other
ctcaagctcctcctgattgggagcaaagatttgcagaaatgcaagatagaatccgccaacaagatgaagagattcagagatttaggcagcagggtcctcctaccgagcctcctcaagttgttcaggccatggctgttccagcggtgccagcagaacaacctgttgttagcaaccgtatggagccgttgtatgaaagattctggaagcaagcacctccagtgtttctggnnggtcctgatgtgatgaaggccgagtagtggctttcagtgattgatcgtatcctcaattttatgggagtggttggtaatgaccgggtgacatgcgccactttccagttacaggaagacgctctcgtgtggtgggagttnnnaaccctcactcgggacgtcacagtgatgacctgggaagaattcaaagagttgtttaactccaaatattacaatgaagcagtccgcagtgcaaagcggaaagagttcactgtgttgactcaaactaaggaaatgtcggttacagagtatacgacaaagtttgaccgtttggccaagcttccagcgggaattgtgccaac

SEQ ID NO: 149658 - DNA, 576 bp, Cannabis sativa
tcctttccctttcttttcagaccagaagcagaagcccatgcccatgagttatcaattctcgtggaagcagtcgctgttgagacaatgctgggtttacctcccgagcctattttcaacaagttcatttccttttgggcttctttcttctgaacgaacacctgagctctctcattgaactcggtgatgtttcttaccggacgtccttttaaatcatcccacaactcgcccccagcaactagtggatcagtggagatccctgccggaagagctgtaagttgtgtgttgtcctccaagtttctaaccctagcggcagccgtgctaaaatgacttaagtacaccttaactgttacgtcaggctgctgctttatattggttatcgaggccacttcgggtcgcctatccctagcggcttgaaattgcttcttgagatccctggacaactgttccaaggaaatgattgaatgacgagtgaacttgttaaaccaggtacccgttgctccaacaagcaaggtggggaacaaaatacaacgtaaattgttcgtcacgttactcgctcgcattatcgtgttaaagtta

SEQ ID NO: 149659 - DNA, 547 bp, Cannabis sativa
atatttattttatttttagcttagcggtagcggtataagtgtactcaatactcaatgtttgtaaaactgtaatttttctctaataaattcaaatgttcttttaataaattcaaaacagagtctgtactgacaaaattggaagaaaattacagttttacaaatattggatatttatgctgctaaaaataaacattaagtttatgccgcttacaattataaaaatttgggtacttatgccgctatttactctaataaatattcgttaagaatatgtttaattaaatagataatgtatactttgtaaaaaaaattacaatattcttactcacaattgttaaaaaaaaaaatcttatttaattgggcataataattgacatatatacttaaaaaattaaatgattagataataatcaattttatatattcattcataataatgtcgtctttccaataaatatatatatatttttatatactaggtgaatgtacgtgtcgagccacgtattgctagttttatttaaaattttggtctttttaagattttgaa

SEQ ID NO: 149660 - DNA, 702 bp, Cannabis sativa
gctggaagaataccaacactctcactctcatacaacccccatatatcgttgtttaatatgtcatcccaatcctccttattttgtttcccacgtaaaaggcctccaagtgattttatagctaaaggaagaccattacacttttcaacaattttttgaccaattactagcaaatctgagtactcgtgcgagttggcattgattgcagcatatctgacaaataactcccaacctttgtcaaaagatatagtgcttagagaataagttgatgacatagtttccataattgatgcaaccttattgctacgtgttgtcacaatgaccttgcttccaggcaatcctaattgaaaagtacttttaatgacatcccatctgctgctatcttcatcccaaacatcatcgagaacaatgagaaacttcttcccagtcaaaacctttttgacttcatttaaaacttcatactcctcttcaatttcacatttggcagatgtgaccttcccaataattgttttgatcacattcgagctgttgactttgtcatcgtctcccacagtaacccagactctggtatcaaatattgtattcatgactctctcatcattgtatacaagttgaacaagagtagtctttccaataccacccatccccactatggggatcactgacaatttgtcaccaccgattgtgtcatccgataaaagaaac

SEQ ID NO: 149661 - DNA, 720 bp, Cannabis sativa
  modified_base (642)..(645): a, c, t, g, unknown or other
aactttattaataaacggaatgaaaataacttgtaataatttaaaccttataatttaaaagttacaaaagttgggatcccaaaagtaattataaaacactattacaagttcatttcctctagccgacctaaacggtaaaatagagtgtcaaaatacatcactggtagaccccaacccacttggtctagtgtggcccgaacatgtacattcctcgtccagctcctacactcatggctgatcaaacacagctttacgctttcctgcacagtagagcacccatgagccaagccgagcaagacagtataaaacataacaataatatactcatcatataatataaacaataatgccattcaaatctgtctgtgtgttacaaacctacatttgggctcacatgcatgtctatgtttacgcgacgtaaacctacgtgttactctcacacgtctatttatgtctacatggcatagacctacgtgttgctctcacacgtctaaatacaataaggccttagaaagaatggttcatctcggttattgttaccgagtccaacctgattatgccttgaacgcataacccttaaatctcaatataatcatatagttagcacggcataccatttactcaacttatatcactagggtnnnnaccctaggctattaaccgctcatattagggtaataaccctaatcccggttacaattactcacatatatcgtattc

SEQ ID NO: 149662 - DNA, 790 bp, Cannabis sativa
tggccaatttttcaccagtttgtcccatcttttcgtcaattgactgaatttgaactctaacgccccgggaacctgaaacaaggaaaatcaaacgtaaaaccgctccaaaaggaaacaataatcgagaaaatgcttaactattagacccgagacataggctaaatataacctaacaaaattcccccaaagtagattcttactcgccctcgagtaagataaaaaataattactactaactacgctatcagataatcacaatactgttgcctcatgttttgttttcttcctttgcgcagactagaatttcaattccaccaactctaacaattaatttagatgctcaatttatcaaacaatgcataaacacaagatgacttcacaatcgaaataatgttataatagttttactctttccaattattccacaacccgatagctcataagcttgcatgcttatctctctccactaatgttgacaacatcctttcggaatcaatagggctttttgaggtttagaatgtatggcttagatatttggagatcgaaaaacaattttggttaaagatatcataagcacacaaaaagaacccacaagcttcttataatttctaatatcccaaagtgttcccacattaaccaagattgagaaaagattttttttccttttttttctttatttccaaacatcactgaaatctttttctttgaatattttttttcaatcacattttactttcttgtgtttttttttttcattttttcagtgacattgagtttacaaaatactttt

SEQ ID NO: 149663 - DNA, 611 bp, Cannabis sativa
gaggtgccaatggtggatctaccctggacggtagaggctgttcattaggaccactcgagttagcaaggtcgaccagaccacttatgttggtcgagtttattaggccttcttggttggcagggttggtggaaattctagtggtggctagaacacgaacatcaggatcaatagtcatggggtcttgaggaagaaccgatgaagcagaagttgtagtcagagttctccttgttacatccatggtgcttgattagatcaacaaacatcgctctcaatgaaagcactaaaatgttgaccttaaatttggccaacagacaacgaagtcttatttatgatcagaatcaccatgtgtaattaactagaatatgtaaataaatggacacagtaattttatagaggtttggcctctttagttagcgcgtaatgacctactcctcttttagttgtattgatatgagagataatatcactcatatcacaagtgttgtgagttctagagtggctctctttggattacaatagtgagaatatgaggtaggtctcaagaagtgagatgagagagacttagtctctactacactgcaagtggcatgtaagagagagagagagagaga

SEQ ID NO: 149664 - DNA, 742 bp, Cannabis sativa
atttgacttatttgacttatttatttgatgaccgatgacccaataatgacccaatacagacccaatacacattttatatatacaattgtgaccccaataatttctaacactctaatcttgttgccttgtaccctgggtgtgttgtaaattgagttagatttttgtgtcttaagagggacgggaacaagaaaactcaaaacagtggtgtttctgtagtcggagttgaaaagaaaacttattatggccaattggaagaagtttttgtgatgtcatgtcttagtggatgttctgttgtattatttaagtgtaaatggtttgacagtagtcaacccttaggaagattgaagtcagaacaagacatcattagtatcaacactagtttttaagggttcaatgatgataaatttatttcggcaaatcaggctaaccacattttctacattgaggatctcataaataaatttgagtggaaagtcattcaagaagttcatcatcgaaatgtatgggatattccgcaaattaaagaacatttggaggatattgaagtagatgttatgcatgatacaatttcatctgatttccaattgtttgttgatcttggtctattactataaatcaactttcaacgtataggggctccaatagagtttgtggataggaatgtcaatggggcgggtcgaatctgatccgactatgatccgacctgatctagatcatgtacggatctgccccgcccccgccc

SEQ ID NO: 149665 - DNA, 748 bp, Cannabis sativa
ttatcctattttgttttcagctagctacaagaataaatacttgttttctttttgaatttcgtcactaataatgttgtgtatccttattagtcatatttttttgacgtgttactagtcatgttaaatattttccttttgattttaaaggttagtgaaatataggacaatgttagatttgattagacttatgttaaatatacttaacaacttcgcctttgaaaatgtctaacatggtgtcttccacaaaatttaagatagaacttttttatgggaagaataattttagtttatggcagagtacggtaaaagatatgttggtacaacaagggctcctaaagacactgcagggaaagaaacctgagagtatgactgatgaagatttggaagagttgcaggcaaaagcggtaagcactattcgtttaagtttggttcctgaattaaagtatagtgtattgaatgaaacatgtttttctgagttataaaaaaattaaataagctttatatgtcaaaatccctaacaaatatattatatctgaagaagcagttatatgaattaaaaatggttgaaggaaaagatgttcgggatcatataaatagatctaataagtgtataattcaattattaaatgtagaggtcaaaattgatgaagaggatcaagctattattttgttggcatctataccaaaatcatgagacattagtgactacacttttggttggaaagactactttaattgtagatgaggt

SEQ ID NO: 149666 - DNA, 669 bp, Cannabis sativa
ttatttatgtccataagttagaatgatgttttgtttcttatgcttatgtgatacatacattattgttcccattcagctctcaaaaagaattagaaaataggcattttatcaacatcaaagaaagagtatacaaagttcccaacttttcgagatagttggtattctctgtagaaagtatttcgctttctttaacacatattctaactgatacctctgggaatataggactagcctttatatagacacagccactaactgaaaagaataaattttttttaactaactagcaatacaaccaggcgtataggaatttaaactgtactaactctctagctgatttgttgtgtgagcatatattgaggcctaacattatggttcatcattttctattgcacatgtgtgtgtatctgtgtgcgcatatacaaacaaatatgcaggatgcttgtatttcatgattggaccgaggtgacacaattaatttatttgtcatctatactttgtagagaatctacttttttaaattttaattaattcataaatcaatatgcaggatgctttaattaccaaatcaagacattctttactttaaattttaattatattttatttagatttttattaatttaaaaaaaaatctttagtgtccacatcaatcggaagacaccgaat

SEQ ID NO: 149667 - DNA, 656 bp, Cannabis sativa
cccccctctcacacactctctctctcggtgctcaacgtcggctttctccgaccaaccacggcgaccaccacgaagagaaagagagagagaagagacgagaaagagagggtttgggaaggagaagataaggagagagaaagagagggcaaatagctccgacgagggcctgggtgcttcggctccggcctgggtgcttcttcttgggtggtgagacgagagagagaaagagagggcctgagagggggttcaatagaagaagaagaaagaagaaagaagaaagaagaaggaaaaaaaaaagtaaaaaaaaattaaattattttttttttctaattttttaatttttttaaatatttataattatttaataaaattaatattacttagggccattaaaaatttgtcacgtgtatacacgtgggcaaagaaatgagagtttatgtagttttgctcttaaataatcaatttttgtggttaagtattaaaaaatttaaaatttaagtggtttagccgccaatatccatttatgagtttgtagtttgtataattatgttatatgatatcaaggaaggtactagacactaatacagtagaacctctattcaagaatagactttggaccaagcaaattatattttaattgagaggttataactaaa

SEQ ID NO: 149668 - DNA, 597 bp, Cannabis sativa
aatgaggacataaatctggacgctttgtgctcttgcaacatgaaaggagcatagaagaatcttgtcctagagtaccattgaagcctacaaaaacaaaatatatagtatgagtaataataataatgacaaatatgatttcaataatgcaaaaggaacaatataaaaaatatgtatatattgagaccaaccaaaggaagaaatgagaatccccacaagaagaagaatagaaacaatttgaactttggccattcttcttattaattattttctctttttttttttagttttatgaaaatatgttagctaccaaagagtcttatatacagtttgaagagatgatattaattaattaaaatttattttttctcttatttctttaatttttgccataattagtgatatatgaatttaagttttgttacaatattgttggagaatatatgatatatgattttcttaatatatactttttataattttagtataatatgtttattgattaggaggagttttaggaatttaattagtttgagaaacaatttgtatataccaaatatagatgatatgaagtgattggagaaatcttttaataaataa

SEQ ID NO: 149669 - DNA, 598 bp, Cannabis sativa
caaaggttgagttcagtgtcatggtcgtgggggtgacttgggtccgggtctagttggagtccaaaatattattaagaaaaaaaactgtttaaaaaagtatattaaaaagttatttttttttttaattttgattctcaattaaaaaattaaaaataaaaacagttttatagaacatgtttttgaaaaatattttctcttctctaattttaaaaacaaaaatctgattaaaaagatgttaccaaacgccacctaaattaatattttaagatttactaaaagaatgttgattttttctcattttattttgagggagtacaatttaatagttgtcaaagtttagtggacaaagttactaatttacaaagacatgtcaacgtttaaacttaaacagaataataggatgtaacctaatagaagcactaaatctatatatatctataaagaagaagtatgaagcggtaatgtgtcactctaaaatccttccaaacctatttttctcttctattcttaattctctcatttttaatattttattaaagtataaatctacaaattagtattttactattattttaataaatttctataaaaatatcta

SEQ ID NO: 149670 - DNA, 553 bp, Cannabis sativa
cctgtttggcatatttcttgcgaggaggtacccagagttgattccacgtgtcaccatcgtgtgatgccacgtcagtgtgcaaaaattgggataacaatagcaatcaaattcaaaataaaattggtagaaacactacctcaaatcctttccaaaccctagcactcaaaacctccaacaatccatgcaagcttctaatgtaaattttccgaaattgagagattaataacacaaagcatataagagagagggggttggttcttagggctgggaaaatatcaaaataatgcattttccttaaacaaatatcagaataagtcaaatggtcaaaatgaccaaattgcccctagggtcttaatataacaaaaactcaatccaaagcataaatgtcattcacatatcatacataaataaataatttcagaataaacacttgaaaaaggagaaaataggtataatatataataatatagtccataagcacacaattaaattaaatttaaagttttatccttcttgggtcaaaattacaaaaatgtccctagctcaccaacgg

SEQ ID NO: 149671 - DNA, 630 bp, Cannabis sativa
taattataaatacaattgttaagatgtttataattgttgttgggtgacattggaatttctgaaatatattaaatatatgtgaagattgatttgtggtgaaagggaggcgtttgatttgatatagagaattattttagtattatggtgtttgtcttggaaccaatttataggactatattatttatttataatattttttttttagagaaaattggaaatttttattaatagacatatcatataattatataattgctcattgctgatatataatttaaaaaataaaattaataagatatcatgtccttacaaaaataagtattatgttgaagcattaaagaaatgcgaaaaatgctagatttttaatctaaataagcatgtgacagattacacttattaatgattatctatcaaaaatctcttaataaaaattgaataataattaccctattattcaatctaaaataaaagaaataatcaaatgactatccatagcgataacaatcgtaacaaataatcacaccataaaccacaggtcaataaatatatgagtcccctgtgtaacgcccttacttacgtaaaataagatgccataaataaactggcgttaagatactaatgttgccttta

SEQ ID NO: 149672 - DNA, 591 bp, Cannabis sativa
  modified_base (448)..(448): a, c, t, g, unknown or other
aaatcacgtaatacgcatatgctagttagggtgttacacacaagaatagtcaaacattctcaaagagagagacagaactatgatttaattaatttaattgggttaattaaaaggatatgggcatcttcttttatggttaagagacaattactcaagagaaaacttaagagacaatcttaagaattcattaaataattgataaaattttcataaagcctccatatgttttgatcaaggtgtcttcttatataagatattatttcacaaatatacaaaaacaacaaaaaattagaaaagtatgatttcacgaaaatttaaatatttttacgattttttgattttacttacaaaaaatatcgtctttttatgttgtattcttattaatttgttgttaacttgttgttatttgtatgttattttttgttgttgttttgatattatttagatnttattttcatgttacttttatgaattttttttattgtttttgtgttaaaactgtaattggaaagccacgatgtaattggatttgtgtgtaattggaggtaattacacaatttggcatgtttgtctgaccatgtaattacactg

SEQ ID NO: 149673 - DNA, 547 bp, Cannabis sativa
atcccggcctgaagcagggccagctgttgtccgtcgtccaccttctttgttttcgaggcctcctccttgaatctctttatgtagttcgttagcgtatccatgggaaattgttttatattggttatggcactaacatcgaggttaatctttcttaccgcaacaaactgccgccggaaactcacttgtaacttgttccaacagtccaccgatcctggctccattttttgaaccattcttcggtagacacactcagtgtcggtgaaaatcatatacactttgcgtcattactgaccctcaggacggtcatcaccctgttaaatcgggatagatggtcactagggtttgagtctcctgtgtaggttgccattttgggcattttgaaattttaggggagttccgcctctaagatgtttcgggtgcaaggctcccggtcctcacaatcaaaatctgagtcatccccattttgtctctgggagactctagcaatgtctttgcggaggatcaccaattctgctaagattccctcattcaaggcgtcccctgacac

SEQ ID NO: 149674 - DNA, 586 bp, Cannabis sativa
gagcaaagataaatttgtgatcaaaagtatcaaagacaagctcaaaagagaatttgagatgaaagagtttggaccagttaaaaagatacttggtatcaaagtttcacggaaccagaaagaagggattattaacttaaagcagtccgcgtacatcaataaagttattcagaagtttaacatggaagatgcaaagagtacatccgttctgttagagggtcagtttgttttgtcaaaggaacaatgtcctaatagtacgaaaaagaaagaagagatgaaagatgtaccttatgttgtggttctaggatacttagtgtatgtgatggtgagcacgagaccccacatagctcacgctctaagcatcctaaatcaattcatgtctaatctaggcattgaatattaaaaggcccttaaatggttattgagatatttgaagggcacttggattatggcctgacctatgagaaaacaaaagaagaattgaagttaacatggttcgtggacgcagattatgcctcgaatagagatatgagaaaatcaaccacttcttactttttcatgacataccagaactgtatatggtggaaga

SEQ ID NO: 149675 - DNA, 571 bp, Cannabis sativa
ctgcgagccgtgaggtttgccttgtgaatctcttttcccaaggtcaggttgattttgggtaccatcttcccgcgctgcctttactgcagctatttgacgctctaactcgacattacgccggtttagttcctccaatcatcgcctaagatggcagttttctaattccacgattggtatgtatttggttgggtcgtaagcgccattttcatcaacctggttaaggagtgaccgatagttgcccatccaaggtccgtcaagccaggagccccaatactgggtcttcctggggcttgcattcttttcatgcaatgactcggtacatccctgaggactcaatggtttttttctgggacaatgattcattccttcttaaggatgattatctttggtgtcatccataatttttatgtcaggaggcttttttctgagcttttgtttgcataggctgtcaatgagagcataaaactgttaatgcagattttccgttaactaaatttgagcctcacgatgataactcaacacaaaaaaaataaaagttgtagaaaaataatatatgaacacaaggtttttt

SEQ ID NO: 149676 - DNA, 694 bp, Cannabis sativa
tttgttaggtatttatctgcaactccgagttaaagttgggtatttttaccgcaaattactctaaatatattataaaacatgctaaatggctaaaagaattgtaaacatatatatatatatatattaataggttgataagttgattaaaattaattattatcatttatgtaaacatattatatgaattgtgtcaagctactcatttataacaagattgcgtatgagttttaatttttgacataactaatatatgagacgagcttaggttggacatttacttgtaaaatttaaatatcaacacgacaagaatataattcgtaaatacaaattatcactcttatatttgttgtaagttaaagtagctaatgttaggatttataaaccattcaagatatatatatcacatatctaaacatattcctaaaaagtattttaatatagaaaatcctagatcataaatctatagaactattacaaaagaggaagatgatgaaagtgagcggaagcactaacctgaagccattgttggagattgcagagaaggttttgatcttccaagaataaactatttcctaggtattttctttaatgggagaaaacagaaacccaagtatttcttggggaccactacctatttatagactcattatataataagttttgggtatttataatttggcccctcaacaaatta

SEQ ID NO: 149677 - DNA, 827 bp, Cannabis sativa
tttaagtttagggaaaaaattattccctaatgtaagcatagaaattcaaatttcccttgtaaaaaattctccctaaaatataatagttacataactatgtcacttctgttaagtcctatttcttttaccgttaaaaattaacatttttactccctaaactttgactaatacaaaattttgctcctttttatttgaaaaaaattaattttaaaaattataatattttatttttttaagcaattataatattttattaattctaaaaaaataaaaaaaatatatatattaaaaaacttaataaaaaatattaattttacttaaaaaaacttaaattattcctaaaaaatattttcaaactttatttcatttataaatgcgtatcttagaaaatcaaaccaaaattattaacaatttaataaataatttaaataaactaagatttttttttttgaaaaaattcatcatgtttattaattgcaatccatagtgattacatgattaaaatctggaataacattactactcgtgataacacgatcagcaactaaataggatgttcgagctaagaaatgagcaatactatttgcagaacgtctaataaaattgacataaacatctcgtaagtcatttaataacatcttacaatcagaaataatactcccaaagtatgaaaccataggaatagagctacgtaatgcttgcaccacagtaagactgtcagtttcaatgacaactgttgcccctgaattcacccaatatacgtggaccagtcaaaaagggacacgtggatcagataatttgtaaatatttgataagtctttgtatgc

SEQ ID NO: 149678 - DNA, 963 bp, Cannabis sativa
  modified_base (322)..(338): a, c, t, g, unknown or other
ttatattgttatacgtaaaatctacatgtatatataaaaattaacgagaaaattagattctataccccttttatattatcctcttttatttttaccatctattttaaaatcttattattttggggagttctatttgcaccccataaacttataaatacaccccattattaaaaaaaatataaacttaaataatttttaaaaagtattcttaatattttttaaaatttttttcttcacattattttatgttaatttcaatacttattttgctttcattttcataattttttctaactcatgtatattttttttttattttttnnnnnnnnnnnnnnnnntaattttttatttaattttttttccataatatttaaaatataatttacttttgtttgatagttatattttttaagaatatgaataggaagaaaaaagtttaaaaaaatttagtataatgaaagatattaattttaaataaaataaaaattattaaaatgaggtgtctttagaaatttttggggtgtaaataaaatttccctattatttttacctcttttttaaaacactgtaccgattttgcccctgtcactttaagatactctccatgtaactctcatatgtcagggtattttgagtatgttacatataaaaagaggtatatttcaattaaatataaattagaggtagatttggttaattgataaataaaagatgtatttttcaatttactattaaaattttactctttttttcttgaattggaaggatctagtccaatccaatacatagtggacctaaaatattggatggatgctattcgatcgaaaaaatactaggtctaaaatattagataaaccaaagtaaaccaataaatatatatatatatatattataattagtgtgcacgtatacttagttttatgttaggtgctctataatttaattgagaaagattcaataaat

SEQ ID NO: 149679 - DNA, 536 bp, Cannabis sativa
aacaacaacaacactaagatacccactaatcaaaaacataaaaaaaatcaaaagataatatgaacaaaccttatagcaactccaatccacaccacaaacaaaaatgcaaaccggttgtcgtcaatgacctgcgatgaggatgacatcgtcgaaataagaagggaaaaaactgttaagaaaaagaaagaagaagaagaacaaaacaaagataatagaatgagataaaaagagatgaatatcaatcaagagaagaaaacaagaaagaaaaagaaaccctaaaatgggatgcacaaactggttagaagaagaaactttgaaatgaaatgaaaggaaaatcgtagatgagtaataggggtactcattacatgcagaagttgaaaagataaggctgatttttttttttaaaaaaaaaaaaagaaaaaggacaacccatgagaaaaaacggttggcaaaaaataatatgaaattacaaacataccctttaaaattgggctgaatacacaatatgggatttaaaattgggattatttcacaaa

SEQ ID NO: 149680 - DNA, 538 bp, Cannabis sativa
attatttaaaataaaatagaaattgttgttcaaatatcatacaataataaaattgattttatacagactaaaaaatatacaataacatcataaaaatatagcaatcccattacaaaatagttaaaacctgtgaaccagttttgacgctataaaaaatcataaaaaaaataataaatgttaaataataaagtcaactgaaactagtttcatcagacaatcaaatgaaaaatgaaaaaagaacagcacatacaaaaatacaaaaaaaaaattaatcacaaatataatcaaaacagcacacattgcataccactaatttaaaaataaaatataagtgtaagtttcgaacctagaaattaaataataaaaaagtaactaaaaaataaaaaataaattgtaataacattataaagtagagcaaccctattatagaactctcaaaatatataaaccaatttcgaacaatgtttagaaaaaaaaaacactaacaaaaataataaaaaaacaacacataactataatttaaaaacataacataaat

SEQ ID NO: 149681 - DNA, 698 bp, Cannabis sativa
gtttttaaagtaataagatatggtcacacttttttaagtgttgtctaatgctaatatttttggcaacactctaggaggcaacaattttataagtgttgtcttttaattttgattagttaaaaaaaaaagtgttgctaattgtaacttttctagtagttgaaaattttaaattttttttaaacaaaaagataaatgatgataagtgaagaaaaagataagtttttcatctttctctctgttaattaatttttgaaaattcccaaggacaaagcaagagaattcaaagtcctaattttattgttaatgcttgaagaatagaaaaaaattgtttaagattgtcaaaattgatgcccatctggtagattcaagagaaatgggctcggttcacgtcatcaagtcaactctacacacgtatgaagttgacttgtgggacaaatgttaacccgaaaattttttctgttgacatgaacataaatgtttgacatgtggctagaaggatgatgtaacaaagtcgagtagactcgagtcatagcagtcgacctgggagggggccttagccttgcgcccaagttgacttcgggagctccggaatggaagttcagattttaataacttgaatccaacccactatctttcagtattctgtgaaattccgtattttaatattcctagtttgattatttaattaagtgattaat

SEQ ID NO: 149682 - DNA, 504 bp, Cannabis sativa
tattcctaaaagaaacttcatatacatttggtccaaagtgaagcccaaagagttggcacgtgaggccattgtgttgattaaaagaatcaagtcatttgtataggtttgggtcaaactcaaagtggaggaatgatgttttatgcatggcccattcccacgtccattaaaataactaacgagcaggaccactcaagccgcacacttccacagctcgccacatgtccttcgagtcctcctctctccagcagaaactgacgtcgaggcccacgattgtctcctccaacacatgctgatgaaagcatgattttatttgatgcccatgacaccatttgttcagctttttgtgctatttatcccactaaatggtgcatgaaaataccatatttcaggagcaaacttgcactataaataatagccaaatacaatgaaaaggcatcagatttgagagtagagaaaatacactttgtcattctatttttatctcttattactattttatctata

SEQ ID NO: 149683 - DNA, 580 bp, Cannabis sativa
tttttttttaattattttcttctctctttttctctcttgtctattatttcaaaaatcattcctatcacaattttgatcatttcaatttaaaaaattatattattataatctatttttcaaattcattattttaatatatagagaacatatatttcatttattgttattaaaaagaaaatataacaaaaataaaaacaacctcttagtttattttataatttgttaataaataagtaaccaaactataaatttaaataaaattcaatatatctatgttattatagagttgttttatatcaaaataataataatttaaagttaaacatcataaaattaactatgttatataaattttttaatttaggttacattatgttgacaaattatttaagatacttttatattatttttctttcttaataacgtttaaattaccttaaaaatctatctatgaatcaaaagcaacatcatcaaggaagattactataataaaaagttacattttagtttcttttatattttattaagaaataagcaactaaattttaaattaaataaaatttatatattgaccagattt

SEQ ID NO: 149684 - DNA, 612 bp, Cannabis sativa
  modified_base (50)..(51): a, c, t, g, unknown or other
ctttattgatgttgaataaaatggactacattgaaatagagttttatttnnggcataaaacccaacaagaatctccataactattctaattcacgaaagccctacacaaaccaatcgttttaagcttaaaacaaaattaaaccttaccttaagctttcctgctctgagaatttgctatcctgctactaccggagcttaaatcgctaaattttgggttgaaaaataaaaaaagaaatagataaaaaggaaaaaaaaattcatatcgtattgtttactctttttaaacttaaaacatattatatatatataaacttatcagataagttttattataataataagaatataataatataataataatataataaaaattaaaaaatttaattaattttttattttttagccactaagaaacttctacttctaggttatttggtcaactttaagtacctcaaaatacctcaatatttctaaaattaacttatcctaataatcccaacaatatttttaactaataacgttgtgacatttttggcctccaatcggatctccaggatcgccgaacttgaaaaatatttttatttcacaaataacttatattatatccac

SEQ ID NO: 149685 - DNA, 530 bp, Cannabis sativa
gcattttagtaattttggctcgaggagggtaaaatagtaaaattaatttatttatgtgcttatggaactatgttattatatagtatgcctgtgatgtcattttcaggcgtgttctggcaagttggcgcggtatagtcacaactgggtatttcaggccgaatcgggttcgggcccgaaatacaatttgagttgaattattggcattttaattgttgatgaataatctgaaatttaattggatttgtttttgtgtgaaaggacattttttcccttggtttatgcataagctttatttggccctaagggcaatttggtgttttgacctttatttggtaattgattaaaggaataaaattttgaagatgaaaaatagaatttctagatttctcttcctctaacccgaacattctctccctcaaaccctcttctttttcaaaatttgtttcttgaagagaattcgcttgattttggcttgaagtgaagctttgagtttgtggaactttgagcttgttcttagattgagtttgagg

SEQ ID NO: 149686 - DNA, 916 bp, Cannabis sativa
  modified_base (372)..(401): a, c, t, g, unknown or other
gagctgggccttttttttttttttttgaaaaatttcactttttatacattttttttttcataaaagtactcaaatttcatcaacctttccactttaaaaagaaacttgttattttggcattttacaatacaatatttgtaacttctatattataaaaaatcaatactacttaatacttatccttaactacttctaaacttattaaaatttctaagaaaagttaatctaataattttaatccataatccaacaaaccaaaaataaaatccatactccaaatgggtaggtttttagaattaggtttttgttttgttttattttttagggataaggaatctgatatctgggttaattataataataataataatnnnnnnnnnnnnnnnnnnnnnnnnnnnnnnaataataataataataatattttcgggttttcgggtgggtctgagtgtaaaccagtttttcaagtgtcaacttaatcaaacccgaacctggccggtaataatttcaggttacacccgaacctgatcactattttttaaaaccctatttttttgggttttacgggttcaggtcggacgggtttgccaagtgggtggattttttgggtcaaaatattcagccctaatattattaacaagtcgtatatcataggaaacccaatttataatagtgtaaaaaatttaaattaagggaaaatactaattattcaaaaatcaattaaacgtatattaatatgaatcttgatgttattttgaacttttgttttcattttaattaagaagagactaaaaaaatcagaaacgaaatttacatgggtaaatagtactattttagactctgtgttttgtaaaagttactaattggactctttgttttgttaaatgacaaaatagaccctatattttccaaaatggta

SEQ ID NO: 149687 - DNA, 846 bp, Cannabis sativa
attattattagaataattggcgccgaaatattcttatttttttagtggtatttttttttataaatttgagacgtcagttaaatattttaattaaatttaaatactaattacatgattattgtgtacatatgtatatacgtaaaagtaaaattttataatcaatacagtaataatttcgttaatatttaacgatgatatctagcagacatctcaaatttacaaaaagaaataaatacaagggatttttctacaaaaaaaaaaaatgaattaagtctataaaataaaaacataaagaaatttcgcaacaaataactcttattattattgttgactattgagcattactatcaagccccatctaaatagatagcgatcttttatactttttagagtaaatagtgacataagtacgtaaagttaaatttgtaaaaggcataaacttaataaatttttttaacagcataagtacctaatatttgtaaaattgtaatttttctctaatttagtccgtatatactctgatattgtcttaaacaggacacatataagacttaaattctatatcattggatttgaacaaaaacatgtagtattagttacttttaaatttcattctaataaattcaaaacagaatctatactcacaaaatttgagaaaaattatagttttacaaacattgagtacttatgtcattaaaaaaatcattgagtttatatcagttacaaactcaaaactttagatttatatcacttaaagtaaaataagtaagactcgatatagaaatgagaaatgctaaatgacattcatggtgtctaacacccttatgaggtgtaatatcgttattg

SEQ ID NO: 149688 - DNA, 806 bp, Cannabis sativa
  modified_base (743)..(757): a, c, t, g, unknown or other
tttttttttttttttttgtattgtgttcgcatcacaacatctactacatagtagccttatgatttgaagctaatatatttatatataaggaggtgagttgtaaaaatctaaataatatatgttcagtattctttttgtttgatttcaagtcttgtatttatttatataaaatatattagttttggtctaactattgtatatctgaattaggaggaacaaaaaagagaacatcgaagataaaaatgattttttttatatggataaaagtggaagttgaatcgaattgaattttctttagttttttatttattaaatcgtttggaacatcgtatttggtcatattgtattgtattgtattatattgaattggattataaataataattttatataatactatgttaaactttaatttatgctataaaatattatatatttaggtgctcataaaaattaataccacatatagttttacataaaaatattgtataaaatacaattcaatatgatactatgcattataatacagtgtaatacgacgtactaagtgaacccataatatataaaaatatttaaaatcatataaaacatttaaatgaggggtaatctagtcatactagaaatttaagtctactaaaagagatagtacaaatgtgggatttgtaaataaagagtaccaagtgatcgttattagaaacataaagtattgagtttgtattttaaataggctaattagtaatttnnnnnnnnnnnnnnngacatgtaccaaatcatgcctcctcaacttttttgaccgttaaaatttc

SEQ ID NO: 149689 - DNA, 1194 bp, Cannabis sativa
  modified_base (864)..(866): a, c, t, g, unknown or other
atggcaaggttataacattcccgagcagcctgctagtttcctcttaggcaccccaccccattctttgtttgctgggaacttaaggcatgaatggaatattaacataacagcttttaagtcatataaagcttgtcggcctaacatgacattaaatgctgatggaacgtccaatactaagaattgtgccattatagttacgcacttcggagcttgcccaacagtgaggggtaggcaaattttccctagaggtgcaacaccttggccagagaaaccatacacgggctggagccagggagttaaatctttaagctggagccccatcttttcatatagtgtcttgaataagatgttggaagaggctccattgtctatcatggttcgggccaccatattgttagctatctggacttccatgacaaccagttcattgtgcgggaaactgatattgatagcatcttcatcattaatgttatggtgggctcccctgcccgtggtatctttggttttcttccctcgacggccagaattagtttcttttgcccatgttgtactgttcgggcataccttcgggctttgcctgaatctccagctttgtgcgatcctcaaataataacttgcagatgttcatctacttgtggtggtagtaactcttggttgttatcacccctctgattttgatcggccttgacatacttttgcacgtgcgaattattttttcttattagaaattcaacttcccgcttcagatttttgcattcattggtgtcatggccgtaatccccatgaaaatggaaaaacttggccatgtctctcttgcttacatcttttttcatgggtgtgggcttcttgtacggggctaatgannnagtagccatgtacacactttctatatcttttgttaggacagaaaatgcagaaaacttggtagaattctccctagcagtctgtttggttttattagaaactttctctttttcccatttccttgcctattgttgttgttgttgttgttggaccgtttaccacccgagcttgaattgcttgggtactaggaaagctggacggatatcccagcagagggagcttttgactggcaaggtttttgttcaacttctgctcgctgaatggcttcttcaagcttaatgaaaccttttgctcgatcaaggaagtcactcatagaatctactggtccgt

SEQ ID NO: 149690 - DNA, 609 bp, Cannabis sativa
gctgcaaccaatgtaaggtttcgcataccttttatgtatttattttcatcgttttagagattcatatttagggtgttaaaaacatacttgttagtaaattcagatcctagtaaaagacattccaacaactcgggctaagttttcatttcttaccaaagtgtttaatacctatcataggtgatactcggagaagtaccatatctctgatctaaaaattaatatccttaggctttggatctgcgttgctctttcgtctgctctgagctgcgagcatttacgctctgattttatcaactgcctcacttgttctctgaacagcttcgagacctaaaaactttctatcacccactccatcccaagtaatatgtgatctgcactttctttcatataatagttcatatggagccatcccgattattgcccgatagttgttgttgtacgagaactcgatcaagggaaggtactttacctatgatccttcaaagtctagtacatctgcccatagcttgtcctctaaaatctgaatagtcctttcggactgcccatccgtttgaggatggaatgatgtgctaaatttcaactgattacccatagctcgatgtaggctct

SEQ ID NO: 149691 - DNA, 645 bp, Cannabis sativa
ataatataattttttaataatatataaattttattttaatttattgttatttttattaattttgaataaaattttttttttttttgaagagttgacctgatcaacccgccaacccggtcaacgcggccaaccgaaacccgccaatacgtgacccgccaacccgtgccctattcgggtccgggttcggcttcatttttttgaacccgaaacttacctgaaacccgcgaacccaaaacccggtaaacccgctcgatgttcagccctatttgatatattgcatcactaaaaattaatataccgtattaataaaattatataccacaaaaaattataacaatactaaattaatactcgaaagatatatatatcctgctaacaaaattatatatactactattaaaatatatatacctaccaaaaaatttatatataatccttatatataataaagtagaaactaaatattatcttaaatatgatacattatacacaacaaaaactatatatcatacaacaaaatatatacatacaataaaaaataaaaaaaatatataatattattaaaaaaactgaatataccatattaacaaaattatgtacaaccagggacggacccattaagagtgatgtgggggctatagcccc

SEQ ID NO: 149692 - DNA, 536 bp, Cannabis sativa
actcacttaagcttaagaagtgtctaaagagtggtgagacattaaaactccacctatatggactagaggtggtgctcaggctaggggcggagccatgattgaattgtagggggggccaatagcgcgagcaatttatacgataacaaggcttcacatatagtgattttaatgatcgatattttttaccggatggtgctaactatttatgagtgattaaatataactcacttaaattaattttaaaaatttataaatattttttgcaataaaatataatacatgaatcaaataatccaataattaataagatttataaaagtaattaattatgaaactgtattgattaaaaaatattttatatcatttcgatatctaaaacaaatgattaaattgatggtagagcatatttaaaatagcccgtgattgatcatagtaaaactaacaatacaaatagtattaaaaaaaataaaacaatatgcaaaactaaaatataactacaacttgcctcatgaaaaaaaaaaattgaactaaaatat

SEQ ID NO: 149693 - DNA, 588 bp, Cannabis sativa
taaaattaatatttatagttaaatctatttagtacccatcaataaataaaatcatttagaagtgttctatatatatatatatataaatcagaactttacttttttctatataaatagccagagattttaagacgttttccgatactcaacaaacaagtacttttttttctaataatgaacaaaattttattaagaaaaaaaaatatcattgagtacatcataagaaaaagatcgaagatcttccatccaaattagctcaccatatctactctaagtttgtgcacagctgattcatgagtagttatattggccgaataatttgcatgaataagggacgtcttagaaaaattagacagtaaactaaaaaatacattaaatagagagcttaaattattacagaaagaaaatctcttaaaaaatgcaaagatcaaatctaaataactaggctcaaaagaaataagaggaaatccaattccaacaaccaattaaatgcaactattattagagctagaacttctgcgcctgaataactgagagattttttattcaattatattaataacgttataatcatctgctaccctcact

SEQ ID NO: 149694 - DNA, 521 bp, Cannabis sativa
gactcgtcagggttgtaagcctcattgatgttaacgggatgaggttacaaggtgccttctcatagcgagacatccacctctcttacttggtcttgagctgatccgactgttacacttagtttatacattattcactaagagctttctatcttcttgacgtcttccatttcacatatacttggctcgctcagcatctccaccggaactaagttcaattcatccaagtcattttgcgaggccagttttgctaaggcatctgcattggagttttgttctctcagaatttgttcgattttaaagtaattgaatctttccaagttcttctgaactttctctaaatattttgccatttttaagcctttggcctggtattcctcgaggacctggttcacaatcaattgcgaatcactacgacagaggtggtttttgactttcaacgcctcatctatctttaagccggtgatcaaggcttcatactcaacctcgttatttgatgcgtcaaattggaacctcagagcata

SEQ ID NO: 149695 - DNA, 697 bp, Cannabis sativa
atatatcaaaaggctcgattggttctaaatcccagctcgcatctatgtgacctgccctatcttccatagtactgtattgcttggctataccataaaatgaatcatgacagttattctggacgtggaatctaggataccaactgtcaaacttatgagcaatgcggtccacgagaacggcattccaagtataaaaattaagacatgagtcttggaaggtaactaatgtattacgctcagccctaagtacagtaggtgaccagctacattgattacctcaggatgctccttcaccggattcccgaggggcagtgctttaaaggtattgtgcttgggccaagatatcctaggcttgatcctcgggtggaacaatcatttgctgccaagaggaatatttgggaaccttgtaattgcaagtgtattctttatcagcaagaaggcccaccgatcgcaagttaacttcgttcaaaagaaattttcatgatcgaagactctaagggagagtcatcaggcgcctgtgcctactaaccatctcgggggtaggagtaggtctcgccaaaagagctgccagaacaaacaaaatattaatcaagtacttgaaaaaggaaaattgatgtaaataagtaagaatataataatcgcttacgaagtttgcgaaacatggttgttgtaacgccctaatgctaaggcacgctacagt

SEQ ID NO: 149696 - DNA, 1027 bp, Cannabis sativa
ctgattagcgagctatctaggctcgggcaaatggtaaggaagagaattctttattgccataatgctgggaacatgtaaattctgatatgcaagatatgattaggcaataagggaaaacagatccaagatttgaaagaacaataggctcatcttgtgtttgttcttgtactaccgacacatcctgttgtaccactagatgtagtggaatatatgaagccaacttacttgtaaatcaaggagcaaaaactatatgaaccaccaattatgagacaaaacaaaaaggttccagggtagtcaggatagcagtgaaggtgagaataagaaatggtgaccttatcctgagtgttcaagatgcaaaatggagtcatttgggctaatgtagagccaaatcttgttattttggggtagtgggtcatttgaaaagaacatgcccacaattaagaaagactgatgttaaagaataaaagggtacgggtcctgcccaagtgctggctaggactcaaggggactcagttatcggtctttcggccgactcaagttagaatttataagcaattttataattactattttgatttatattggtattaaacattgtactctcaattgggggacatcaaaagatctaaatggactgtgtatgtatgttatttagtggtagttcatctaacaaggtagacagattagaaaaaatgacaatatgagttaaattaatggtattcctaagtggaatataggacatgagtagttaatggaggcatcgatctaattgattcaaataataaaatattttgtttaggtgtgatctagccttagcaaaggtaagacaatttacgaatattatctggaattctaggtgaattgaaggcgacaattgtgtagtaattttgagattaggtaggcgtgagactaccaatgttagcaagaagtatcttgttttggtacctcaccatgtgagaactccatggttgagtgtccttgactttgggtgattttatttagcaaatttccccatgaagcgtgcaag

SEQ ID NO: 149697 - DNA, 561 bp, Cannabis sativa
ttgttgtttttatgtttttgtgaaataatccctaaaaataatgtacagtaaagtttatgaaaatagtgtgatacggaaatttttacatttttactctactaattttataaaaatattgtatttaatgttttaaaattataaaaatactgtgttttataaaaataactcaaaaacaatactaaaacaacttaataaataacatgaaaacaactataaaacaagaaaatataactacaaagcaacagaaaataacaaaatatggacctaattacaataagcaaaataatctcaacttctcagtatgtttttatgttataatttttgtaattagttttgacaacataatttatctttttgtactattacattattttttttcatagaatttgttgttacaattttattcttttaatttttttttcttttcctttttgagttagcgatggttaaaaaataaggtaaataccattttggaccctctgttttgcaaaagttaccaattggaccctctattttgttaaatggcaaaatagaccctgcattttctaaaatggtaaaaat

SEQ ID NO: 149698 - DNA, 515 bp, Cannabis sativa
atgacttaggcaaaatacctaatccttatgaaaagttttatggtatctctaatgattacttaatcttaagcaagtattttacattaatgttaataatagaatgctatattgatgacttaatctaaaaggaacctatagtttcagactaagataatatgtcacaacaagaggtgctcaagaaccaataataagaggttaagtgtacactagtgtacggacttaagcagactcttattgtttagtgggagccatctaaaatataatcaaacaaggaacattaggagacaatcaagaaagaattctgaaagtgacctatatgttagatgatagttgtatatattagaatccttttatctacaccaacttagaatattcgagatgttggttactcttagggtggaggaattattctagaaggatgtaaaaacccgtctataataatttagttctaccagtgaagctaaataacttagttgctttcgaaaagcactagaaaagttattcaaactgaagaa

SEQ ID NO: 149699 - DNA, 715 bp, Cannabis sativa
ctttgaatttgccgcaactgttgtgatctattcgtctaattgaattttagaagtgccgagaccttgaactctcttcaatttgcagcacttgcacatttcatcccgaatagtgtctcacatgcaatcttcctcctcaagagtgtcaaacttgcaatcttcctcccgaagagtcacttacttccattctctctcccaaagagtgactaacttgcaatcaacctccccaagagtgactaacttgcaatacttctcccaaagagtgactcacatcaaccttttcctctcgaaaaggtgactcatgaacaagacttcttccaaagctcgattaacaatatctaaggtgttcaacctgcacaatttcaacaagaaacaatacagagtagcataataataaaatactaagagcttgttggacccaagttcttcacacaataaagaaaacactctataactgtaaaaagtaatatagaactgatacaccaagagagctaaccaaaaccatcgacctaaggatgaatatatacagtttagaaactccttaggtcgtggtcaagcaaccatgaaacaatcaggtcgttaaatgaaaatattcccaaaaaggaaagtcaaattctatttaaacagacaggcagtcaattcattttcagcaaagtttccttaaataaataaggcaactttgacaacattaaatcccatagttgtacacggtttcttg

SEQ ID NO: 149700 - DNA, 920 bp, Cannabis sativa
aagaaacaaaatgtggtggcccgatcaagcaccgagagtgaatttcgtgccttggctaacactgcagccgaattaaaatggattgtgtcattacttaccgagttgcaagtttcattaaatgcttgtcctatcatatgggtggataatcaaagtgcttctgctttggcaaccaatccagttttccatgctcgctccaagcacattgagatagacttacattttgttcgtgatcaaatcctagacaaacgactttcagtttgatatgttcccagccatgatcaagtggctgatatgctcactaaacctttgtctaaggatcgttttatgtatctcaaatccaaactgaaaatggcttccaccccttttcgtttgagggggatgttaacatagttcactaatcatagttagtttattgttactatggttagtaattagttaattctgtttaggccgttttcacttcagttgtaatgtctgttattattgtttctcttctgtataagtacttgtacatttcataataatagagtctttcaattgttttcttctttgcttctctctgttctacatatcaatatattaaaattaattaaatgtaaatgtagaaataaaaagataattagtttgtaaattaattatttaaaatctaattgattttgttaagtatataaaatgcaacaataaattccaataaattagataaataaaaatctgatttaattattattttcctaatatatatattatgatattatagttaagaaaacaaaaaatctttaatttcaattaataagttattaaacgttttgaaaaaaacatagaattataacatagaaaatataaattgatattttatttacaaaaatacttctataaggtaaagacaacatttatatcttttatgtgattttaattactaa

SEQ ID NO: 149701 - DNA, 1011 bp, Cannabis sativa
  modified_base (291)..(294): a, c, t, g, unknown or other
  modified_base (595)..(599): a, c, t, g, unknown or other
ttgacattgtaatttaaatgttaggttacttattagagtaataaacaatcaatattatttaatcaaaaatgatatttaatgaatgtaaatgaatttttttaagagtcgtaccattgaagaagagcagttacttcgtaattgtcaggattgatttcgattgtacttgattcacggcttgacaacgacaatcctgtatgaaaatgatattttcagcctatttaagtgtacgaaattgatagaaatgtgtatgatgttagttagtatataagtacctctcttagtttgaacaannnnctttgttcccattattattgggttatttctaataacttcagacaatttttcactaatatcttgtaccaaaataccccacagagtcaaacatatcaggttgaagctacaactgtgattgaagatagtaatggtattattagctttgctatgtatcataattttaagtccatattaaattattatgagtgttccaataaagattatcattatgtatttgtatgttatattatatatacctatcatcgattagatatatttcttgtatggtttgctgtccatacactgtgttcaccacttttgnnnnntttattttgacagctactcctatgatatctaaaaattgaatgtgacgttagttaaaacttcgtaaattatttgttatgtgttatattgttgggatccgaagttaccttgtggtgtgttggagtatttgtcagatgacaagttcttaaacgaaacaaattcatggactggcttagaaatttgtttgccttcttcttggacttcagcaacttgcatttttgagttcagcgtccaaccaaaatggtaatttgtgccatttttaaggtatcttgcaggtgatttgttgacacgggcatcactgatgtagtaggtgtgtaactcatgcaaagtgtcctccaaaccttcaatatcttctacgaaaattactgcatctactctcgtcccctgtgtaaagtttatcaatataagacatgc

SEQ ID NO: 149702 - DNA, 602 bp, Cannabis sativa
tttcccaagcttgatggcagatagagtatgtcgagttcgtaatgatttttcttcgaactaaagagcaataggtaaagcatcgtggataacttgccaagaaaatattttcacttttggcagtagttggagagactagaacaatttccaccatgaagaggctgatgttaagcttgaagtattatcagcttcatcgagagatgtcgtaaggtggtacgtaaccagttagtactgtataaaaactagagtgatgatgatgccaaacaagcgtatcattagagttgaagtacttaagtttacattttattacttataaaaaatataattttaattttatatacattcaatatataacatatattaaaaaatatatataacatttattaataattaaatattattaagtataattaatacaatacacatatatatatatatgtaatttttcaaatattatatatcaaattttatattatattatatatattttattttattttttgttataataaatattatacttggacataaataagatattggacgatttcttaatgggtaatacccattaatgggtagtaaaaaaattgatgaggtggcaattt

SEQ ID NO: 149703 - DNA, 1106 bp, Cannabis sativa
cctatcaccactaggcatatcagcgtcagcctgagtcatagtgaacaaacgccccagattctggttgttgttcttctttggttcatccttcttagcctgtggaaaatctcgaataaagtggcccaccataccacactagaaacatgccttaggtaggtagattagcattataaacccccacattatcccccagattctatggaggcgcaggcggtgccggtggattggtttagtcattatcaagctctacatgctcgccctgtggtctagatgattgtggagggtccattttcacaaacaatcttgaaatcaacaaccacagcgagttaggcgcctatgccacacttacgcacttattgccttaaaccctaactcaaacatactatttctcttattaaataaatatatatcaaataaaacactaatcatgcttttcctatcacattcatttctagatgctcacatactgcctaaaatagaaagcggtaaataaataatcacaaaggcatttaagcatttactctcaacacttactgtaccacgagtcgagcttgtctctggccatgattgtacatgttcaattggtctacaagaagtttaaaaatcttagcgctctgataccaaattgtaacgcccaacaattaggcacgttacgatttctgataatcataacctaatcttgctaaatcgggattactagaaataaaagtagaatttaaactttaaattatttacggaatgaaaataaagcttgtaactatttaaactttaaaaactattcaaaaagatttcttgcatttcaggatcccataaaaattttcacaaaatattacaagtcaatttttacatgtcgacctaagcgacaaaactgagaatacaaaatgcagcagccaatggacttaacccgcatggtctattgtggcccgaacatgtacaatccacctccaagccctcgaactcatggctaatcacagactgatttaccctttcctgaacagtaaagcacccgtgagccaagcctagcaagacagtataaataataatatacaatatattctcaatggaagtaaatattgatgccaccgcatctactgtctatttagcat

SEQ ID NO: 149704 - DNA, 572 bp, Cannabis sativa
ggcatttatgtatgattaatcgaaattcatttagaaatacattgtataatgcaaacccgccatttcaaattttttgaaattcaaaggttctctactaaacctcattgacgaaagtggagtcgaactgttacaacttcctgaccaaacctttttgacgagaaagaggtcgaatcgttataacaccttgatcaaatattttttatgaagaagggatcaaacaattataatttttgatttataacctatctgacgggagaggaaaatcaaaagttataactcgtgtttaaaactgaatactaacggttctcgcgagctaggaaagtgcttaacgaggcatcacgacgccttgataaaagtacttaaacctagaaaatagatagataatatagctattcatacgagcaaatcaaaactatacaaagtgataaaatccttaaagtatatttaagtttgcttaaggcagattataactgcaattgcgtggcagaatcgacaattgctcgaaatcataaagttcggtagattactaactacttaaacaagaagattacgagcaatggagaaatccaaaa

SEQ ID NO: 149705 - DNA, 532 bp, Cannabis sativa
ccaatccccagtcacgagttccacccgtgggccaagagtaggcgggcagaccttgtcccggaattcatcaggaggagccatacctgacggatctaattagaataatggagttattccgcctgtcaaccaagcgaatcaaccgctaagacaatcatgctcttctgtgttcgataggctgggaacaacccatgacctaagggacgatctaaacagaagaaggggaatagactagaagaatattgcaacgatcttgtagcccggagcccatactcaaatccccccctcagaatgacgctaacgtaatccaaaccgacaaaaattccaaacaagtcagcccagccgtacaggcacagcttgacgagttgaagaatatgtttcatggcatggacggacagcgtaacaatgatcttgagttggactgtgctcgtcgaactcctttctcaccagagatcaatctcctaccactgcctcacaagttcaaaatgccaatgtggaagatgtacactggaagagaagatcctctttcccatct

SEQ ID NO: 149706 - DNA, 774 bp, Cannabis sativa
  modified_base (635)..(640): a, c, t, g, unknown or other
atgttattttgggtatggattggcttgctaaatacaacgcaactattgattgtaaaagaaaaatggtaacttttcaacctgagggtgaggacccctttgtaattgtgggtagagtgcagggatcccagattccttctatctcagcgcttaaagcaagatatttgttgtgtgaagggagtatcagtttcctagcaaatgtagtggatactaaaaaggaaccactagtaggaccagagcatgttccagtggtttaatagtttttggatgtttttccagaggagttacgagggttaccactgaagcgcgaaattgattttgagattgatttgatacgggggcaaagcctgtatcaagatctccttacaggatggcacctgaggaactgaaggagctgaaagttcagttgcaggggaatattggatttaaaattaacaagttcaagtacctcaccttggggtgcaccggttttattcgtgaaaaagaaggacagaactttacagatgtgtatcgactatcgggagttaaacaagttaaccgtaaagaacaagtttttatgccaaggatagatgacctatttgatcagctacagggaaagaccgtttgggttttgtgccccaaaataaaactcatttcannnnnntcagatttactaattaaaaaagatccaaaatcgcttctatgttgcatgcttcacatgatttatttcatgattatacttaatgtataaattatattaagtccagaacatatataaatatgtatatatatttgttc

SEQ ID NO: 149707 - DNA, 565 bp, Cannabis sativa
atgagaaaagctctagctcgcaaccagggttattgttgctatattccaagcgagacgtcccagaacgatacgctttacaacataattaatacacgttttgcattgatcaggtaaaagcggaccaatcacagctgtgtgattttcaaataataaccacatttatttacgtgggatgtaatcaaattccataatttcagagaattattgttgcaaaatattagttaaatttgtaattaactgacctcctatgtaattataaataggagcaagttacactgaaaaagggacgaagaattcattgtatcaaaaatctaataagattgactatgaagaattttaactgcaaaactacgtaaaaacttttgtgttcttactttttctttaccgcttttattttttttgcaaatccatcacgatttaggctttaacacagttaacgaaaatctgcgttaacaattggtattggtccttatttattttgcttgttatatttttattttctggtgatctcctatatattttcacgcatttatattagttttattttaattttttttttcaattt

SEQ ID NO: 149708 - DNA, 616 bp, Cannabis sativa
  modified_base (26)..(31): a, c, t, g, unknown or other
tttaaaaaatattttcacttttctannnnnnaaaacaaaaaactgattaaaaagtgttactaaatgccaccaaaatttgtgtataatataaaatactataatatatatataataattaaataataatgagatttgcgtacttgattgatccatagcaattattacaatttgatagtacaatactatcaactagtctttctccctgtgtgtttaaatcaaagaagttttatttatctgattatcaaaagtttacaattgcaatgagacaatatatatttatagagttaggtagggaacttagctacataatttttgttagactgggcctactcgtcaaaggttttagttaactagaaaagcccacatttcttcttcaattagattttacacataaatgataagcccattaactattgatcacaaataatataggctagcacaataaagaactatccaatcaactgaaattttaataaaaccaataaaaattaatgtaagcccaaataaaaatctaattacattctcccactttggcacattcattttaatacgtatatattatgtatgaaatttttttttttttttttgaaaacgactcatgggttgaacaacagga

SEQ ID NO: 149709 - DNA, 722 bp, Cannabis sativa
  modified_base (176)..(179): a, c, t, g, unknown or other
  modified_base (367)..(371): a, c, t, g, unknown or other
agacccagatccagaccaagactcggaccctaaaacggactgaaaccgggacccagacccagacccagacccaaacccggactcgtacacgaactcgaactagaactcgagacttggaccaggagcgagatcaagactgggacccagaccaggacaacgaccgagacctgaacatnnnnggggctaggacccagactgggactgggactgggacccatgaccgagactaggatacgggacccaatactcggagctgagacctgagaaccgaattgtgacccagacctagacaacgcaaagacctgagacaaggacaagtaccgaataaggattgggacctgcactcggactaggatgataaccaagnnnnngacctaggaccctgaccttaatcgaggacgttgacccatgactcaggacccaagacccaaacctagacccaaacctggacctgagacccgaactagggcccagactaaggacctagaccttgacttggaccaggatatagatttggacccaggacccaggacccaagacacgaggcttggacccgacccgtagtcggtgtctaaatctaggaatcagacctggacctggacccagacctagactagatcccgaacccgaaccaaaactcgaactagactcgacatgtggttggtgtttggatttgggaccgagactcaattttgaacccaaacacgaacctagagccagac

SEQ ID NO: 149710 - DNA, 625 bp, Cannabis sativa
cgagaagccaaaacacattcctaagcaagtggctcaaaaatttttgcgtccttacagaacctggtcttcatcgtcttcatcttcgaaggaatctcctccacctctagcagtccctcctcctgctacatcagtccctgttaccactccaaccggtccatctactcgaactcgagcccagcaagcatctgtcgagaaggaacttagagcatctcgaagtcgtgataagccagtgcctccagccaagaagaagcttaaggccaatcctccttcagtttcttctacttcagaagaagaagaaccaatggaagtctcctctgacaaatctgcttctctacattccgagaaggagattccagaggacatgggggtttcctcagacagtgagaacactgaactcgagcgaaagcctcaattgacaaaatctgctccaactcctgctcgttcttcttcagcagcaaaggcttctgctgcttccaaaggcaagcagccaatgaaggaatcttctcctggtaacgttccttcaactctttctcactgtcctcgattttgttatcgtgataatgagcgtgattggaatttgtatgctacctgtgagtttgaaagtgagaggaattatgatttgcat

SEQ ID NO: 149711 - DNA, 967 bp, Cannabis sativa
ttcttatccttgggcagccttttgaaatcgtcttttctctttgatcctggggcttccgaatcaaattctccaacagtatcatgcctcggttgtcttttgggtttcgtgactccatgccttctgaacttattctccaactcgtccatttgcaaatggagtgaatcctttttttttggaccgagttgttgacgaagatcaggcttcttcaagtttagatgctctcatagatcattctgatcgtgactccggtaggaccttgctcttcctcttaaggtttgattcaccttattctccctataagggtttgcacaagtttgtttctgatgaacctgaagagagggttggcaattttcgtccgatgttccacatatcctaggccgtgtccccagattttcctcagttttttcaggttgcatctcctgagagttctaagtatatctctgggttgtctcctggcccttggtgtgcgagctgtgaggtttgcctcgtgaatctcttctcccaaggtcaggttgattttgggtaccattctcatgtgttgcccttactgcggctatttcacgctctaactcgtcattatgctgattttcttcctccaatcgacgtctaagatggaaattttctaattccatgattggtatgtacctggttgggtcgtaggcgccatcctcatcaacctggttaagaagtgacaggttgttgtttacccaaggttcatcaagccagggaccctaattccaggttttcctggggcttgcagtctgttcatttgaggactcaatagatccttgaggactcaatggttcttttccagcgtgatgactgattccttcttgaggattattatctttgacgtcatccattacttttatgttacgaggctttttctaagctttttcacagaggctctaaatgaaagcaccaaattgttaacgcagattttcgttaactaaatttgaacctcaca

SEQ ID NO: 149712 - DNA, 667 bp, Cannabis sativa
  modified_base (142)..(158): a, c, t, g, unknown or other
  modified_base (409)..(409): a, c, t, g, unknown or other
ccatattgatttcaccatccaagctataacgagttagttttgtggaaaccctcccactacgacaaggagtcatgaccttctgaacaagaatatttatggtagatttctcagttgtaacaacttgcattggttcaaccaaggnnnnnnnnnnnnnnnnnacttgagtagaagatgatggaacattagatggagttatttccaaaagcatttcatcgaacactactttactttacggcttgaagttctttacatattaatcttcaaggaaagtgttgtttgtagaaacaaacactttatcatccttgcaactataaaatagtccacccctagtctccttagaatttccaaaaaatatgaaaacttcagttcgcgcttccagttttccttctttctttcttaagacaagagnagggcacccccagattctataatagcgtaaactaggtatacaaccattctagagttctacgggtgtcttagggattgatttagatggtacaacatttaaaatgtcattagccatctgaatagtatacccctagaaggacgttcacaaggttgaatagctcagcatagacctaaccatttctaaaagtgtgtgatttcctctttctgcaactccattttgctgtggagtgccagtgacagtatattgtgattcaattcc

SEQ ID NO: 149713 - DNA, 503 bp, Cannabis sativa
atataaaaataattctatgaaaatgataaatataagagaacttccatagtatatctaaaaatataattctttattttctacaaactgtttttatctacatttttacagatgttttttcacatgttgtcacttgttttttagttttttgagaaatgttattttaataatgtttcccgtaacatcaacattttttcgaaaacaagtgaaaaacaacaatctatatttttataaaaaaaatccataaaaataaatataaaaaaaacagtagctctataaaaatgtaaaaaatttatcattttttttgcatataaatatatatgaaataatccgaaaataaattctataatggattctattttgtttgaaagaaattttttttgtcatctatactcattttgatataataattgtatatgatatatttacacaattaatgaatattgttacaattatagttacctgtagcaaatgtgttaaaacgaaatccttgacaattatcattt

SEQ ID NO: 149714 - DNA, 585 bp, Cannabis sativa
tatgctacaattattgtttagatataaaatttgatacaagacgagagtaccgattattgaaagttatttaagcaggatctaaatttactaacatgtatgttgattatattctataatctaacaccctaaatatgaatttcctaatatgatgaaataaacacatataatgtttagaaaactttatatttgtggcagtagaataataataagtccttctgtacagatctttagcccttgatttctttctctagcaaagcataatcaagatctgaacctggttcttctctctttcagtttggttaaccaaagtcttccacactatgattaagtacttgacttactatttgtaggcgcatggtattttatcactaaaggaccgtaatcaatgaagaacaagaagagaggaatcgaaatcactaaggagtgaggctctaatttacattgtctgacaaaagaatgaaaagtaggtttttagctagttagatgagaatgagagcatcttattacttttagggctcgtttcgaacgtcgtattaggtcgtatagtattgtattgtattatattgaattggattatatatcata

SEQ ID NO: 149715 - DNA, 512 bp, Cannabis sativa
atacttacatcttgggaacatgatagtaaaatttagtgggaatgctaatcatagatatggaatctatagcttctatcttgacatagaagtgaaataataaatttcttcaatcttggcttgatagagataaattgaagagctcttatttaagttattatattagtttactgaaatatcatttataggaagttaagtattttaagaataaaatatattgaggggtagaacggtaaatttgtccctactcgatgtagatcatccatagaggatctttgactatttggattgaattaatggatatttaatagtgtatctatatttagaacatatagagcattctatgtaatcaagagtgcaattctaaatctatatagtggagtaagtaagaattagtgagatagtaaatttacttggtgaattctagaactacttattgggagcttaattatataagcccatggtccccacgctagttgagataatattggcttatagactcaattaattggttt

SEQ ID NO: 149716 - DNA, 573 bp, Cannabis sativa
atctgcataacttttctgtctactttgggcggtgagcatcctttgtcgtatcttttcaactgcttctgaagcttctcttactgcttctagacctatgtagcagctttctccaacttcatcctagagaagcggtgatctacattttctaaaaatcaacattaataatcaacattttattttagaaactaactcaaacttgtactattctaaaaaataccactcttttacatatcaacagaaataacaatttatgtaatcactacttccacaacaagaaaacaaataacatagtaataaaaatatttttagttattacaaataatcacgtgtatagtttttttttttcaatttaattttttattttttaattaattaataaaataatatcataaacttaataaaaaaaattcaaaaaataaaagaattaatcaaacgatatttataaacgtaataaaaaattaaaataatgagagaatagataaaagtatttgagatgattatagagggacatatcaccgtcttatttttctactttatatatatagatacatagatagatagattgaataatta

SEQ ID NO: 149717 - DNA, 533 bp, Cannabis sativa
tacgtgtttaatttaggaaataaaaataaaatcaactaaattgtgataagggataataacaataaaattatttaaaattttaataccactcaatcttttttagaaataaaataaaaaagataataattaatgaattgattataattttaatttatcgatcccaccaaaatctttgttcttttcatagttgattagcatatattctaagatatataatacaaaaatgatgattacctggatattttttttggagagattttgtggtggatagttaagaagataattatttatttaattataattatctttttaaatgcggagattttcatttaaaaaaaaatgtggagattttaaagtgaataattagctaggtagatatttatttgaataaataaataaatacaaacaaaaaaaatagttatgggtagattttagagaaaaaaaaaaaaaaccatatttacagaaataatcattttattttgtcaaaactttaaaataataacaacatgctcataaattcaaccatttttttt

SEQ ID NO: 149718 - DNA, 569 bp, Cannabis sativa
ggcacaaaacccaacaatacctagttcagaaagcaatcttcggtatgtcttcttcttggattctgagttgatgataaccagatcttaaattaattttagagaatgtcgtcctaccgtgaagttgatcaaacagatcgtcagttctaggcaaaggatacttgtttttaacagttaacttgttctgctcccaatagtcaatacaaatttgaagagttccatctttcttcttacgaacaacactgaagctcctcagggtgacacactggtttaggtgaaccctagatccagcatcccctggagttgtatcttcaactctttcaattctataggagccatgcagtagggtgcttttgaaacaggtttcgctccaggtaccagatcaataataaaatttatctcccgttgaggtggcagccctggtaaatgttgggctttgtgccctaaagaaaattctaagtcaatgtaatcttttctattaaaatatcaataaaggaacagatttaatttcattacctgtttaatgtgttatttggttcatgtgatcatctatttacttatttgattaataa

SEQ ID NO: 149719 - DNA, 582 bp, Cannabis sativa
cttgctctccttatcattttttttttaattgcttatataaaaaaaatatatatataaaaaaaaaaaagaggaaggcatttgtcacttgacttgtgggctaagaaaatttagtttttgatttgtttggtaagtatcaacatttgatctaattgatttattttgatgagtttccctttaaagtttgatatcatattcattgtgttttgttcaattgttgatcttgaaagattttttttttagaaatatttgcgccaacaactattattattaaattatttaagaatttacccttacctattttaatactcacaattcaggtattttttttataggtataccaatgtatatttattgcttctctctcctaaactctgcctacatgctagttttttttttttagacacagtagcttttttttttaataagaatcttatttttttcaaaataatagtagactaggttgatcatatatattttttttacattctattctttttcttattttacattcttttttattttttaatctaattagtagttttagaaagaaataattacatgtatcaacgtgaattgtaaatt

SEQ ID NO: 149720 - DNA, 1076 bp, Cannabis sativa
attttattctgataattagatttctatttgaaaatttggattccacacaaaattctactaaaatttgaattttgtttcattgataaatagtttttgaaattcaaaatatcactaaaacaagtatggcacagggggacttgggcgtgaaaaaaggctgctggcagcctacttggggggaaaatctcggtcagctgctctttcaaatagcttgtgtccaaaaccgtgtgcatgtctttgtgcacgcacgcatgggtgtgtgttaggttgtgatattttcattcaatttcgaaaaatcataaatatgtttctgaggccagttgttgtgaatattttaccaaaatctagatttaccaacaaatttgtttccttaacatcataaatatgaatatctctaaaacaataaaattaaacgcataagagtttagaaaaccttacattgattgcagcttgcagcaaaatattatgactcattctactcagatctctaacccttattccttttatcgcaaagtattatcaagatctgagcctggaacgctctctccttcgcgtttggttaccaccatcttctgcactatgattgagtactttactttctatgtgtaggcatgacactctatcattataggctgattataaagaacaatgaaggagggttcgaaaactgtatagaaggtgtctctcatcttctagttgtctgacagagttagaaactagatttggcaggttgaaaagtgttggatgagatgagagcatcatgttccttttatagtatttcaatagggcttaggtttgaattatatggatttaaaaagaataaaatattgggcaaaattacaccttaaggctagccacttaatggaccacttttgtactatccagattaagaatagtatttaaaatttattgaaatgataatcgtaaaaattaattgtcttatttatttttttaaatagtgtaagcagagataattattaagtgtagtggctatttttcttaaaattagtttaaagttgcattagtttcaaaaataaaagactttggtattcttatgagttaagaaaattatttagtta

SEQ ID NO: 149721 - DNA, 550 bp, Cannabis sativa
  modified_base (209)..(211): a, c, t, g, unknown or other
ctgtaggtgtgggttgtttttcttcatcaggaattccatttcccacttcaggttgttgcattcattagtgtcgtggccgtagtctccgtggaatcgaaactttgtcatgtctctcttgttgacatctttcttcatgggcccaggcttcttatatggggctagcgactgagtagccatgtaaacactttctatatcctcagtcaagatgnnnaatgcagtgtactttgcttgactctcccgaggagtttgctcggatttgccagtgaacttttccttcttcccatttcctttcctgttgttgttggaacatttaccattcgagcttgaattatttgggtagttggggagttgggtagatgttccagtagaaggagcttttgacttgccaagcttttgctcaccttcagctcattgaatggcttcttcgtgcttgatgaagccttcagcacggtcaagaaaatcactcattgagtctactggaccgttcttccttatgtccttccaaagttcaccaaggactttaataccccccagtatcgcagacaacttt

SEQ ID NO: 149722 - DNA, 1136 bp, Cannabis sativa
aaaaaagttaaaaaaaaaaatagtatatggggtaattccccaattatttttattaattattttttttttgtcaagattaataagtttttatttttttttaaaaggattaataatttcttattaggtgtaaatgaatgaaatttgtacatgaaaaatataaattgacactttatttataaaaatacatttataagatgtagggaataattttattaatgagtttttatttattaaaatatcacttacacatatccattcatatcagtacaaatattaacttttactttttttttttcttttttctctctcattttttatttttgaatttagcattcaattttttttctttttttttttctcagttttttatttaaaaaccactttccagctattatcctttcaaaacccacattcaaaacccatgaaaactatctcccagtcataaccttcgccatcttcttcttccaactacctcctttattaattttcttatatcttttatttcgtatatataataactattacctgaggctctgcttctccatctccattgccaaaaaaaacttcaaaaatgagtcataaatcagttgctaacaaggttaaagggaaatatctagtcattgacgatgatgactccgatttcgctcccactgtagctaaaggtggtcgttatccagtgaagaagaagtcgaaggtgtctttgcctaaaaaagaaaattctaactccaatggccaaaaggaaaagaaagaagcagggaatgttcctatggtttgtttctagttgcattttagttttgccctatctctgaatttgtaattatttttgtttttggtttgttatattcttttgctttcattttagggtttagtttttgttattattttcatgtttttgttatttttattttatgggttttcatagatgctaatattttcaaacatgtaattagtttgtattttggattgtttgttctaattttaagattttttgttttatgtaaatgtgttcacatttattattattttttttttttgtatttttatgtccatagttggttttaggccagatttctaactgttgatcgaggttttcggcaaccaatataataataataattaagaaagctataaggaat

SEQ ID NO: 149723 - DNA, 1225 bp, Cannabis sativa
ctgatggaatattttaaattccagctgtgaataaaataatcatttctttcaaacaagtaattacaaagcgtaaaatctttaaaattacttgagggtcatatatgtatgaacattaaccggaattgatttgaaaatgcatagtacaatgcaaacccatagtttcaaattttgaaaactttataaaagggcctcgaccaaacctttttgacggaagaggggtcgaactgttataactccctgaccaaaccttttcgatagaagaggggtcgaatcgttataacactttgatcaaacctttatgacgagaaagggatcaaaccattgtaatttttgatttataacctattgacgagaaaggaaaatcaaaagttacgactagcgcataaaactgaatactaacggttcgcgctagggggaagtattaaacgagacatccaaatatcttgaaaaaaatacctaaacccaacacgtgggtagaaatattaactactcatgtaagcaataaaaatatatatataatgacaagttcattaaaaatatatttgaatgtgcttaaaattagatcatttctcatgatcgcgagatggaattgatgacggttcgcagattgaggaatgagcagataagatgctcgcacgtaaagtaggaaattaactacttaacgtcgaaagaaaggacaatcaatggaaacccctaataaaatttgtgtttgtgatagtttatattgtgaataaaatgcaagtaaacatctacatattaaagttcatacttaaaagtgtgaggcattaaaaaagcaaagttggacgtccaaccttgcaaatatatctttacaaaaaagtgccactaggggcaaaaccattgtctcggccaaagggccatttcctaaaagaaaaaaaaaaagagataaataaacaaagtctacatgctgggagacttggacagggtttcttcttcttcctcaaccttatcatcgtcttcttccatcttggtcttctcatagagagctaaagtctcttcttccttctcctcccagaagctggtatccatgttagggttccaaagccaggcccggtatacaacacgaaaaccaactttaccgcaccattctacggtctcaatttctttctcggcaagcttctcagcaagcttctccttaaactcatcatcttggactttgagggccttctcggcctcctctttcgccttctcgacttccttctttgct

SEQ ID NO: 149724 - DNA, 1227 bp, Cannabis sativa
cgcttttcattttatgctggcataccaacattgatttgccaacccatttttgccaacacatcacaagtaaattctattttaccagcggaatactaacttttgccggtacaaaaatgtgctggtaaaaagtgacatttcttttagtgtacggatcgatgcgtgtaacggtaatcacatttaatcgaataactcattagatgcagaagtgacagagtatattggtaacttgctgactataaagtcttatgcgagataaagatatacaaactgttgcctcatgtattaacgagaaatcatacgacatttgatgtgcaaggtgagactacatcaacttcgttacacttggaaagacgaaagcgatgcataataactgtgaaaacacttagcgtataatatataaactaagtatagcggtcgggcgaatccaaacaactaatagcgagactcctatctctctataggaaggcatgctcctcttactttcaccaatcaacttcaaaccactactataaaattggctttttcccacagtttataactgtcatttatactatttcccatcagttcctaaaaccgttggctatgtgggtgtcataaaaatacgaagctttaaaagacggtttataactgttaggaaaagttactttttccaacaattataaactgttagaaattataactttaaatgactatttataattgttggtaaaaatattatctaaattaaaaaaatacatttaaactaatttattatatatgaataattatctaattacaataataatataaataaattataaaaaaaaataataatataaataaaaattaaagaaataagaaaaaaaaaattagcagacttcttgattcacaacaacaaattcttgattcacaaacaacaaattcaactcaaacaaatacactgaataataaataaattatacccaacagaattacactcaaatgtatattcatagactttgagtttcaaaatgaaattcgaagatccaagagaacccagaacaaatacactggaataggggcgtcgcactcatccacgccttgagccagttcttcgtctcaatcgtactggaacaggagcacaacacctcgatgaatttcttcgtcgcagttgatcggttcatgtttgaggcagaggatttgaggttcgaatcggaggccacaacacctcgagttttccttcttgagattcttagatgagaccccgac

SEQ ID NO: 149725 - DNA, 508 bp, Cannabis sativa
catttggatctcctatgactgtggcctgaggatgagctttctgaacccaggagggcggtccgtttttatacaatttggcttgttggggttctttgtccagggcactattaacttcatttcctctctctaggtcactggcatttgcttgattgtcacctgatacacctggttttgtatttagagactctgtaggagtgtcaggatacacttgaggcagtctagtgttgacttgtctaggtccagagaggacaggggcatcatcctcgacacacacttcttcatgtccttctaagtcatcaaatttgacgttcattgattcgaccactgagagagtccttttattgaataccctgtacgcacgactgttgatggagtaccccagaaatgtcccttcattgcttctgggatcaaacttggccaagtgatcacgatcattcagaacatagcacgtacatccgaaaatgtgcatgtggctaacgtttgggggtcttcctttccatagctcata

SEQ ID NO: 149726 - DNA, 506 bp, Cannabis sativa
  modified_base (143)..(144): a, c, t, g, unknown or other
  modified_base (213)..(219): a, c, t, g, unknown or other
  modified_base (475)..(479): a, c, t, g, unknown or other
tccaagccataacaagatggttttgtggaaaccctcccactacgatgaggagccgtgttcttctgaacaggaacatttgtggtagatttgtcagttgtatcaacttccaaaggttcagtcgaggaagtgggattatcctctanntgagtagaagaggatggaacattataaggagtaatatctgaaaacatttcctccaatactactttgctnnnnnnnttgaaattcttaatatagtaatcttcaagaaaagtagtgtttgtggaaacgaacactttatcatccttgcgactataaaatagtccactcgtagtctctttaaaatttccaacaaatttggaaacttcagttcgctttccaagttttccatctttctttcgtaagacatgagtaggtcacacctagattcttcaatggcgtaaacttggtatacgaccattccataattccaaaggtgtcttagggactgatttannnnnaacaacatttaaaatgtcagttgccat

SEQ ID NO: 149727 - DNA, 548 bp, Cannabis sativa
caaagttttccattcttcctgtcatgagaaatcttcattccaagtatttgtttcactgatcctaagtccttcatagcaaaagacttgctcactcttcctttagcttctgaatctttctgccagcatggccaacaatcaacatatcatcaatatacaacagaagaataatgaattatcatcagaaaacttctttgtaaacacacaatgatcagaagtagttttggtatatccatggctcgacatgaaggaatcaaacatcttgtacaactgtctaggtgcctgtttgagtccatataggccttttttaagcttgcacacaagattctctattcccttgactttgaaaccctttggttgatccatgtaaatttcttcttccaagtcaccatgaagaaatgcagttttcacatcaagttattctacctctaaattcaatcgagcagctaaaccaagaacaactctaatagaggacattttcacaacaagataaaatattttttcaaagtcaatacccttcttttgaccgaaccctttcacaaccaatcgtg

SEQ ID NO: 149728 - DNA, 744 bp, Cannabis sativa
ttaaaccctaggtttacaattcaattcccttaaaaataggatagttagctagatatttacaaaagactcaaattcccttagattctagatacttctcaagctgtcagttgggcttttagggcccaattcgcagcgcccattcttgctttgcacatgtaggagagtcctgtgggacctatagtgcaatccttggccggccataatgttgtttcctggcttggctagccatggggccgaccaggggtggcttgagtgttgaggtcttcgtttgctcgaatgttgacttgaccttccttttagtgagctgtaatgcaaagtggcacaggttttttccacgtaaccatgccacgccatgaggataaaaattgggataacatttgccccccaagtccctatttgaacgtctggccggatagggactttctagccatcgtcttgtctgtagtagtcgttgttaagcaaccttgtcttgccaaatgttggctttttgcatggcctgcttttggatatttgatattctttttatatacatctcattttctcttcttagatatctcttttctgtacctatcattaataggtttcaagcttgttaagcttttagaaatgttttgattcatgttagcttgtattttatttggtacattaatcctcatgactaggggtgggcatcatccaatccaatccaattgaaccgaaccgatccaatccaatccaataacaaaaagttggatatccaattac

SEQ ID NO: 149729 - DNA, 560 bp, Cannabis sativa
  modified_base (508)..(521): a, c, t, g, unknown or other
tgaactttcgataatattaattttcgcccttaaaatatacaacctgctaagaattcccctgaactattacatttacagaaatttagtcattctgttaggttctgtcccattattcatctaaaatgatgacgtttctttatcaattagcaactttgccctctaaattttaacaactatcaaatcataccctctctaaataaatgagaaagattcaatattttttttaagtaaaccttaaaaaattaatttagatcttaagaaaaattattttgaattatgaagaaaattaaaaaataaattaaaattttaaaattaattacgtgatgtaaaataatatttattttttattagaaaatttgtttagatattaaaaaaataatttgtaaaaactaaattttacaggaacaaacttgaatatattttatttttatcaaaaaagatagatttgtttaagtaaacataactcttttttttttgtttaatttataactttttttcaaaataattnnnnnnnnnnnnnnaatttttaattatttttctttatttgttaagatatgagt

SEQ ID NO: 149730 - DNA, 589 bp, Cannabis sativa
ccacaaaggagctggtcggccatgcacccctggccagtcctatggccaaccaccctctagacttcacaaggccggacagcctgcttcctacaagtgtttggctggccaagaaaggacctggtagaatttctgtacaattttacacgtggactgtgaattgggccctaacagcccaataaagtagctagaaaatatctctgtttaaggacaatttagtcttttgtaattaataaatttatatacaaatatcgaagaatttcaattgtaaattagggttaagctctcctatataaatgccttcactctaacctagaaaaacctaagtctaatcctagcctccaggccattaaatgctaagcctcattctaagcctaagtctctaaatttgataactctctctttctcattctctcacatgcccatactagctttctcaatacttgagattttccaaccttgattcctactttgtaccttgaagggagctgtatcaaatcccacctatagtgatttgaatagtattatccctacaactaaaatgggagtaggtcattacccgctacctcacggggctgaacctctataaaat

SEQ ID NO: 149731 - DNA, 593 bp, Cannabis sativa
tgttatagattttatggtttaattttacttaaagtccaattatcaataaattttataaataatttgtaacaaataaattttatatttctttcatcattgtaaacctataaacatgatagggcgctcatccaaatcaatttgacttaagcctatatatttgtttttgggtttagatgtatataagaagctaatatactaggttgctagaataaaatagggaaatagttgtaaaatgaccatttatcccttttttattgaagcttaatgtccatttttaaaaataatatagcaaatggtctttattattttttagtacctaaaatacccttagttatataagagtattattaacattatattccttcttcaaatagaaacagaagttctgttccaaaatctaaatgacaaaacctctctctcattattttttctggttagtttggatttctttatatttttttggtaaattatcatgatttctcctaaaaggcgatggaatatttttctctcatccatttattcgattcattcgttggatccaatcattttctcctaattcctcacaatcgaaaacgacgaagctctgctcattt

SEQ ID NO: 149732 - DNA, 595 bp, Cannabis sativa
aaaccaattggcaatgagtggagtagcccatgttcttacatatggctcaattctctaccatttattccatgtgggacaatgtccacaatagacatgatatccaagaatattaaaggggtatttgtttagtccaacaatgttagactagaagtgtaagtgtttcacgtccgctggactagaaaaatgattgattatttttttaaaaaaacatatttaatattttgtatactatttaattattataaatataattgatttttatacttattaattattatatattaaataatatataaaaatagatataaaaatgtattataattcttacacacaattcataaaaaaaaatttataatttacatattttaatttatactatattttattattatttttctacattttaatatattacaacacatatttttgttataacatatgaatttacaaaaataaataaataatattagatttgatcccgtcaacgattacttaatctaaaaaaaattatgaatcactctgaggtctttaatgcttctaacgcaactatagaacaaacttgtaaaggccgcttaacttaaatttggaaattagc

SEQ ID NO: 149733 - DNA, 609 bp, Cannabis sativa
  modified_base (341)..(347): a, c, t, g, unknown or other
ggaggaacaattcagaccggtggcgtagtggacttgcaggaacagacttgcacttgcggctttttccagtgcatgaagtttccttgtcctcatgcatgtgttgcatcttaggagcaaagtattagcatgtacgcactatgcttgccatattacacaataggatattggaggaggacatatgaaggtacaactatgccagttggtgacgaggatgattgagaattgcctgatcacataaagaacatgatagttggagtgcctagggcgacccaagaagcaaaaggttggaagaattaagaacaaccaaattgcttgtaatggtgaaaggattatcaaatcannnnnnngtagcaagtgcggtgccaaggggcacaatagatgcacttgcacctactgaggttaaaaatgaatgtggaatttaatattattatgtgttgtactattcctattatgtattccatgaactgcttgtactgttatgtattaaacatagacttttagtttttttgagtctattattgtaattattcgttcagtttgcatagaatgaagtgcttaactaactaaaaaaaagtaaagttttaaaaatttttgaacccattaaaacaa

SEQ ID NO: 149734 - DNA, 907 bp, Cannabis sativa
attttctctaaaatatttcccactaagaaataaggttctaaatttacccatgtgatcaaactagccatccatctcattttccattatcatcaagcaaaaattacaaaaataacatatttcacatatatgataaataatacccctagagtttaataaaatcttcggaattgagaaattataactctaatattcatttctaatattggggtccacaaataaataaattcataaataattataaaattaacagaaattagtgctaattgcttttactcattacagtacgatctttgggacatcagggcttttgctgtttgtatgaatagcaaactttagtaaatatatttagtaaacgagatcccaggattttataaatgtattactttatgttttaaatcaaataagtaaattttaattattcacaattttcaataacctcattgattagcaacgagctgtagagtacgttaaaaatcacgctaacatgcctatattagttagggtgttacaatcagcctcgtcgtccccaggataaaacaacccagtcgaacacactgtatgggaactctattgcacaatagaattccgtcgaaatactacacctaaaactgactactgctcgaaaatataaatatgtaatatagtagtatatacatatatatcatataatttttcagagtgaaaaaatatatttttctcccactgttcagtcgcattatataggcaatgccctgaaaatagtaacgggaagaaagacgttattggatgggaatgttggaacatgggatcgtgggaacgatgcaaaaattaggaagatgctacaaatcaggaagcctttgtctactgattaatcaaacacgtttaaaaaaaactgttttaattaattaaataaataaattttctccca

SEQ ID NO: 149735 - DNA, 612 bp, Cannabis sativa
gggcataaaacccaacagatacaacgaggccgtggagccagtatatgcggacggcgaagtcctagtcgaaggaggggactacgtcactgaggagcttactgctgcaattcctcgcaggaggaaaggtgccttaggtgcgagatgggtgaaccctccgtccaagatcactgaggcacgcctaagggatctggaccagtctggttatttgggtgaactggaatgctacgtccctgcctcaaatcaccaagcctcaaacccgaagaaggggatgtgtgcctggtcgggtgctgatattaaataaggggaaatgctgcctttgcaactgtacttcaggaaggtggcagatttctttcgcctctattcgacccagttttctcccaagggcattaagtatttgtctgccctgttcgtcctctacgccatccagaagtggggcgtgccttctccgcacgaggtcagttggttttttaacctgaagtctaccttcaagcaaggcatgtcggggtacttctacttctctcagcttgacttcaagtgattgacgggcaccgtggacaaggccgtgagcaaaattgggaattttgttgacgagcatgttgggttttatgccct

SEQ ID NO: 149736 - DNA, 944 bp, Cannabis sativa
  modified_base (239)..(244): a, c, t, g, unknown or other
  modified_base (869)..(875): a, c, t, g, unknown or other
aaattaaaagtcacccataaatttctcaaaaaccaagaattttagttatatagacacactttatatagaatagatacactaaaaaaatcacatttaatcttttaggtacaatataatttttttaattaaatataatttttagtcacaacaaaaaattacttgtaaaacataatatttagatataagttatctctaatttaattttaatcacaatatgttgtgactaaaaatatatttannnnnnacaaattgtgatttttgtaactaaaaatacttttaaccacgaattttttagtcataatgtaaaaataataatttataattagttataacttttttattttttaacttttgttgtgattaaaagaaaaaaaaaatgtagtgatacatgatatgatttgagttgaactaattcttcttctttcttttcattatataattgagaattttcccttttaatctatgaaatcatgagtagcattcattaatttctgttaaaactttttttaattttcattaatcacttagctaggatatatgtcgctaatttgcatggtaccgggattttttcagttttaaccaaaaaagtaacaatattacaaaaatacttccagctggccaaataaacaaatatacagcccaaataaaaaaaattacacaaataccacttacatacaccttcaacccaggatccatgcttcctgagcaactatcgcgcaaccattgcacaactacacagcaacacaatgcaaccaaaacaaaaattcaatcagaaagagaaccaccattaataccggcgacttcacctgagaagacgaccagaaacaatcaaaacagggattgcttcgaattcataaaaaaagtgtagnnnnnnnactacgaaactaaaattcaactggaaatccaaattaatttgtatgaaactaatgtcccgacttcaattt

SEQ ID NO: 149737 - DNA, 817 bp, Cannabis sativa
ataaaacaagcgctagcagacttcataacagagttccatgaaggagaagctagcggaaacgtgcaaacaccacaaaccccagcatagaaagtttttgtgaacggtgcctcgaacgaaaatggaaccggggttggggtagcaatgatatctccgaacggacttcaactccaggaggccctacatttcgaattcacagcttctaacaatgaggtcgaatacgaagccttgattgtagggctgaggttagcaaaagtcgtgggggccacaagagtagaagtcttcagtgattcgcaactggtactaaaccaagtgtcgggtatcaaacgcgtggagaaaaaatgggcgtgtatgtagcaattgtacgagagctgctccatgagttcacggactacaaatttgaaagaatccccatagaaaagaattcccacgcagactgtttggctaagttagcatcagacaacgagattgagaaactgggggtggtacccgttgaacgcctcgcgaaaccaagcattaaagccaaaaatattgtggcagcagttgaacaagagctcaggtggatgatccccatcattgattacataaccaaaggcaagttgccccaagaaagggcactctctagaaggatacaatattaagcgcaccgttatgtgatgatggataacattctctacggaagcggactcagcatgccgtacctaaggtgcatatcggacgttgaagctaagagaattatgctagaggtccatgaggggttctgcggagatcatacaagagacccgagtctctcaaagaagatattgagacaagggtattt

SEQ ID NO: 149738 - DNA, 918 bp, Cannabis sativa
  modified_base (92)..(93): a, c, t, g, unknown or other
  modified_base (865)..(867): a, c, t, g, unknown or other
agtacttgacttgctatgtgtggaaagggcactctatcactaaaggttcaaattggatgaacaatgaaggaggtttgaaatcactatagaanntgtctctcatctactagttgtttgtaagagaaaactagattttggcaggttgaaaatcaagtggacaaagtggatgagatgagagcatcatgttccttatatagcgcctcaactagggcttagggttgaattatatagattaaaaaataataaaatattgggcaaaaatcactttaagggtcggccataaagggaccacttcttcgttacaattttgccactttatttcaaccagatattcttctttcaataatatcatattttccaattcaatcctataaatggcaaaactattaatttaataattataattaattatcaaataaaattgtcatttatattatttatttattagaccatacaaagtctctcaattaacaaattaatcccaaaacctcgttccttcacaattaagcccttgcttagtgaaaattctaaaataagacatagtctaattttataattaaaattgattaatttaattgagtctgcaagcagtattatctcaatttgtgaggggaccatggacctatataaccgagctttcaatgagtagatttagaattcaccaagtaaattccctagcttattaattctgccttgtgccacaatagatttggaatttaataacattttcaattatatagaacgttttatatgtaccacgatatagatacgatatgattacttattgttacaatactaatagtcaaagatcctcaatagatgatctacactttatatagataaatttatcgttctacccttcaannnattttatctttaaaacacttaagtaccaataaatgatatttcagtaaacta

SEQ ID NO: 149739 - DNA, 987 bp, Cannabis sativa
  modified_base (908)..(933): a, c, t, g, unknown or other
gttcttcatataccaaccaacataagaataatataccacattattaatgtaatatactcgaatatgaatatactgtaatatactttgtctttcgttctaccactccacataaaaacaacataccacactcttaaagtaatatactcaaccacttgaggatagctcaagtggccatagggggtgcgtgtgtgttggaggtcctgggttcgagtcttagattatgcatgatgtaatatataaacgcttaaataaataaaaaaaaaagtaaaatagtcgaatatgaatatactgtaatatattttatttttatagcttatttgactcaaaaaaaaatgaaaaaaaaaaacaaaagacatttattaagtaggaggcgagatagtctggacacgagagaatgaaaagagagtagaaagttagggttaattattcaaggttataattgtaatttcatcatcaaatttttatccaaatggctattttgctaaatatttataaaaaaaaaacatttactattttaatttccaaatttagtcattttatatctccgcccataaatttatttgcaaaacaaacaaattatcacatattcaaaaagaagaaaaaatatgacattaattcattttaacaaccgttttaaataataataataataataataataacattcgagatgctcatggtgaagttgtcactgcattcttaaaaccagttgtcactgcactcttaagagaccattgatgggaaactctcctgatataaatgtcaaggctatttttcatagttgaatttgggttctccaattgcaacagcagatcacccttcttgaaacagatgccctaatagttttgaatcagggacggacctactagtatcaatacggggctatagtcccactaacaaaaatattnnnnnnnnnnnnnnnnnnnnnnnnnnttttaatttgataattatagactaaaataataaaaaagctcccacaaaattaaa

SEQ ID NO: 149740 - DNA, 1023 bp, Cannabis sativa
agaagaattaacttgctagaaaaactgaagtgatgcaaaggaaaagttggaacaaaagctgaaaactggatagaaatgctgaagcaatgctatagcattctgggcagtttgggaagtgacgtggaaaaagtatataaaatgactttcacttatccacatcagcaatttcatcccagtcactcaaagtatgccagctggctgctgtggaaggaaaaatactaaacctagtgggccaaggtagaaaaagattgggggcttctattttaatgtataatttttgtaccctaaagacccaacaaagaagagaggagaggaagtacacctcgattaggattatggcaaccgccatttttgaagaggagtaattgtagaaagtacagaagagaaggaaagagaggggggacccaagtgcaagaaaaagagaaggacaaaagccctattgtttccatctctttttcccttatcttctatttttcttttcttttctatcttgtctttaaatacttgaaacttgttagttgtaaaaaaggtagcaaccatggatgaacaatttcgaatttggattgtaatttttgtgttcaatatgaactaattttcttaaggcttgagtggctatgaactcttatgttgggtatgattaactttttaagcatattttagcatttatgcctttgttcattcaagtaagcttatcattttatttgattgttgtttcttggccattgataacaatttgttaagctagatcttgttccggaagggctagatctagtagttcaacttgaatggagcaagagaaatcatagatttaaatttttctttgtaagtataataggaatattttatttaccttgcataaattaagaattgatgcataattagtgttctctaatctggtttgatatgggaatatgtgaatctagatggtggaacttaaattgtgagttttggaaaattctcataaacacataaaaattttgttatcactggcaggaatgctgatgtaatgctataacatctggg

SEQ ID NO: 149741 - DNA, 538 bp, Cannabis sativa
  modified_base (63)..(100): a, c, t, g, unknown or other
tgtcaacagaatttcattcaatccacacttactaaaattaaagcaaaataataataataatannnnnnnnnnnnnnnnnnnnnnnnnnnnnnnnnnnnnnaataataataaataataatataaactaaaacatgataaataaataattaaataaataacaaaacaactaagaaaaaaaattggataggcacgatagttaatctctccaccacacttaatataagcattgtcctcaaagctcaatcaaataaaatcaatgcaaaataaaaaattaaaaaaaaaaaaggtaagaaaaactcccataaatttactttgtttaagtcgttagctcgactgcatgttgtgctcatgtgatcttcatgttgggtcttctaacaaagactcattccttatgtacctatcaatggaatcaaacgcattgaatttaagtgtttcaccatcaaattccattctaagtatccatgcttttgtatccaacttctttgtcgcagtgagtaagaagggtcttccaaacagagttgtgtaggattgggatcac

SEQ ID NO: 149742 - DNA, 815 bp, Cannabis sativa
tctattaagtcagcactcaactcttgatcctcaattttgatcagcatagacctaatctaccttttggagaagactaattcttcgtcagacagtagggttcgaaatcctttatcataactatcatttagtctatcaaatttactaaaaatcctggttgccacataagagtgagtggccccagagtcaaacaataaagagaagtaagagttgttgaccgagagctgacctgttacaactgaggggctagcttttgcgttagcctgagttaaagaaaacacccttgctggagcgggttttgctgttgactaatgttcctctttctaaagttgcgagtgacctcttttatagtgtcctggaaacccacactagaaacatccttgccctctacactcacccagatgatgcttcttacaactaggacactctgggtgagtgtatcaaatttcgaaaccaccctgacggttacctcgaccctggttctctaggaacctcttattctgacttgagccactgggtgcaaatggtgcctttcgtttctgatcagtggtcgagccagtactaccaccccttccataactaggggtaggaggagtaagggcttcaacagaaacctgagtcccttgagactcttgagtgcactcaactgcgcccttagctcgcagtgcctttcccaccatgtcagcataggtggtgttgtcgtcagtggtaatcataagatcatgttttatttttggattcaaaccttctagttacttttctttcttgctgaaatcagttggtacaatccccaaggccaacctagctaatcggtcaaa

SEQ ID NO: 149743 - DNA, 902 bp, Cannabis sativa
  modified_base (472)..(472): a, c, t, g, unknown or other
  modified_base (833)..(836): a, c, t, g, unknown or other
agagagagagagaaagaaagaaaatgttattgagagagagataaagagagattgttacagagagagagagagagagagagagagagagattataaattttaaataataatttctacaccatctacaacatgcataagaatataaggactataacatacaatatgacacaaatcataatcaatggattgaagataaatttccattctaattttccactggccgaccactctagtaattttttgcccaatattttattctttgttaatccatataattcaaccataagccctagttgaaacactataaaagaaacttgatgctctcatctcatccaactattcattcaaccaaataaaacctagttttcattctctgacaactaatagatgagagacaccttctatagaatttcaaaccctcttttattgttcttcacctattcgacctatagtgatagagtgccatgcccacncatagcaagtcaagtactcagtcatagtgtgcaagacgatggtaactaacccgaaggagggttaccaacagtaaagaccctcaaaaccacagcggttactttgtgacaacaccggtgcaattgccaacagtaaagaccctcaaagccacaagatgagtaaacacatttagaggaaatgccacatcatcaaggaatatgtggcaagaggagacatgctggtagaaaaggttgatactaaagacaacttagctgacccattcaccaagacattgacagagactgcatttgagaagcacagagaaaatttgggtttagttaaaaggtattgtttgttttatgttagtgcaagtgagagtttgtnnnnttttgtgccctaactaaaaccctattttaatgtaatcttgattttcattatcaataaaagaacgaa

SEQ ID NO: 149744 - DNA, 1307 bp, Cannabis sativa
  modified_base (611)..(614): a, c, t, g, unknown or other
tcttcaccactagactcagctcgacgaggagaacaatccacactaagctattttgcccaactcgctacttttttcagtgacatttttgtagctctgcccctttccagtgtcatttcgacgacatcgtgtattgttttgacaaacggtcgtcatgggtgtgatctactcgtcgaggtagtcattttgatatatactactcctattttcgatgacgttttcggtacattgatttttaccaccaccgatagttaatgtgcactgcttaggtgaggctttggaacctcaaattttaaatatagtcatattatatgtcgttgaactcagttttgaatgtagaatgcgatgatgaaatttatttaaccatttgatggtataggtgagagtaatatctaagattggactaaacaattggagctcgggacttgagagcttaagattttctttttagacaaagtttaacgacttgggagagttagagactcaacttgattattggacttgatttttatatgtgttgtataaccctaggcatattctaaatttttatgatttgtaaattgtttgaaaaattgaaaacataatttgtatatttttctggactgttctggggnnnngagtgccaaatatatttttgtgtacaaatatttatgcaagttatgatttttgagtttattcaaaatacagctgttatgctaccgaattttttagaaaataaaaaggaatatgttcttttgctatacttattatttttatggtttggttaaaaagatgagagccatgttgatcatgttcgatgtatattgttatttcatgacctagtctctgtgtcatcataggtagatcaggtgtgcactcacctgtaagtgaaagacctagaatctgtactgggagtgaattaaatctaagacccggtattatggtggatatcaggtgggactacccagttttggatgtcgttttctatgattggtattgagagttaggggtctagtggacggtgtgatatgcatttgatgcttgattttgtgattctttgtggtctcttattttgtttatacattttgatactggtgatgagatattttatttttacaaagctaaccatgcaagaattttatgaaactaagaggtcatttgatgttagttgtttttctactaggctttataagctcacccctcctatttttttctcattgcaggaactcaatttgatgctagtagataaggatggtaccgttgaggaagaaattcgttattagtttagtcttattctactctttaatctctaatgaaactgattttgtatt

SEQ ID NO: 149745 - DNA, 547 bp, Cannabis sativa
tatatacatgttatctcaacaatcctatatgtgacaattgacattttttttaaggttgtgatctaggttagctagttgagttagttaggtgtgcaatgcaacgaacaaacatcatatatgtaaatatgaaatattcttaattttacctttatatatatatatatataacaatatgtataactatgtactatagtactctatagtgtattgttgtatacgtaaatatcctaggtgagagtacatgtttgttcttaatccacctaatctttttgtcacatgttaacccacgtataaccctttcctaccactcatatctttctttacaaaaatatttctttaataaaaatataataaattatattattttggttattttatagtttttttatagtttcctcagattgatttttttttttttttttgttttcttactttttattaaacaaagtgtatttttataaataaaaattttagatcgtaaaattataaataaaaccttaagaaaatatttttaaaaattatcctatatgtaaagtccttttttggc

SEQ ID NO: 149746 - DNA, 1092 bp, Cannabis sativa
taggatttataagcttaaattctacttgactatgctatattgattaaattgatgaattgctgtgtattaatgcttgggatgtgttgtgtatatgatattattttgatatggagtggttgggcaggtgtggttgagttttggtttgagttttgaggagaaaactcaagattgcaaccctgccagaaccggtcgaccggttggttctggtgcagtagaaccgtcaaccggtttgcctgcaggtgaaatttttagttttcttctaggctagttttagggttcgggatgatttccgtggctagtgtagattgtttaaaagtggtaaaacctattttggagctaatagaagctaaggtttaccagttatgggaattagggttattcccagaattattgattaaggtatttattgaatgttgttgtcgtgacataggacccgggaacgtcaagctttgtttttcacttaggccggcacgcgcgcttaatctctggactgaggtaagaaaagtattatgtacagtttatggttaacgattataattttgatagtctcgattatgattgagattccgatatttgattgttgtgactcgattatgattgagggaaatgatatgaaatgattattattgttgtgactcgattatgattgagggaaatgatatggaacgattattatcgttgtgactcgattatgatcgagtaaaagatacggttattaccgttatgagtaattactcttgaaactgcaaatagatttcttacttatcatttggtgtatagggcaacgatagtgacatacgtagcttgtggttaacgaggggtaagggtactttttaaagtaccgggactgtttgactacgatgctgtgaaattgattaagcatgttattatgtgatgagatgtaattgaatatattttgttatagtgtgactaaataaatttatacttcttaaggagttagtcacttttcttgttgagtctatgtgactcgcggaatgtatgattacgtgattatagggatgtaagattaaagtgctttatttctgataattagatttgaaatttgaaaaacaaaaatcaatatacaaaact

SEQ ID NO: 149747 - DNA, 669 bp, Cannabis sativa
aataataaataaataaataagcaaaagaatcaaataaggtgaatgatgtcatgtgatcactctcttaatttatcacccttcacttttatcactcttaccttttatttagtagagtttttttttttaaaaaaaaaaaagaaccctttatttttagaaaggttgtggctgactgctaaaaaaataaaaaggaaaataaccctttatttttagaagagttgtggcgctacattgatctataagatcaactaaaaaaaacaaaaaggaaaagaaccctttattttagaagggttgtggcgctacattgatctataagatcaactaagaaaaacaaaaaggacaaaaaaacaaaaaaaaaaagacaaaagatccaacattaatctcatagaaaagaaattagagttgtaggattttgtgttggccgaaaatattagcccaaaaaaaaaagatgtttcccttatcacatatatatatatatagtaaagtagcatatattatatattatatatacattactcatcgttaactgcctcattactcgtctctttgtttttttttacgtttgagagtttgaagatacaggtatgtcttctcttattcaattgatttgttccgtacatatatatatatatatttcttattgaagagtagttatgtcaattaatggttgtc

SEQ ID NO: 149748 - DNA, 722 bp, Cannabis sativa
gtgttgacctcgcttttagtcacggacaatgagtctaataataaacgataaaaaatatcatttacgtatagtgataactctatggtatagagttatttttatacttttaaactaaaagtattgtgagaagagtagtgaaaatgtgtttgtttgcttaattttagttagttttagtgttatttgctatttagtaagctaactttaatgtcttgtaaatattgatattattaggtgtgattttccaattaattgtgcttgtttgttgttgagaaaggaagcaaggaagaagtggaacataagctgaaattgaggcagattgctgaagcgaattcaacattctggcagtgacgtggaaacaagagtttcacttatccacatcagcaaattcgtgccagtcactcaaaatacaccagctggctgctgtggaaggaaagagacaaaacctagtgggccaaagtgcaaaaagaatggggcttctcattttgggggagagattttgtataccctaagacccaaacaacaaaaaaaaggaaaactaagtacacctccatcatcctcaaggacgtgagcagctgtcatttttttaagagaagtaactacagcagaatgtacatcaaagaagaaagaagctagaggggaccaagccttagtgtttgacttttcttttaccatttcttaatagttttctttcttttcctcttctattgttgtttgtacttagt

SEQ ID NO: 149749 - DNA, 803 bp, Cannabis sativa
cttcataaattttgtttcattttatttttaatcttacaatttatttttttatgctaataatttaaccgtttttgtcatatgaattttggaattttcattttttctttatcaaatattgagattttttttattaatcatttactatttcttctccactacgagatagatatacatgtatatatatatttatataaaattaattattaataataataaaaaaatagttacaatgaataattaaaatatctaatgcaggtaaaaaaaagatgagagaagagagtgcaacaaaatagacgagatggagatggaggatgagaaaggaagtatcatcaaaatatactcgaagtctcgaatagcattgtgaatgagagaccctgatttatctctactcacaaaaactcttaagcccattcagtataattaaattgtatatcaatttaaattattataatatatgtctagtaattaatctcatatttcttttctaaattagtgtaattagttaattaatctcatatttcttttttaatttttaatactattattaataaggtgacgtggcaatctaaaaatgcttttaaaaaaatcaaatctatttatcaagtttttaaattttactaaattttattctaattattttttgaatatagaaactactacaagtgagatacggtgataacatctactttgaatgtagtggcgactactacaaatgagatactgtggtgacaacagttttcatatgatgagttttctataaatttattaattttttttttatctcggggattctttaattatct

SEQ ID NO: 149750 - DNA, 799 bp, Cannabis sativa
  modified_base (228)..(235): a, c, t, g, unknown or other
gtaccattaattcactagtggaagtataatttagatttcatataaatttgtgcacaacattctagttctaagattaacacttaaaagataaccaacattcgatctattaggaaagtcaggatttcataattgtaaatcatgttcctagccgttcacattattagattgctaaaacagaagttgtaagtaagaatcatcttctttgataaactttaacgagtgaatcannnnnnnnaataacatgaacatgagttcatgataactcaggatttaggtcgatctactattgatcattgttataatatgaatcaggtctttatgataaacgacatattaataaagacaactttattcatattggtcattgtcatatataatctctattatatacagtacattcactttgatgtcatactacatccgtaatctaaaccaagattacttgcaccgaagaacgagtattagtgaatcaaactagcaaccattgattaacgattccataactttaatatagtgctgactgttttattcatagctaagtggatagttatttattttaatttttgtgaaataagagattaataagaattaataaatttttatttattggtagaataaataataaatattatttatagaaaaattgagaaatcaatttcggaccttaaaatatggcctacacgtgtagattcattttacacgcgtacgtatagggtgacatataaaggtccatgattaatttgttattatttttttttggttaaaataatttaaattaaattaagttaattatctttta

SEQ ID NO: 149751 - DNA, 549 bp, Cannabis sativa
agaaaatcaaatttcccttaaaatttgctttgttttgtcccaaaaactaaaactaaaactaatttttcatttaatatttatggtttttatgtcgttttctttattgcttttttgtcattgtttagttaatttcatttccagatatctttgaatcttgaaccacgtggttgggttagattatatttacttctggtcaaaatttaacaccaatggtcccaaaaaccaacacttttccattcctttatttatctttatgtacaaacttgagtttatatgttttgttcaaacacctcataacaaaaagaataaatatgatttcacatttgtagggttttattccttgaattcttttttattgtaaattttttttcattaactataaaattattgcaattattcttttatagtagtattttaattatttatttcaataatttattgatataacactaaatataacactaatctaatttaatttaagagtttaaacaataattaaatacataaataataatctaataataaattataagagtatgtatatacatt

SEQ ID NO: 149752 - DNA, 516 bp, Cannabis sativa
ggcttgggttccgatctttgtctatgtccaaatctgggttcatgtctaggtctaggttaagattcgatctgggtccgagtctaggtataggttcagattcaatttgggtttggattcgagtccagttctgagtttgggtcctgagtgtgggtccaggtctgggtctgggtcaaggtctcggtttggatctaggtcccaagtttcgatcccgatctgggttcgggtctaggtcagggtctgagtcctagttcgagtttaggtccgggtctaggtctatgtccgaattcgattgggtttgggttcgagtccaagtccaagttcgggtcccggatgtgggtctaggtctgggttagggtcagggtctcggtctggatctaggtcccgagtttcaatcctggtctgggtttgggtctgggtgcgagtccaggttcgtatccagatccctatctaggtccaagtctgggtctgggatcagttcccaatgttggaatttattttacgaggatcatttttttt

SEQ ID NO: 149753 - DNA, 980 bp, Cannabis sativa
tataatcaatcattaatatttatatattaatattaaggaaagcaaatgatataggtagctttctataattttttttttcatatttttttaatatttttttagagtatcatgttaatatactaagaacatatgattattcaactaaatttactttttgtaataatcccacattgtttaaaaagtatagtgcatgagtcattacaaatacactataaataaattttttctcatagtattttaatttgtcccaaaatatatattttcttccttgactaattgattaaattagtcttatttaattaatttattataatttttttttaaattgtcccaaaatatgtattttttttccttgactaattgattaaattagttatatttttttttttaaaaaaaatttatctattctatagtctattacaataatatacattttatattttatataaaaataaaatatatttttcatcttaattagtacacttttaaattgtaaataaagtattcttacattcattttaatttgtctaaatatacatggttgatttatcacttgatattgcccaattagatataatcttttttttattattattttgagttctcaaatcaactctatttatttatctaatatatttatatactcatttaataaaaaattacttaatatataaaaaaatacaaaaaaataatcataaattaaatttgattttttaatgattataatgattgtacgagggacgatataattataatgattacgtgattgcacaaccaacttcatacagtatttaaaacagtaagataaataaaaatttctatatataagcaattagtcatatgaatcgtgacctccctttttatcattataagttaaggcatatatttcacaacataatttattaaaactaattatttcatcaaacatttcataaagaccaattttattattagccttttatataaatcccttatttttt

SEQ ID NO: 149754 - DNA, 831 bp, Cannabis sativa
aattattaatatgtaattgttatgccatgatgtatataaatgtatattgaagtaaagagttatgcgttcaagacataatcaggttggactcggtattaatatttatgcgatgtgttaattatgattattgatagttatactgtcttgctgggcttggctcacgagtgctctactgtgcaggaaagggtaaatcggtttctaatcagccatgagtgtaggagttggacgatgaatgtacatgttcgggccacactagaccaagcgggttgaggtctactaatgttgaaacttttgtaactctgttttgccgcttaggtcggctaagggaaaagacttgtaatattttgtaaaacaatttttgggatcccaaaatatgtaacttttgtttgtaaagttaaaattattacaagtttatttttattccgtttttgtttaaagtttaatttccacgctcattttattagtaatcccatttaggggattagggtttcataatcatcttgggtagcgtgcctaaatgttagggcgttacaatggctctcatcagtataaccaaagcatgcaaataataagcataacaaaagaacatattcatttttattttttagaaaattcggcaacataacatctgtattttgaataaacccaaaaatcataacctgcataaatatttgtacacaaaaatatatttagcactcagtgccccaaaacagtccaaaaaaaatacaaagattaagtttttgatttttcaaacaatttgcaaatcataaaaattttgaatatgttcaatgttttacaacacatataaaaattaagtccaataatcaagtt

SEQ ID NO: 149755 - DNA, 812 bp, Cannabis sativa
tcataattttgcattttctgtgcctagcaacatggaacgcggtgtatggctcagtagaatcacaacttagtatttttagtatagtgggacggtttatttagacaccaggaaagtcggggttggtcgggaatttagaatttcccaaaataccgttagtatccattaaattagttttgtgtgggcaagggcattttggtctttttgcccttttagtgttttgtctttatgtggatcaattaaatgaattattaatgattttgattaattagttttgtctgaaataaatgaataaaattatttttatctttcatttttacaaaattggagaaaaaaagaaaagaaacaaaatccaaattttcctctcaagccctctctctctctctttcggcctctctttgagcagcaaagaagtggtgttttccttggtaattcaagctggttttagcaaagatttcgatctcaagttgtcaagttgttggtaagactcttgtagccttttcttaagtttcttgagttttaaggaaaagatgttttgcatgctttgaggttttgtttgatttagttgctgtagttgtttgttgttgaattcagaaacttagtgatgagtttttatgttgatttatgcatgaattggtggttattaggttgtttgagcaagcttttgagttttgaacttaagtttggctcattagtggtaaagtgttgtttagcttggtgtgattgttgtagttgattgctgtggttttcagaggattatttatgcttatttgagtagattaaatcaggttttgatgcatgttagtgggatttaa

SEQ ID NO: 149756 - DNA, 779 bp, Cannabis sativa
cgggtatagacccatacccatacccaggcccagataccgaacctagacctagactcaggacctaaacctagacaagaacctggtctgagacctagactttgattaggacccagatcaggatctagacctgatattgaaaagggactaggactcagaccgggacccggatccacactaaaacctgaacccatactaggacctcgactcggacccaaactcgggatccaaacccgaacataaacttggacatagaccgtgaactaggatccggacctacatgggggacctaggccccaaactcgaacctggaacaaaacttggactaaggatcaggacctagatgggggacttagacccgaaattgggccccagaaccgggaccgagacccaaaactcgaccccatacttgagacatgggacacaaccttgtacccgaagcccaagacctgactacagggacacaaccccgaacttggacacaaacacattcataggacgcaacccaagacctgggacataaactggaatccgtagtaagtgtttgaatccaggatccggacccggatccgtatccagacccggacctagacctagaccgggatccaaacccgatctcaaaatcagaataggaatcggaccaggtcaaggactagaacgcagacctgggaagtagcaggacccaaacctaaacaaaaactcagactagaacccatattgagacttggacccggatcgggacctaaacaaagaccgggacctggacccagaccgggactcag

SEQ ID NO: 149757 - DNA, 718 bp, Cannabis sativa
atcttctccagctggtgagcgcaggtcaaggtagagtggagctcagccgcctcccacccgttggcacgggacttgtacccttcctgggccacaggcccctgcatgacctcctttagggtggccaggcgtacttcccctttctttgaagacttagaaccggatgcggaagtagacatttctggttctgaaaaaaaatcgaaaaatatccagcagttaggccccagaccaagccctaattcaaaaagggaatgggggtcccctaactgctggaaagaggccccctccggacacttgctaaaatagaaagccccaaaaggttttccttgacaagagtcgggtgcaagaatcccaaaggtagtgacattgcaaataagtagagagagaaagggaaaaaagggtaaaaccgaaaaggcaaggtctactctaagccctaaagtggtcattacatggaatgaggatgatgccccagcaagaatgtagtgaaaagaagtaaggtaaacgcaaaaaaggaggaatttaacacatcattcagaaactcaaacaaaactattcccagaagttcaacatccaacccagaaaccgtaaagcatgctatataaacaaacagcaagcaagtgtacgagatgtgaagaacttacatgaagtttgaaggctgggggttggtgttgatcaccggtaaaacgtagactggcagcgtcgaaggaataagagcaggaaa

SEQ ID NO: 149758 - DNA, 572 bp, Cannabis sativa
atattattgagaatataattatagaaaaaaatgtagtatgtgtttgtgtttgattgtgtagagtaataggtatttataatctcattaattgaattatattatttaattgagtacaaattttttatatattatttaaaaaaattctaataaaaagaatttttttattatatctatttaatattagttatacatataaagaaaataattatttattaaaaatatatattaattagtaaacattaaaattttattatattttttattagttaaaataaaaatttttgtaaatttatttttgtacgtcatgctattgaggaaattacatagtatacccactttattttatttgttttaatttttatctttatttttatatcctttaagatataccaacttttatagatgatgtccccattattagaccccttaagttaatgtaaattatatgctacttaagtagagagtgaggatataatggacaattcactcaaaaaaatgggtatattttaataaaatataatatgacggtatttttgattaatagatacaaaaaagtggtatttttcaactta

SEQ ID NO: 149759 - DNA, 690 bp, Cannabis sativa
atgacgtttgcattctggaatgtttcgcccactattggcattagatcgttggtcgttatcagttttgtaccttatgtcctgacttgactgcccagaatgatcttgtccccttttcttgtggtcattagaattggctccacctttcttagattctctcctggcagcattttccttccaaattttgtttcactccgctcagccgtaagagccatttcgacaacttgagcataactgaattgacccattgacacaatttccatatctcgagcaatcattggtttcagaccttccacaaatcgatgtgctcgcactctatcagtaggtaccagatctggagcgaattttgccaatctatcaaattttcgtgcatactctgtaacagtaaggctcccttgggctaatccagtaaattcatcgacctttgctgctagaactgttgagttataatatttctcattaaagacccttttgaaatcatcccaattcatggtatctacatcctttgtttgctccaccacctcccaccagatacgagcatctttcctcaggatgtatgatgcacacttcactcggtcattcccatcgacccttaacatctgtaaaatcctttctatgcgactcatccactcttcagccaccactgggtctatgcctccctcaaactcaggtgggtgttgttttcgaaatctc

SEQ ID NO: 149760 - DNA, 1128 bp, Cannabis sativa
  modified_base (568)..(588): a, c, t, g, unknown or other
tccacttgcagtattctaaaaactctttgatgtaactatacctaagtcatcaacaagacaaaacaaaatttttttaaatctatggcatttgtatcttgttcatagtgtttttgggacgagtcaagataacagagagcgaggggtttagaagatggtacacatgcgagaaagatcatctcgactctagaaggtatagttatcacagttaaaataatattagtctcgagaagccaaaatgacaagcaactgctcgctatcaaagttatcttggctccattctcgacgaggcatccctatgagataaggcttaccgtacatttttgattatgcgttcttctcgacccaataaaagtgggatactcgtagctgtgtaaaaatctcatttatttgacttgatttgtaatcagatcctatgattttagtgataatggctgtaaacatattttggtcagctttgtaattaactgccactatacaattataaatagttgcagacaagatcaaaagggagggacgaaaaaactcttatgaaagtggccttgaaaaaaaaaatactcagaaatctgannnnnnnnnnnnnnnnnnnnntgcagaattttaactgcaaaacaacgtaaaaaaccctgtgttcgtatattatttttctatagcttttattttttatgtgttgaattatcagtttgaggctcatatttggctaacgaaaatttgcattaacacggggtaaaaggcagactacccaagcagaaagctagtttggttttccgagctatttaccaggacttgactacttcaaaatgatatcatggagtccaggcatgaagacaatcactacaacaatgggattgaattagaaggatacggaaggctgtctcaatcccctattttgtgtattctatttatgtaatgaatgttccttcctattgtaaacattgtaagcaaaagagaaaccttccatcatgcataaaggccctataaatagtaatttagcttcactagaaaggggattgaaagaattgctttagatagagatctaagagaaatactcagagatttcattataatagctttgagagaggaaacactttgttctttgttctcgagttaattgtaacaccctaactagca

SEQ ID NO: 149761 - DNA, 582 bp, Cannabis sativa
  modified_base (302)..(315): a, c, t, g, unknown or other
  modified_base (425)..(439): a, c, t, g, unknown or other
tttattgtgtcgtcaacacagtgaaaagtaatcaagattgtgtgattaaatgtattcttagatttattagtacatagggtttagctgataagataatctacaacgaagtttacttgcaccttggataagtgttatgtcctttacaaggcattgatcaatgtaagattgtgttggatgtatggagtatgcatcgaaacggaccgatattaaacttggattagatatgaaaaacttaccgtgatatctatttaattaaatatcacctagttgatcctaggtcaattgatctcaatcctgagatnnnnnnnnnnnnnntcagttgcattatttgtgttcttttaatctattagctaaagttgacgaaatgattcttcctgcgatgtataggttaaaaacatggtagatcaattgagtgggagcgctannnnnnnnnnnnnnntctatagcttctatatggacatagaagtgaaacggttattcccttagagcttcgctaaatagagataaatgatagagcgctcattttagtgattacattagttcactgaaatatcattaataggttgctaagtgttttaagga

SEQ ID NO: 149762 - DNA, 806 bp, Cannabis sativa
  modified_base (595)..(596): a, c, t, g, unknown or other
aggttttttattgtagaactagttttgtattagtttatatttcagtgttttaggaactgatttctcctttattttttttaattataatcggtttgtattattgcgtgttacttgtttgcattcactatgttatataaccggttctattttagttataaccggttttgagttatttcgtgttattggtttttattcattataacaatatatttcaattataaccgatttgagttattagtttttattcatagaaccgattatatttttagttatatctgagacatctacttcttgtgactttccagtgacttttccggtaactttttcagtgacagtgatttttccagtgactttttcggtgccgtcgactttttcggcaaaacttattgttgttttacaaatatgagatttctattttttttttacagaaatatggcataaaaaaatccatataaatgtaaaagacccataactctatgatattatttatttatgtcataaaaaagtaaggggtaagttgaaaaaataccacttttatatttaattaaaatttacctctttttaaaattccgtaaaaccgtatttttgtaatttnnttgttgtttttatgtttttgtgaaataatcccttttaagtaaagaactattttgtaattaatataataattttttactgttttataatttttttttaaatcttaattaatgttaattttataattttattagttgaattatattattgtaacaccctaactatcttaggcgtattatgtgatttttaaatgtactgtgcagctcgttgct

SEQ ID NO: 149763 - DNA, 820 bp, Cannabis sativa
taagtgtcagttagaaatgaggaatgatggatgctagatattattttggtattttattgacctattaaatctatctattcggtgactagatagctgtggggatattattgttcttttatatcaatgagtggtcctgattttgttactaatattttcttattggtataggagttaatctattatttttaaataagtattttgtgatataaattaaaggatcatttataagcgttatcttcctacaagagtcaaagtgtgacttttaaccacccaagttatggatattacatatctgccacggcctagggctcaggttgtgacagaaaaatggtatcaaagcagcgagtttaattacctcggagtgtgtcaccaaatagtttagatttattttaaataataatagtaataagtatcttgatatttatatgtataaggtatatttatattattagcatccaaatctcactaactgattagcttttggttctcagacctaagaaaatgcctctaaaagaaatgaagacacggagaacggttggaaaagacgcccctcaagctaatgtccaacctccacaagctgaattccctatgaacgcccttctcgaagccttaagagcagttcccgctcaacagatggatcttgccgctcgatagagttatcattttcagatctttcatcggatccaagtgcctgagtttgagggtggacaagatcccatggtagctgaaaggtggttgaggctgatgaagaaaaatgtcaacacaataggaacgcctgacgaatatcaagttacttttgttgtgtccaagttagagggtg

SEQ ID NO: 149764 - DNA, 1014 bp, Cannabis sativa
  modified_base (439)..(446): a, c, t, g, unknown or other
cacaaaaactcaaagttgcatgctataaccaaatagaacttaaagaaatcatgaaataagagctttctagggcttaccttggttagaacctcctcaaatccttgctgaaaatacaaaaagcatcagaaaatcctaagtgtttcccctggttttgctttagctaaaagagagaaaaagagagttctttaattattggcttttccttatttttctcaaaaatggtcaattagtcaattatccttcattttagctgaaaaacaaataaaaggacaactgccatcatataaaacaaccacctaagtcaccttgacaaaattactaaaataccccttaagcttaaacttaggcattttaaagtctaggagtaaaatggtcaaaatccataaccccgctcaaactcggtattctatttctttcaatatacatcccactaagaaannnnnnnntagacttacccatgtgattaaaatagtcatccatcacattttctgttgtcgccgagccaaaaattataaaaataacatattcaaatataaatcaaataatacacattgagtttaataaaatctccaaaattgaaaaattataactctaatgcccacaattaaataaattcataaataactataaaaatatcaataattagtgctacttgtctttactaatccattttatgaaatgcggtcattacagtgccggagcctagtgtggtgaaaataaatgttgatgctggtgtaaagaaaggcaatggcaaatcgggtataggttgtgttatcagaggagaaaagggagaagtgttatttgcttcattgactgcattacctagagaacatccaccgctacaactggaattgatggctattgtacgaggtatataaacaggattatagagaaatatacaacggtttagcattgaatcagactgtttggaagttgttcaattaatctaaaaaaaggaagaaaactgccgtgatgttgattgtttgctagatcagattagatctttgttgttat

SEQ ID NO: 149765 - DNA, 927 bp, Cannabis sativa
catagttatacaaagtcacagcgaggtcatccctgtagtgcgtaatcatctcatccatatcaggaggaatctcattaatcttgccccggatgaacagatcagcatacttaatcacagcacaccacagtcactgaaaaacaaaaccaaaataaataacaatacataaccagttattaaagcagaaaaaaataaacaaataaagaatcacagaagtcataggactataaataaccagttatttacctgttgctttgagtggggagcttgtccacaaactcatattcaataggagtatacttcggcacagcataagagcctgactccaaactaatgttgttcctaccatcataaaaatttaagaaatcaaggaagtatggcagtaactcacagtacgctattcaggcaaaaacttcttttgattcgtctttgtattcttcatggaattgaatacgaagatcttcctccttaaaatgctgaagtgaagaaatatccaatggcgttgaacaccgacatgacacggactgacaacatcgtcaacaccgatccaaggctggaagcaaaagttatattgtcccagaatgtaatcggtgaccatgttgtcgtacttgatgacactcggatcacgttccgcctttataaatttagcatacactcccttaagagttgcatcaaaatacgagcatgtcgtcgtcactctcttattaacactggcatcatataatatgctcttcctaagatagtaaagtgccacattcagatgctgcacacaataaacaaaacaataaccagttaaaaattgaaaaaaagcaaagaaattcataaaaataaaaacagacagaaaaaaaaatagccagttaagtaccagatcagtcaattcttcaccacaagtctgtaaaatcacaaaccaagacttgtcatcaatctgag

SEQ ID NO: 149766 - DNA, 528 bp, Cannabis sativa
aaaaaaaagtaaataatagttgactaacctatcatattgataattgtacataaaaaagatataagagtgtaaataggtgagtgatagcatataaaatataagggcattattgtcattaaaattatcacacaaacaccacacttttataatagtaagatatatgagatataaccaacactataagtaacactataactaatactatgcataataatatatatttttttatttttataagaagaaataagtgaaaaaaataaataagataaataaggttcagatataaaagtaaatccagctaaatatatataaaaaatgtaaatgatagttgactgactaattagattgacaattgtacataaaaaaagatataagggtataaataggtgagtgagagtatataaaatataagggcattattgtcattaaaattatcacacaaacaccacacttttatcatagtaagatatattaacatatctataacaaaacgaacgaacgaacgaaggaacgaaactctcgttctct

SEQ ID NO: 149767 - DNA, 1161 bp, Cannabis sativa
  modified_base (323)..(325): a, c, t, g, unknown or other
aacgagtggtctgcgtagatcgcgagttgggtggcctctgtgaacccattggctcttttccaggacggtgagtggtctcttcaggatgagcatcaacatgttctccattatcagccatgtagaaaggtttttctttcgatcaggaggttttttttctaaactattttcacgtaggctctcaatgaaagtaccaaactgttaatgcagattttcgttaacgataatcaagcctatttcgtgattgattttcacagaaataaaaatagtaaaagaagaagaaataacacaaagatttttacaattaaaattctgcatagtccacnnntctatcttattagatttctctgatacaaaactatggtctttttctctaaaggattttttcgttctttttttttttttatgtattctgcctctatttatagttacataggagggcagttaattacaatcagattgatatcccacaacaataatctcctaaaattgtgggatttgataatgtcccacgtaaataaatgcggttattatttaaaaatcacatagctgtaatttatccgcttttactgggtcaatgctaacgtggatcttgatacgttgttaagtgtatcttgctgggtcacctcgctgggatagcaacaattactttgtcagcgagctggagcatttcccatgtctttccgaggttgataatgtaaatactgtcgtttctactattgaaggcacaacgctccatttgacaatcacagttcttggtgacaaggtgaacttcaacagtcaacatcatttgaatgtcaacttctatctgagagagctgactcgatggagtagtgaatctcattgaaagatgtctgaagctgattagtgaaggtaccatgagtatgccttcttatagcaagatggatgcttcgttatttgttgttctgattcatttaactgttatacttagtttgtataatgtacgatatacgctgagtgttttaacagtcaacatgtctcgcctacatcttttcatacttagcgagattggtgcctcactttgtattactgatgtcgtccttatgatcgtgtcttcatatatgaaatggtttctcgctaatatgtgaattaatagttcgtacatccgtgtctcgcttaagactttacagtcaacgagttata

SEQ ID NO: 149768 - DNA, 697 bp, Cannabis sativa
gaatcaatattaatcttgagaaaatattaatcttgagaaatttaggtgttaattgcttggttttgtaatagattatgagagaatactaattacacggacataaagtgatcaaagtgttcaaaatacatttgattatgtgaggacttttaagttcaaaatacttcgtaagccaaattgagaaaagtgctttgtttacttatgggaaaaaacacaatattcaaaaactttcataactcaaataaagtagatatggcgaaaataatggaaaaattgaaatttatacctaaatggtggtaaccattcgatcaaaaagaaaatagatcaaacatatgggaactaagtgagaaaggaaccgtcagagcattaaatgctgaaatgatttgtctcaaagtcttgaaccgccaaaataaaagcatgcaaaatttatatagaaaaataagattgcaccctcacaggcatttaaaaagtcattttctctaaaaaataactttttagggggcaattgttatacttaaattttggctagtaataagaagttgacacgtgtacctgggttgaatatgaaccagcccaagtcgtgcattattaaatataaattaaataacttacctcaagaattaaaattaatagaaatattcaaactcgctactatataggcaatagttgttgggttttgtaccctaaataaaacctattt

SEQ ID NO: 149769 - DNA, 920 bp, Cannabis sativa
  modified_base (386)..(386): a, c, t, g, unknown or other
  modified_base (868)..(869): a, c, t, g, unknown or other
cggatgctgctttattacataaggacttagcaaatagtttggatgataagttgcttgatccacgtgtccttgtctggttggtccacatacattgggtaaaatcaggggaaacagtagtcaacctaggaggggaccccagccttacgcccaggttgacttcgagagctccgggatggaagttcgaccttcaataacttgaatccaactcactatttccttcttttccttagttgcatattaaagtattggaatgtcattccaatggaatggcctttccaccacttcggtggaatgacaattccattttgaaatggaaggaaataccattccaatgcatgatgaaaaaaaacttaaaaatttttttatcaattttttttatacatttnaaattttattccattccattcttattcctattcatattcccattccaattcatattcttatgtttttattcctcccaaccaaatgccacctaagtacggattttattttttggatccaatccaatccgcacaatatctcaaatccaatccaatccaatccgtaaaagcgcggattggataggttattttagattggtaactttttaatattaaattatttaatatttttgaaaaaaaaatatttttttctacgtagcaacaaaataaaataaattataattattttatgtctccaacaacacattaaataaacaaaataataaattcaaaggaagaaaaaaaaattgatgtataaagaaatgtttagtgtttacttttattttaaattgtatgtagaaaaaaaaattaggcttattagcacttttttcccctgaactttgacatgtactaaatcatgtcccctgaactttttttgccgttannaattctccctgaactattaagattattaaatttaaggacttttatctaatt

SEQ ID NO: 149770 - DNA, 531 bp, Cannabis sativa
gtaaaaatcttatgtggccttcggcctctaagttacctagacgtagttgggttagttacaaagtttattaatactttgtaactaactctcctatctttatgctctaatacatcacatataaaaaaaccaagagaaacaacattttgacagaggcagaaaaacacaactcagagcagtcctacagaattagaaaatcagaagcataacaatatataacaaaatcaggtctttttcacagtgaagaaacagattgtttttggggagttttggaggaagcttacaatggagtacgctttggaacccaagatgtggttcagatatccaagatctcaggaagattgttcatgcaacaaagaagaaatacacaacagttagtgcaaaatcttagagaaacagagagaatagagaggaagaaaatcattgtaatatattcaaattaccactcttaccattgtgagttggaatccaagctttgtaactcttgaacattgaagattcatagtggaacgaggcgagctcgaagaggacgta

SEQ ID NO: 149771 - DNA, 856 bp, Cannabis sativa
taacttttcagcctgagggcgaggaccctttgtatttgtgggtaagatgtagggatccctgattcccttaattttagcacttaaggcaatggatgtattgtgtgaggggtgcattgatttcgtagcaaatgttgtggatattaatagggaaccactagcgggaccggtgcatgtcccagtggtccgagaatttctagatgtgttcctcgaagagttatcggggttgccaccaaaacgtgaaattgattttgagattgatctaataccaggggcaaagcctgtatcgaaagctccctacaggatggcacctgcagagctgaaagagttaaaagttcaattacaggggatgatggatttaaaattcaccagacctagtacttcaccttggggtgcaccagttttgttcgtgaaaaagaaagatggaactttaggaatgtgcattgattaccgggagttaaacaagttgacagtgaagaacaagtaccctctgccaagaatagatgatttatttgatcagctacagggaaagactatcttttccaagattgatcctcgggctggttatcaccaactgaggattcgggaggaggatattcccaagacagcttttcggaccaggtatggccattatgaatttctggtaatgtccttcggattaacaaatgccccagcagcatttatggatttgatgaaccgagtgtttaaagactttcttgatgattttgttatcgtctttagtgatgatattttaatctattcagattcagaagagactcatgaaagacatcttcgaatggtattacaacgtctcagggagcataagttgtatgccaagtttaagaaatgtgaattttgg

SEQ ID NO: 149772 - DNA, 532 bp, Cannabis sativa
taactggaacaaaagtaatctcctcttttaagaatctgcctatagatatatagctcctatttatataattctcatattttaaagtgattaaggtgaagaaattgagaaaaatagattatttatatattaactttgaatcattttcaagttagacaaatttaagtaaattactttttgagatatacaaaatttattttgacactcattaatattaggctaattaagatttttaacatctgaattttgacatgtactaaatcatgcactttgaatttttttggtcattaaaaattttctctgaactattgagattgttaaatttaaggatttttattcaattttagtaagaaaagtctaacatggatgaaagttcagaggacatgatttgacacatgtgaaagtacgagaagaactatttggtaaatattaaaatctgatgagcatgatattgtacataaacaattactaaattaataaaattgaatgaaattggacaaaagtccttaaattcgataatctcaacagttcagga

SEQ ID NO: 149773 - DNA, 812 bp, Cannabis sativa
gattagctgttaggaaaaaattaaaatcacggtgtacctcctcttgttgcagtatcgccttcaatgaagatctgggagttaacggttcttgaaagtagtcgttctatgtggttcccaaaggttcgactcaacgatccccttcttcatcaaaaaattcaaaaggaggaagggcctcgtttcttccatcgattttgttttcttcacatcagaggaggaagggcctcgtttcttcttcttcacagtcactttttcagttgattttagcttaccctgctgcttagatcttgtcttagccatggcaccagctcagggagagctggaaggtcgaagagagagaaagctaattttaattttaattacaatttcctactctttgatttcttgaggtgtaagaaaagggatttttgcatgaattgtgattttggctgctgtagttgttgttagtgttgaatattattttctgaagtttagttatgttgtattgtgttgatttgagcatgatttaatggttgctagtaggtttaaccaagttttgagttttataactcaaactctgagctttaatggtgtttttcgattctgagcatgggtagttgttttgttgtttagaaatggtttattggggtataatataaaggtctggaaattttgagaaggtttggaaacgatttggttaggctttgattgttttttgggttttctggtaaaactggctaaccggtccgattacccggattttgcagcagggtatcccaaaaattcagctcgtcatttcgtgctagtttcaagtttttggttggttaattccctgc

SEQ ID NO: 149774 - DNA, 772 bp, Cannabis sativa
agttcaattccctgtggttcgacctcactcgtgtgagtttactacttgattacgtgcacttgcgtattgtctataaattttgtaacaataagctattgttgttggtgtctcacaaacatcccaagttgaatatttttttataacacccttgtacaagtcatctttcatgcatcccacattttcccaaccatcagaaacttcaactaaatactgccaaacttgagatgtcccaatttcagctctcttcattacattagttgctccattgttgactccgtcaattttcttttcaatctaagaaatggtttttgtatggatgagcctaatgcatggttgtgatgggttctaaaacacttagtgacccacatactaatttttttgttcaagttgattctaaattctgctcgacaacccgtccttgttaaatcacgagcttcagaacacatgtttttcatattaatatattttttttctctgtaaccttcgttcaaacacaaccaacttttattattaactataagaccttcaattttttttgaatatattttcctctttattttttttctaacaccaaactcaattatacttgaatatatcatataaaaagactctgcttgctctatacttacaaactcttttccattgaaatctgaatattctatatcttcacggtccttgtgtatctccaaaaaatgaagcaagattgtccattgtgcaacatcaggttgggccaattcttcgtttacatgtccttcctcatcctttgtctctt

SEQ ID NO: 149775 - DNA, 847 bp, Cannabis sativa
aaatataatttaaaaattaaaaaagacaatttataaaaattaaaaaaaaaatcttttttttttctcttttctttttcgttttctttctctttctctttctatttcttctcgatggaaccccccctctcctaacccttcttcttcttcttcttctgccattcttcttctttttcctctcgacaaaaccccccctaacccttcttcttcttctcgacagaatccccaggtcggtgcaacagccttcggtagtcgaaatggaccctatcaaggtccctggccctcaaaaaccataacactttctttcttctctctcccaagccccctatctctggtttccctctcagctgcgtggcgccgctactctgcccattcgggccagctcccgctactctgcccattcgggccaacttcggccctcccctccctagtccgattgaacaggaccacaggatttctcaacctcaaaatactcttctcttctttctttgcttgattcaatagcaccatgggacttgtataatttttagattacttttgtttgatttggattaccatgattgtgtgatggaaaatgtgatgtaaacgttgaattcgttttaatagtgtgaatattggtttgaaggttcttagtttggattatgatatggtaatgctcataacctgtttaattgaatatttcttaattattttgaacatgttcccgtttttccttgtttggtttggggactccaaagatttggaatgatctgtctatgtttggggggtgttctgttgagaagaagaagaagaagggttaggggagggggttctgtcgagaagaaagagaaagaaaaagaaaaagagaaaa

SEQ ID NO: 149776 - DNA, 879 bp, Cannabis sativa
  modified_base (26)..(45): a, c, t, g, unknown or other
tttacataaacctcgttgattagcannnnnnnnnnnnnnnnnnnnaaaaatcacgtaatacgcctttgttagttagggtgttacatcaaatctccctatctcattcttcataattttgagccttatagtgaaagactacatgctcaagtcacgtactcaatcatagtgtgtaagactgtgaaaaatctaatacctaaaggagtatcgagctcagatcttgataatactatgtggcagaaaagaacaagggttagagatctaagtggaatgagaaatattattctgctgccatcaatgtaaggtttcttaactctatatgtgttttccattgttttagagaatttcatatatttagggtgttatttatatgtgttttccattgttttagagaatttcatatttagggtgttaaacaacatacatgttagtaagtctagatcctggtaaaataattcccaacacaaaccaccacgagtgtttccagcgtacttttcctcactcgcacacttcctggaaaaattttctaggaggtcacccatcctgaaattatcccaggtcaaacacgcttaaccgtagagttcttttgtgatgggctactgaaaaacaagatgcacctattgatataggtagtactaaccaatctatttaagccctcttcaactatgtaatcacatatctacacagtctcagaatcatcacacatgaccttccccaggcgatatgggattgcacagctcccaatctttccccttcggatcacggggttctgactgtcacaatcacccccccttttgggggtctaacgttcatcgaccacatttctggctaggtcaaggctctaataccatttgtaatgtcccccgcttcaagcctccattg

SEQ ID NO: 149777 - DNA, 823 bp, Cannabis sativa
cttaaatattagaatcacttgagtgtatcaatgatctaaaataagaaaggatgtgaaatgggattgttgattccaacatacgacttgattagtcatgggatctaaagaatttattaatagtcataattaatataatcaatcgggtgcaagattaattagtttcaaaacaatagttttgaataaacaaatatctaatattgagaatattaattgattaatcaaaagatgaacctaaaagaaataaaagaataaataaactatatatactgagaattaaattatgtatatttatccaatgatgatgtggtggtcttcaagatctgtaactacattatgtggagggcctcattcacaagaattagcttgaattgtcgaatgagatacaatatctataagagttatagaacatacaacatttacttttagtgtaagtgggagattattaggatttatgctcttaaagtaggtaattaatggataatatattacagaatatatgaatacaattataagataaatgaatacattaattaaagaagtacaattaataaatatttaaaaattccttattcatatggacaaggtataatcttgtaagaatgtacaagagaattaagattatacaatatgaataaaactagtcaatagtgtattaaagtaaaaggaatcattaatatggaactaataagtacgatttattatacactatactctagtgtgtgtaattttcatttggatcacatatgtaaagagcgcttagtttaaatttggtaattagtagataattagggtttaattatgaaaattatttatggatatttaa

SEQ ID NO: 149778 - DNA, 817 bp, Cannabis sativa
catttacaagtagctaaatattttaaggataaaatacattgaaaatgtagaatggtaaatttgtccctactcgatgtatatctgctatagaggatctttgatatttggattgaaaaagaagataatttatagcgtatctatacttggtatagagcgttctatataatcaggagtgcaattctgaatctataatggagttaggaagaattaataagatagagaatttactcaataaattctagaactacttattgggagcttgattatataggctcatagtccccacactagttaaaataatattgtcttgtagactcaattagttgattttattaatcaattagaattctaaaaaaggctatgtcttatttatgagttttcactaagagagggcttatttgagaagaaaatagattttagggtttgtttattaattaagagactttcaaaggtctaattaataaataagttaaatggaaattttatttgataattaattataattaataaatagatagaattcacatttatagaattagaattaaaaaatggcatttgagaaaagaaagataagtttcaaataaaatggtgaaattgaaacccaataggccatgaggaattcagccataacggtttaaataaagccaattttatctttttctattctattttaattcttaatttaaccttaatagcaaccctatatataaattgaataatatgactcttattttctaacataataatttaacctaattgactctttgtcaaataaatagaaaataaagagagcctctttcaattttttttttttttt

SEQ ID NO: 149779 - DNA, 565 bp, Cannabis sativa
  modified_base (52)..(61): a, c, t, g, unknown or other
  modified_base (222)..(226): a, c, t, g, unknown or other
tttgggccttgtgcgagagttgggggccaatagaagtgtgtacgacatactnnnnnnnnnnccccctcacatgaactagcccaattgtgaaggcccattaaactgatttgaataactgtgtcgggttaattaaattagtttaacctaataaaattgattagcaagataattaatttcaaaataaatggaattatttttcattcgaatattttgaaattaatnnnnnaaaaacacacttagtttaataaaactaatttaagataaactatatgtatgtttcttgtctttaattaaatatatcattataactaattagattcttcagaagcttaattttaatatttcattaaatattcctatttaagttgtaaattggttatttcaaactaatttttttttatcaacttaaatttaaatattttttttaattttaaattaagttgaagatcaacttaaatttgctttttttttttaaattaagttgaagaattctaggaattagttattgagaaattcttaggatatttttttttaagttgaaagtttgttaaattttggatcaact

SEQ ID NO: 149780 - DNA, 2116 bp, Cannabis sativa
  modified_base (1277)..(1281): a, c, t, g, unknown or other
ttggacatccataaataatatttcatagcactccctcttagatgtccataaaaactgtctcattaaaaattttgctgaaaaatttggttaaaagaaaaggagtgcagtgtaaaccaattcccccttatttaggcattcatggagatcttctaatcgacgaattctaatcttgtgagctatcttctcaaatattgatgttggtaatgactttatgaataagtctgcaagattgacacttgattgaatttgttgaacaccaatgtgcattttcttgaaatgtataaagcagaattttgtaaaatgtgttttaattctatctcctttaatgtaccctccttttaattgagcaatgcaagtagtattatcttcatagagtactgcttgtgttgatacttctttattgagtgtaattcatatgtttcccgaatatgttacgtcaattatctcactcccagacattctctacttacttcataaaatgcaagtatgttaatgtgatttaaaattgcatcgttaaaaatcttgtcaggaaaacccagtgggacaaaacctgagctaagaaaaaaagagtacaatatatatatatatttcatattcataattatttgtaagttgtctcgttaaaaaccttgccaagaaaactcagtgggacaaaacttgagctaaggaaaaaagagtttcacatgaatatgtctcccccttctgcatatatgatccgcaattattttggtgataatatatcttataagattattgttatcgatcacttttaaaatatcactgtatattatctatgatcatatgttttctataattcttccagagtgtatgtgtggactttcatgaggggttcatgcaacatcaatatttatctaactaattgtatcattcatgtgtgtatacaactttgttcatactaaaatttaaaattttaagtagatattgttatacctgaaattcggctaccatctaagtgggggacacgtgtcaagataaaaggaatatggatcgatgcaatctctttttatgggatgactcattatatgcgtaagtatcagagtatatttacaacctgctgactgtaaggtcttgtgcgaggaatcaatatacaaactgttgcttagtatattagcgagaaactatatgtcactgaatgcgaatagcgaggcatcaagtacattacatctaggaagacaaaagcgatacatgtaaactgcagaagcagttattgtataatgcacaagctaagtgcaacagtcgggttggctcgagacctnnnnngcgaggtgcctatctcgctttgggaaggcttccagtaacttcacccagctaacttcagacattttctctacatacatcaatctcttgcctataatagaccaacaatgttatttaaacggccccaagaagatttaatttttgggaagaattctcccgagagttctatatttagttctctacctcaagataaataccttcacgactggaggatcttgtcgaaataaagtaaagacaagatgaacctttgaaggactacatccaactgttcatggctgaggccacaaatgtcaaaggcctgataaaataaggctgatatacaaccatactcagaagcatcctaccgctgagtgacttctagaaagatattaggaggatctcaacaaacaacatggaagagttccttgagcaagctaatggattcataaagttggaagaagttgtccagtaagcccaaacaagagggcaggtcaatggtgaacaaacacagagcctcatagaaccccaagcattgtccaacatgccaaccagtgcagacagtctatgttaattctccaacaatgagaatggtggaggcaagtgcaacaacgatgactctgaccaacataatggaaaaagagggaaattcaacgattcccttactccacgacgtctaagggagaaggaagagaagtgcacatgcttcactctcctaccaaaattcccaaagtaaagcatgcccagacaggccccgcagggcaagtcagcaataggcagtcacaaggctcgactccatcttcaaaggcaggccttcacttgccaaagctggcaagaacatgacctgtaagatcctggcagg

SEQ ID NO: 149781 - DNA, 635 bp, Cannabis sativa
aaacttcttattgcctcgtaaaacattaaagaatggaaggcatttatctgttgactttgaaatgaatctgtttaatgctgccattcttcctgtcaaagtttttacttcttttggcttcgttggtgaggacatctcgtttagggtcttgattttttctgggttagtttcaattcctctcgcgtttactatgaaactaagaaatttgctcgaggaaactccaaaagagcatttctttgggttaagcttcatattatactttccaagtacttcaaagcattatgtgagatcttttgtgtgatcttcactttttattgactttttactagcatatcatcaacatagacttccatatttcgtccaatctggttctcaaacatgccatttactagtcgttaatacattgctccagcattctttaaaccaaatggcatgactttataagaataaagtcacatatttgttacaaaacttgtatgctcctgatcagggatatgcattttgatctggttatatcaagaatatgcatccataaatgtcattagatcatgtcatgtagttgcatccactaactggtcgatcctgggtagtggaaaatagtctttaggacatgccttattcaagtctgaaaaatcaat

SEQ ID NO: 149782 - DNA, 1025 bp, Cannabis sativa
ttttgacggcaaaacctactaaacccaagttccattttgctctacacacttccatccaaaaatctcagttaagtaccatattggaatgtccacgtgtacacaaatatacacgtggaaaatttttagtggtccacgtaatattatttattaaaattttataaaaaaaataatttaattaaaaattataaaaaatattttatatattttttttttctttctttctcttcttcctctttaaaaaacggaacatgagtttagtaggttttgccgtcaaaattttagtttttgtggttaagtgttaaaaaatttaaagttcgggtggtttagcccaagttaacaaaatgcatggtgcattgggttctgcttatttgatattgataccgtttcgatcgtttgtctagtttttcacaataacaaagatccatgaagtcagagaattcaaattcaaaacttttcatttctcaattctgacttactcggaaatgaagaattttgagtctctcattttcgcagaacagaaacatctctgagaactggtgaccaactttgccagaacataaaaactggctaattgatgtcaaaatatcacttagaaatcttaaagtacattccttgaacattcttacacttaccaagcgtccaggttgatgtcatatgtacacctaggtgctgggatgtcaacctgggcgttggatgtcaacttgggcggtgggtcatgaattgccttcagtaaaatagccataaatcactcaattttgatttgattggtgcgattcaacttgcatttcgaagacaattcaatgctctatcaagtcagctctcacaattcaatcataattcgtaagctatcattgtcaaaattcactctaggggagttacaaaaataagctcagggttacccgcagcaggattcgtcaggctccgaataatggccatcaccaccaagagctaatttttaccgttagatcatcatcaacagtcaaaaacatattatttgtattttttttctatttttgtgggcctcc

SEQ ID NO: 149783 - DNA, 708 bp, Cannabis sativa
attgaggacttggactagaaactaggcaccagaactgggatgaagacccaaaactcgagagacgggacccaaccctggacccgaaaacaaggacttcactatcggaacacaaccccgaagtcagacccaatcctaaacttaggacccggcccaagacccggaacccgaactagaacaagaccaggacccgaaccaagacccggaccaaaaccagtcccaaacacaaacttggactcgaacccgtaccttgtgaccaaaaatttgaatcgaaatcagaagtagactgggacccgggaacgggactggaaccataaccagaacttggacttagacctagaaccgtaaccggacttaaacctagacccagaacagtaaccggaccaggtgccagactctaaccaagacctagacccgaatcgggacccaaacctagatcccaactcatacctagactcagtgccgaacctagacccaaacatggaaccagactctggacaaaaaattgggggcgcgacctagaactgcaccccagtctcggtcccgaacccaaactcacacttgggacccaggacctaaaccggaactaggccaagacaggtgaccgggacaagatcagggactcaaactaggacccgaacccgaacccggaccaggacccagacccgagagacggaactggaacctgaacaagaactgcaaaaccaggac

SEQ ID NO: 149784 - DNA, 522 bp, Cannabis sativa
tccttcttcacccgatggagaacagctcgcagagaagtcctctcatcttgaagactgtttacctcagcagataaaggtctcaatgatctcctcaaaatggtcagcaacctccagatccttagtcaacacgatgattttcttctcagcaagaaacagcttcttgttggcttcacccaactccgaccgaactgctccggctttcgccttggcttcttcatcatccttccttgccaagttcgcctccgccttcagggtgtcggacagagctgcgttcttggaagcagcagatttagcccaggagtaagtgtaggcccactttagactggcctgcacaaaggaaaaactttagcatattgagctaagtgtggaaaattaaagggaagtatcgaaaaggatttacgctggtgaactccttcaacactctgcccaccaacacatccaaagaagactcattgtcaggaccagccagttgctcactgacctcaggaaccagccggatcatttaatgggccagcatctcct

SEQ ID NO: 149785 - DNA, 825 bp, Cannabis sativa
atctataaattatattttactattattttaataaacgaattaaaaatttaaatatctaactttaaatcttctctaatttttaaaactcatagaaactccaaacctataaattattatatatatttatatattattctatatatctcacgcttttttttcttcttcttttttctttttctttttttcttattttttaataaagattgttttatatatatctctctcacagtatttcttcttcttcttttttctttttatttttttcttttgttttttaatgaagattctccatctacccctaatcctatttattattttttttctcttttttcttttatttgctttagtaactattaatttttgatgtatgcatgacacctcaacagtaacatcaataaatagcttcgagacctcaattttcaatatttcttcataatttagagacatacagaccttttttctttatgtcgacaatgtcttcacattattcataatttactcattagtatgaattatttgatgtaaaaaattgattttttaatgataaattcatgaaaagtgatgaaaagcctattgtaactgttttttcctcattctcatgtgatactctctattcttcattatatttctatcgctctttatatagttatttttcgtacttttttctcaaaaaaatattttaaatcaaactttatatatatatatatgtataaatgtatatttacatggaacatttcttaatgagtaatactcattgatgagcactaaaaaaaattaataaggtaacaatctaataaccttttatggtaagtttccaacaattat

SEQ ID NO: 149786 - DNA, 742 bp, Cannabis sativa
tttattattatttattttatatcttaaattaaaatagttgtaataatgagttaattgttttctattttagttgtggtaaatcgattcacacatcatatttttcgtaaagcttggaaataaaagacctttatatcaaatttacgaatccaacctatatataaacacactcaaatttggttatgtgagttttggttaaaagtatagtaaattacaatatatgcattatcagatacgttacctaattaagaaaatttaaaaaatttaaaaaatacgtttatatataatcatatccaaatgacacaccaatgtaacaatagcttaatgttttttcttaaagatcaaaatctcaaaccttatttaaaaattttaaaaaatacatcacctaattaaaaaataaataaacatacatgtattgcacttaaatcacctaattaaaaaaaattaattatacgtgcattgcacgtaacatcaacctagtatatatatatccatcaacctaatatggctcgtggcagaggagctcaaactcgtggagatcgtgaagttgagaatgcttcaaacaattcaaacatgttctctgttattggacagaattattgtaatgaccgcatgttagaatatggattagtaaagataatttgcattaattgttgatattttataattatttacgattttattatgttgtgggtcccatttttaaaaatcggcattagagtttataatttctcaattccggaga

SEQ ID NO: 149787 - DNA, 510 bp, Cannabis sativa
agcatgatttttgagtcatttatgcaatctgaatttttggcttttgctatgggattttgatgcatgaaatgcattatttgagcatctattatttgctaatgatcctataggttatattgtgagtttagctgtgaatttgttgttattgtgggctgagaattttggtgaagcttttaagctcttgaggttgggttcttggagaatcttgcccttgtttggagcttatgttgtttgttgtttgaatcttaaattagatgcatttgagttgtgatttttgagccttaatatgcgtttttccctctgtttggttggggttcaaaatctaggaaaagttggcatgtttaggccttaaaaatggagtttttgggtgctctgaacccagtcgtcgcgacaggatttttggccgtcgcgactgggtttggcagtgagaaaatattttttcctgattttgtttttgccataacttttgacttgggactccgtttgggacgttctttataccgttggaaa

SEQ ID NO: 149788 - DNA, 530 bp, Cannabis sativa
aaagtcaaaatgtcgtaaaccatgaagttgtacgaactattgcagagacaactacaaagttttgatcctagattttctatgtatcttctacaacaagtcaaggacaaatgtattttctacaatggaaaaccagaaattaaaaatgcaaagttaaaagaggagaagattgaaaacttactcactgtttgaaacctaaatgtagtctagatgaagctgctcggatgcctccgagaaatcttatgacagactcgaagaaaattccttttttgttctggatttgcttcgtggagaatatggtaaaaatgatttctaaagaagttcctgccttatttataggcaatctggtgaaaacgggtaatcatttcaaaaatcccttagacgttttgatttcccctaaaaaataaatattgggaaataaaaagcaatcaagtgcctcaaataaccgtcaaagcatgcaaaggaaatcgtgtttcaaggcaataattaagtcagagcagtaattagccgaaaattgaagagacgcctggtca

SEQ ID NO: 149789 - DNA, 792 bp, Cannabis sativa
tgcacctgtactttaggaaggtggaaaacttcttccgcctctgtccgacccaattcactcccaagggcatcaagtatctctctgccctgttcattctctacgcctccgagaagtgggatatgccctctccccgtgaggttagctagttttttggacctgaagtctacccccatgcaaggcaggtcagggtacttttatttctctcagccagactacaagcggttgacgggcatcggggataagatcgttagcaaaattgggcattttgttgacgagtatttcatggtggaaggcattggcaccacctacactcagttccagcagatccatgtatatcaccgcccacccttcacacttgctcttagggatagagctcaaaggcttgctcagctggcgggtgctgcccggaatatcactttgttgacctctgaggaaaactttgtggaatacgggctttacccgaaggatttcatccctcagcctgtgaaggagaaaaagaggaaatctggttctggccgggctgagggagctcatcaggagaatgaaatcattcaacttaagcgtgaggctaagttgaagggaggtgcgggggcaaaacaatatgctcatgagcctctggatcctaaagatgaggctgaggaagagcaggtggctctgttcaaaaggaggaagaaacttactgccaagcacaggcatgttgaacatgcaattcgaatcagggagcccagtctacctactcggccatccactcctgtactaggaaaggggaaagccgtcctggcggagataaga

SEQ ID NO: 149790 - DNA, 559 bp, Cannabis sativa
aagagagagacttacggaggtgggagaggagacctacaccggttcgaaatcgcatcccatgttcgagacctttagagctgaggacgcacgagagctgttataacacagagcacgagagactgagagagagagagagagagagaacgcaagagagaaagagagagacttacggaggtgggagacctacgccggttcgaaatcgcagttgggagaccttcagaccttcagagaaagagagggaaagagaggcgctgttcgaaaatgaaaatgaaagagagggaaaagttggagaccagttcgtcgatttgggggtaagtattgaacaataggaggatttgcgtcgttttctcacactcgcaaaatctttaccgtcggttttaaaatgccacacaaagcattcgtgaggcttttaaaacgacgttaataatgaacaaaatttttcaattttttgacttttaccgtcggttgggtaattagtgagggatatataaccgacgcaatttatttattttttgtgacattttacaaatgacgtatatattgaatatggtactattca

SEQ ID NO: 149791 - DNA, 726 bp, Cannabis sativa
gaatacaccctggagtttgatcggttgtctaagtttgctggtgatctggtgcccacagatttcaccaggaaacagaagtatgtgagaggactgattgctacaatcagtccagacttgaagattaccacttcacatgacactttgtacaacaaagtggtagagctagccttgattgctgaggaggctaagcaacatgttgcgaaagagaaaactgtaaaggatgctgccacggcatcgaaccctcctgctagtggtaatgtcagtaaggggattgacaatggcaaccctgatcacaaacggaaggctgaggcttccagagcatcaggaggcaatagaaagttttggggaaacagaggtggcaatcagggccgcgggtcttcattctgatcacatcccgagtgtcctaaatgcaagaaaaaccatccgggtgagtgttaggccaatgcatgtttccagtgtggtgtggtgggccactttatcagagattctcctcaggctaagaaagaaaagcctaagaagaatactacacagcacccggggcgactttttaccatgactcaggctgacgctgtccgtcagttgtgacaggtcagttgtctattaatggctgtccttatactgtgttgtttgattcgggagcttctcactcttatgtgtcgagtagagttattgagagttttcataagccatgtgatatctatgcttcagggtttggaaccctgttac

SEQ ID NO: 149792 - DNA, 626 bp, Cannabis sativa
tttttatataaattaaaattctgtccttataataaatttttatatatattttttttttttaacaattagatgatgaggcctcaagctagtattgggccttaagcttataataaattattaaataattatttttttttacaataaaatggctcttgagctattttctaaaaaggcatttagacatgagtttaatggtggttgccctaaaaagttagtgaaattatcttatgagattctcaaaaaaatgtcgaggcttgccacttgcaataggggccatagctagtttactatcagaaaaaagaaggttcaatctgaatggaaaaaagttcttaatgatattgattttgagttcaaaaaaaatcctcaactcgtaggaatttttgaaattctctctctcagctatgttcatttgtctttccacctcaaatcttgctcattgtattttggaacttttccagaagattattcacttccgaatggaagactgtgtactgtcagctatggatttttgagggttttgttcagttagggaaggaaaatcattaaaggaagaagctgaaggaaaatgaacgtaatctttcacatttgtggaatccaacatttcctctcttctttctcaccataat

SEQ ID NO: 149793 - DNA, 804 bp, Cannabis sativa
aagtttaataattatttttgaaattcttccatattcatcatattgttaatatacaaatttgtctatttatatacgtaggcttattattgattttatttataacataattagcacattcctaatatacatgatttgtctatttatatacgtaggcttattatttctaattagtttttaaaaaaattatgttatcttttttgacaaaaaaaaaattattatttttgaactaattaaatgtaaataaataaaaaatgggatttaattttttttttttaaatagatagggatttaaatccgttaagtttgactgttaattaagtttgtcactatatatgcacatatgtacacgtatcatttttgattggtccaaataattttaataatttaaatattacaaaaattgttttaaaattaaaaataactaaaaaaataagttatttctcttcctcttggatctctggttcatccaccattactatccatgatcgaccagcagccagaatctatttctttaatccaaatcaacaccaaaataaaattagaaaacaattacattttcatatctaacctaaaaaaactcaaatcaaataaataaaactgtagatctcagagatcaaaatggggacgattagtattgtagtgtggtgctttggtttattgctgagagaaagagtcaaatcagattggagagagaaaaggcgttcatccatggatttggattttaggatatttttttgtttttttttttatttatttatttaaaaataaatttttatattgtttaaattattaaaattgttaagg

SEQ ID NO: 149794 - DNA, 949 bp, Cannabis sativa
  modified_base (877)..(898): a, c, t, g, unknown or other
agggtacgttgcaagtgaaatcttctgtccaggtcatagaatctattttacgtgccacgtagatggatgccatgtcatcctgtgaagaaattgggataacatttgcccccaagtctgcgcaggagctgttggtcgcacgtggacttattcggtcatgaatctgatcggatgggtgatgtgtgtccgatttttatccttgatttgatgtgactaacagagtgtctcttcgctggctagagcatcaaatgccttatcttaaaagttgtaccttaagatatgcaatgacagttgaatgttatagcacgtgtgacatcaggctttcctagtgagtactaatgtttctttttggggggaaaacccaaaaattaaaattttttaattatttatcagcccttttcatcacctatataaacgataaaaattaatttttcacttttttagctatttttattcttgcgtaccaccagagaaaaatccttcttttttttttctctcaaatttttgaagaacattttactaaaaatcaatctctgaagagcacactcaggaatcagtgaatagtgagtaagttatctcttcttttcttttatgcaatttccttaaaatacatgcattattttttgaactttttgctgtaaattttgggttttttaatttgttcttgactgatctgagacttagaagacactatgttttttttttttaacttctgactgatatatgtactgatccattaggtttctaatttctcaccattttggccagaattatctaaaattatccatttgtaggcttttgaattttagtattcttttaaacttctaggtttagggatatcattattagaatgaaattcttgttgggattttatgccctnnnnnnnnnnnnnnnnnnnnnnattagatttactaattaataaaatattaaaaataattttatgttgcatggt

SEQ ID NO: 149795 - DNA, 554 bp, Cannabis sativa
ttcatactcactgggcaacgggtcaaaaaacttgtctaagaattcatattcagagatactattgtaagagctctaagaaaatggattattttccttgttcttgcgtcaatacaaaccaagaggattaggctattactcaactgctttgggctgaacctctataaaattctcgtgtcttgatttatttcattatattacatatacatcatactacttgtcgcttacaatctagactcactgtcgtttgccaaaagcgaggtcagcattttgatgctttcattgagagttgaacttaatatcgttctcaaatcgaatcgcaaatacaatggttgtacaaactcgtagatgcggggttgatttggcgaatccatagacagtggatcctgcactgcagaacccaaggaacagaagggttcaaccaaccacgattctcggacaaccatcaaatgtaggtcacaatgtgaggactcctgtgagtgaaatcgcgcctggtgtgcaagagacttggaataccagttcagcagctaatcagggcattgttgggttttatgccc

SEQ ID NO: 149796 - DNA, 1736 bp, Cannabis sativa
  modified_base (1444)..(1457): a, c, t, g, unknown or other
gggcccagagtacctgaggtagctcatcaacccatctgcctttggcagtgtctagcttcttcttgatagtatcctttacggttttattgacggcttgcacttgtccatttgcttgaggcctggatactgacgagaagcttttgataattttattcctctcgcagaattcagtgaacaagtcgccatcaaattgggttccattatcggatactatcttcacgtgaattctaaacctacagataatgttcttgacaacaaagttaaggactttcttccaggttatggagacaaggggctcggtctctatccatttagtgaagaagttgacttctactaccgcaaccttagctcctcctcgcccagtgggtaatgccccaattaggttgatcccccatatagcaaatgggtagggcgaggtcatcattctaagttctgttggcggtatgcggggtacatgtgaaaaccactgacacttatcacatttcttgacaaactcgtgtgtgtctttattcatcgttggccagtaatatccttgtctaatgatctttttggatagactttgtcaacccgcatgatccccacagaaaccttcatgaatttctctgatgatttcatttgaaactgcaggaagaacataccgaagtaggggcattgaataccctcttctatatagtttgccttcgaccagtgtgtagcaaggcactgaatacaatagtttttgtgcctcgtttttgtcatttggaagttgtctgtcgagtaagtaattaataatatgtgtcatccaagttggagttttgttctcttggaatttgttcgattttaaagtaatcgaatccttccaagttctttcgaactttctctaaatactttgccatttttaagcctttggcctagtattctccgaggacctagttcacaatcagttgcgaattactatgataaatgagattttttgactttcaatgcctctgctatctttaagacggcgatcaaggcttcatattcagcctcgttattggatgcgtgaaattggaacctcagagcatagtgaaacttaaagccttctagcgatattaacattacccctgcacccgaaccttgcttgttggatgccccatccacgtataacctccaggtttccttgtctcgctgatcaggtggaatttcttctagagttataccttttatcaagaagttagccaaagcttggcccttgatggatgttcgaggatggtatgttatgtcgaacttccccagttcaatcgaccattttatcaatcttccagaagcatctggttttgataaaacttgtctcaagggctgatcggttaacacttttatggggtgagcctggaagtatggtcgtagcttacgagacgcatggactaggcacaatgtgagattttttagagggggatatctggattctgcccctagtaacctnnnnnnnnnnnnnnaaataggttgctggtgcttgccctcttcttgcactatagctgcactaatcacatctttcgagatggctaaatagagaaacaacatctctccagttattggttttgccaaaactggatgcgttgcgagatgcctttttatgttctgaaaggcctcctcgcactctttcatccactcaaactttttgttgccgcgcaatatgttgaagaacagcacacacttatcatttgacttcgaaatgattctgttaagtgcagccattcttcttgtcaaggcttgta

SEQ ID NO: 149797 - DNA, 518 bp, Cannabis sativa
gttctctgcgagtgcgattacttcgtcgcctagtattttttacctaggggttatctgaacgtgtggttggtactcgtggaggacgtcgggtcctgacccttccattgatttcagcctgcaaagcctgcatttgatcgtgtaaggtcatatacttggatgtggtcaattggatgataccttcagacaccacaataggagtgataggcaggaactgcccccatagtggtcaccggtgtcgatgtttctccaacatgagcggcagtttcagggaataaattgagaggagtaatggttgtccgtcccactcctccgttgatggtgtggacaggtgccgttccattacctgggagtggaacattcattgttccaacattgattgatccagtgttgttatctccattcacctggttttcggccataatacttttcctccgaaatcaatagaatattctgttcccacaaacggcgccaaatgttgttgaggaatttagaaaacaccaaaataaataatataataa

SEQ ID NO: 149798 - DNA, 519 bp, Cannabis sativa
attataattgtatccaactaatatttatatatatatatatgtgtgtgcatattacataatgtatataatagtatatgatctacaattttctattaagtaaaaaccataatttacaataaaaatttaaagaaaaataatataaaaatatgatgcttacctcctatacctaaagctatatgaatgaatatattattaaatattacataacaatcgaatctctctaattttatagaagtatatatataggtatatataataggtatgagattaattactaagtaaatatgttataataataattataataataataataataggagttataaaaaataaaaagtccattgataataaataattattaattaaaaaaatgaaaagtcacaattgataataatagtagactaaatatataattaaatttttaaaaatatgagtaaatctaaaaaattgagaggagagattgaaaaaaaaattaacatataagatgccacgtcaactccactaaaattctccttt

SEQ ID NO: 149799 - DNA, 634 bp, Cannabis sativa
  modified_base (73)..(75): a, c, t, g, unknown or other
  modified_base (188)..(210): a, c, t, g, unknown or other
  modified_base (437)..(439): a, c, t, g, unknown or other
ttatgatgctaatactcaattaaaaaaaaaacttgggagagcctattgcttaatctgaatatgcacaaattannnggagtttgatgcatttaatgaatttctctcgacctaacattgcttatgcaatatgcagattgagtagatatacacacaatcccaatcatgatcattgggctccaatagtcagnnnnnnnnnnnnnnnnnnnnnnnccatgaattatggtatcttgtaagtggatttctcgctgtattagaaggttacagtgatgctaactggatctcaaattcagatgagacaaaatccattagtggttacatattcactctaggtggaggtgcagtttcttgaaaatcaaccaaacaaactattattacaaaatccattatggattctgaatttgtagctttagactcggctggaaatgaggctgagtggnnnagaaacttcttagccaatattccattgggtataaaaccaacaccttctgtgtctttacattgtgattgccaaacaacaattactattgcgaagaataaaacactcaatggtaagaatagacatattcgtctaagacatgaagtgatcaagcagctgctaaaagatggatctatatccattgattatgtgaagtca

SEQ ID NO: 149800 - DNA, 753 bp, Cannabis sativa
  modified_base (236)..(262): a, c, t, g, unknown or other
gtgtagtggcaagataattggtacttgcgaaagaaataagaagaggtggtaaatacgacgtcgtgggagtggtaagttgaagaatttgaagaagagaagaaaaatgtttcaattgaaaagggaagagctattttttagattaatccccggttgttttctttttaaatggtttgtgattatcgaatatttaatattagttcaaatattaataggatttattttattattattttatnnnnnnnnnnnnnnnnnnnnnnnnnnnattaaataaaaattaaaagtcacttatgaatttctcataaattaagaatttcagttatataggcatactttatatagaatagatataaattcttttcattcgtgaatttggagatttacaagttatgcttgttcttattgtatttgtgtgttattttttcaggttagctagctctattgacttttaggttgagatctaaaagattgaatatgatgatgagaaatcttccacgttgggtgctaattaaaaatggcagaccagttttttatattgtaatactctattgagctatgctccttattgcagtgcaaggtcagtgtgatgttgaatctttatacaactcttgtgtcgaccaaaaggatgagactattatgttgggagtctcttatattttttgtttagcttaaagtgatttttgttataacttgtttcatccaataaattttgcaatttactttattattattattattattattaaggttggacaa

SEQ ID NO: 149801 - DNA, 544 bp, Cannabis sativa
  modified_base (147)..(148): a, c, t, g, unknown or other
  modified_base (419)..(421): a, c, t, g, unknown or other
tttaaatataactggtttcattttgtttttgatttcttttgttttggtgcatgttgaatataaccggtttttttttgttgttttaattttttttttataaggcacttctatgttatgaaaatttcatttttattcaaaaccaattanntttgaagatatggttcatgatcaaaaaatattgaaatgatttttggaacatacaaaatctaatatagtgtttttttattgtaaatgtatctttgtattcaataaaaccggttattgttgttgtgtctttactttcttgcgccttggttattttggttgttgttgcgttggtggtattgctggattagtgcatgtttatctattgtgccctgtctttttgcaacgtccacactttagttgtacctttggctctccttttgaacttattcttnnnctcctaggtctccctgctctctttttcttgtttaatggtaggactatcatttccaagctctcaggtagtgtccattcactttcatttggtaatgggttcgctgttgtgtcatatgttgctttc

SEQ ID NO: 149802 - DNA, 642 bp, Cannabis sativa
tatacatggtaagttttatgcaaatagttgcatattagttttataatagttggaaaaaagatctgattcaaataaaactgatgaaaagcacagggttcgcaattggtaacaattgacctgaaataacgaaaagatcaggagctcctaatcaatccaaatcaggtataaccaatacatataagttatattcagttgcatagtcatttttttatgatttcaaaataaaatcaagtaacaattatgttaattggagttacgttccatattttttcaagttaatttatagttgcatcatcatttcataatagttttattcaatattgcaggaatttattttggacagagggaaaagagaaaacacttggacaaatggttagattgtgtaataaatttaaaacgttttgtaatagttgcattgctgtttttcatagtttcataacattaataaaacaaaaaatgacaaaaacagggttcagaactggaaatacaagacttgaacagatgaaaggaaatagaagtaagtttctattctatttcataaatataaattttttttgttacaaaaatcagtgtaaaaaatgttcggatacattactaacatttcaaaatcacaggaaaaagaagacattccattcctagtct

SEQ ID NO: 149803 - DNA, 502 bp, Cannabis sativa
  modified_base (26)..(46): a, c, t, g, unknown or other
atcgatttagaagttcatatttaggnnnnnnnnnnnnnnnnnnnnngagtagatctaagttcctggtaaagtaactttcaacactcttttgctcctcgcatttctcatgggctcaggcttgccgaacgcaaccttttgctcatgtgcgaggtaaatattctcctgagtttcattaagctcggtataaatagcatacactggcacgtacttatcgtgcttcttctgtttctttttataaggaaccgtcctttctcttcgagccagaagcctccgagttatcgattctcgttgagacagtacttgttgaaacgttgctgggtttgcctcccgagcctattttcaacaaattcattttcgggcttcttcttttcaaacaaatacctgagccctttcgttgaacttagtgatgtttcttactgaacgaccttgtatgtcatcccacagctctcccccagcggttgatggatcagtagagatccccgcctgaagggctttaagttgt

SEQ ID NO: 149804 - DNA, 1072 bp, Cannabis sativa
aattatactttttaatatttaaattgacaaattagtttttaattattcttttttctttctatgtcctactatatattaaggcagtatatactcttttaaagttaaagtttcttctaacctttaactttatttccaacaatatccctttttttttcttttttttttttcttttaactatatgaaaataataaattgtattataaatattattatttgttttacgtataataaaaacaatttatcaattttttactaatataattatatctataacacatatatttaaattgttacaaatattctcatatataatatcaaatttatattgactaaaattattattatttattaaattattatttttatcattacaccaactatattaaatttatccaaaattactatattaagtactattttttttattcaaaaatacatttacatattaaaaattaataattcaccaaattactattataaaaatattatttacatttattacatagttacataggaccattttctatgtaaaaaaaattgtgataattaaacttaataatatttacaatcagtttttgtttttttacaccattgactatctcaaattattcgaacaaataaatatttaggggtgtgtttggtaatatatttttttttaattttttagtcacaaaaatacaagtaaaagttgtgtttttaaaaaaataaaaatgtattctataaccaacttttgttttgttttttctttttttaattttaaaaccgaaaataaaagtgtgttctataattttatttttttagttttttttaagtcggatccaagtccaggtctggggccgggatcgtggtccatcggagactggagtcgaggctggagtcccggatcccaaagggtttaagttgggggtcagagtccaatatattgattaaaaaaaaccttttttaaaaaaattgaaagtgattgttttcttcaaattttttataattttgattctctattaaaaaattaaaaagtaaaaatagttttatagaacatatttttggaaaatattttcacttttttaattaaaaa

SEQ ID NO: 149805 - DNA, 690 bp, Cannabis sativa
  modified_base (442)..(443): a, c, t, g, unknown or other
tgagggggacctaggtttgtaatggcggagtagccagtgatgattgttgtcgcgatctgcttgtgtacgagactgttaatggcgtgaaccatcatcttttgattgaatattgactgaaaacaactgtcaccaagagacgcatctcgaacggaaaaggatgccaattgtcggcaataatgacaacgactgaaacatgatgactcacgaagaaaccctagcatggtatattatttttttttaaaataatatttaagttctattttctattgtacttttattgacatgacataattttattagcatgttatatatttttattattatttgttgttattatatatatttattgcgaggtatatgttttttgttatatagtatataagttttattatatagtatgtatatcattttattttggatcatgcatgtttagtttttattnnattatatataaaggtgatatataaatttataaatatgatgtaattattttatggttgtatataattttattaatatggttgttatcccaatttttgcccacctgacgtggcatgtctacgtggacaacatcaatgacatgtggcaatactattgggttttgtgccttaaataaaatccatttcaatttaatcagatttactaattaataaaagatcagaaattacttttattttgcatggttcacat

SEQ ID NO: 149806 - DNA, 537 bp, Cannabis sativa
ttttgggcccctgggctgggtgggccctaggcacaggcctagcccgcctatgcccagggtcgggcctgtaaatagtcattcaacaattataataataataatcccttaccaaaaaaaaaattataaataaatatcgaacgagagactaaaacgttttcttatttctgtattattcttaacttatatatattaattgttaaaacataaattataaaaataataattaatagttataattaatgtttatttaaaaataaaattaatcttaattaaaattttataagaaataataaattattaagttacaagttatttattatttattcttatttaatttttagattaattaatcataactattcaataatgatctaatgactaagggcccgtttggcacagcttttggaaaagctaaaagttgctttttgaaaaagctgtgataaaaatgtatctggaaaacaatcaaaaaatagctttttgaagaatttttggagaacctacagctaaaagctgaagctgctccaatccaacttttag

SEQ ID NO: 149807 - DNA, 1026 bp, Cannabis sativa
tttttttttaacttttttgttaaatttacggtttgcgttgctgcggtagttttcatgtgggttgctatgtgaattttggctgcgatttaggttgctccgttagttgctatagggatttctgtgtggagtttcgtaaaaatgtaagaaaaaactattttgaagtgtaacaataaataacccctaataaataattttttaaaaaaactatctattttataattaataattaaaaaatatctaatcatacataataactaacaaagcaaagtcaaactatctatttataatgtttaaatttatgataattagttaataataaaaaaaattaattttctaaatatttattctctccttaattctctcattttctattttttttttttgttctactttaaattctctccttagttctctcatttttttaatttttttattctattttatttaattagacatcactaatcaattaaaaattacaaaaaaaaaaactacatatttgtatataataactaataaatatatatatatgtattaaaaaaattaatctacatataattttttttttagagagagagatatagttaatattaattaatataatttatcaaaaaaaattattaactaatatgccaaaaatatcaaaattctaaacttattatgtttatcaccagggccgggcagagggtggggcagcgggggcctcggccccaggccccacaattttggaggccccgaaaaaattaaaattaatatatacacatataaaaacgtataatatataaatatttaacttaataaattacatgaaaaacatgtcgtacacatgataagtggagctttaattggccttgaggataaaggttcaatctttacctttcaccttttatactttttttttttggattacacacattttctacttttatttgtgaaaggttttacttagcatttcaaaaataaataaataacaatattataacttaaatatttgtattacactattaaaaaaatatattaaagtacttt

SEQ ID NO: 149808 - DNA, 755 bp, Cannabis sativa
  modified_base (527)..(551): a, c, t, g, unknown or other
  modified_base (613)..(616): a, c, t, g, unknown or other
taaatttaaaacttgattattttattttttatttatggtcagattttaaaaatttgttaatttcttaaatatttatatattatttaattatcaaatatttgaatatagctatattttaaattaaaagattactttatcttcttaatttgaaatattatattaaaattatcttatagaataaatagaataattaataaatttttaaattaacctagatatttttatagatattttaaccataatattttcaaatttaaaattggttattttgttaaatatttaattgtgtataaattataacttagaaaaataatatttaggctatattataccattttacttattaataaattttatcaatagtattttaaatatttaaataacctagatatttttgtagaaatataaaaaatattcaacttcagatattttgacatataattaggattattattattttattattttattcttaaaataataatcgcctaaccatatctatttaaaattagtttattttgttattnnnnnnnnnnnnnnnnnnnnnnnnngaaaatgatattgaaaatatctattttgttattttcaaatattttatcttattagatatttnnnntaatttgataaaaataattcaaattaacctatatattttaaaattagcttcatatttgaactttaaattttgaagagatatttaaggttgtttttaacaaccctaaattttaaaatagttggttagttaaaataataat

SEQ ID NO: 149809 - DNA, 644 bp, Cannabis sativa
  modified_base (207)..(215): a, c, t, g, unknown or other
  modified_base (616)..(616): a, c, t, g, unknown or other
taaaatattcccaacaattggcctcagagccatggtaatgatttactttcttgaaaatatagatttaaaacaatgaatattttttattgtgttgatttaaatgtattcatgttggtttatgtgttatttgataaatgtatgtgatttacgaaatttttccatgaaaataatttcattctgactctaaaaatattttatttggattcnnnnnnnnnaattaagcaattttggtttttacggaactcgattttgataaaaattgaagaagttagggtgttttgaagtttcaggttgaatgggtgtcgagatgctcaatagcacgcgcgcgcagggctttggacaaggtgatcctgccgagaaaactcggtgcaacaccttgcagcatcccttccccgtgcgcgtaggaggctgcatgcagcctcctcgtgggtagtttgcatgattgcacccaaaaattcgattttttggggatttttcacccaattttggatttttcaattttcaaaccctaatatttaaataaaatattgtttcaaatatttaaacttaaaaatcaaatttacaaattaataatatttaattattttaatatattattattaatttttgatatttngaggtttaaatttaaaaattaatttttt

SEQ ID NO: 149810 - DNA, 930 bp, Cannabis sativa
  modified_base (616)..(624): a, c, t, g, unknown or other
ttttttcttatatatatttatctacatatatgtatttattgagataacaatgtaactagtttcttttattgtatgattatgttcataaaaatttaacttaaattttacgacttcttttattttaaacatatgttttaacttaggtctctgatgggacgatgggtctgatagcacccgatagtgtctgatgctggcatcaaacaacatcggacaacaccagaacccatcgggcctatcagtgcatcactatttgttttgctaaatatatacatcatacaagcatcgggcctccatcggacctgcatcagactagtggtttttttataatgggaattttacagttagtaaaataacctgttcatgccacaaattataataattatcagaaaataaaataccacaaattttaatgtttaaaaaagtccaacatgaattcaataataatacataatagtacaacacatcacaatatgactaaattaaaaattcattttaaacctcggtaggtgcaagtgcttctgttgtgccccttggcactgcacttgccaaaatttcgtggtatgataatcctttcaccattacaagcagttcggtttgacttaattcttccaacctnnnnnnnnntgggttgccctactggttgcttctcaataggcactccaactgtcatgttttttatgtcatcaggtcattcccaatcatcctcgtcaccaactggtataattgtgccttcatatgtgctcctctaatattctattgtgtaatatggcgagcatagtgcgtacatgctaatatttcgttgttgagctgcagcacatgcatgaggataaggaaacttcatgatttggaacaaaccacaactgcaagtttgttcctgcaagtgttgggttttgtgccctaaataaaaccctttacaatctgattagttat

SEQ ID NO: 149811 - DNA, 509 bp, Cannabis sativa
caaaatccataacacaggctcgtaacatatgttccaatatttgattgtcctttcggattgtcatcaatctaaggatagaaagttgtactgaattttagtttggtacccatagcccgctgtaaactctgccaaaatttagaaaaaaacttcggatctctatccaaaactatagactttggtacaccatgtaatattactacctccttgacgtacaaatttgcatattgatccactgtataggctgttttaactggtagaaaatgtgcagacttcgtgaatcaatctaccacaacccaaattgaatcaaataaactcgtggttctaggtaatccaaccacaaattctatggtgatatcttcccacttcaactcaagacgtgtcaaaggccgcaacaaacctgccggtctctagtgttcggccttgatctgatgacaggttagccattgcgatacacattctaccacattcttcttcatcccactccaccagaagtacggtttaagatcttg

SEQ ID NO: 149812 - DNA, 530 bp, Cannabis sativa
aattcaacaatctcaatagttcggggggaatttttaacggcaaaaaaagtccagggggcatgatttagtacatgtcaaagttcaaggaaaaaaatgactaactagcttagattttttagttaagcgtgacttgaatttgaatatcattttttaattttaagaaaatgattataattattgtcaatatgttaatctaaaatatgcatctaaacgttacatatatagttaaaataatgactactcaatggttacaataaaaatgagtcgggctaggctcacataaaaaaaagtggacttttataaaaacaggttggaccaggccatccgagtgtacaactttatatataggtacctataaatgatatacatatctaaaaaatatacaatttaaagagatctctacaagttatgtcaatatgggaggaaattaacatataataaatgttttatccacaatagatgttgaatgtttgcatatgcaataaattaacatgagatagcaaggatcatggtattagatttgtcgagaa

SEQ ID NO: 149813 - DNA, 564 bp, Cannabis sativa
  modified_base (175)..(189): a, c, t, g, unknown or other
catgcccatagcatgtcttctaaaatctgaatggtcttctcggattgcccatccatctgaggatgaaaagttgtgctgaactttaactgtacctatagctcgatgtagactcttccggaatcttgatgtaaacttcagatctctatccaatacaatggactttgggacaccatgnnnnnnnnnnnnnnntctgacatataactcagcatactggtcaatggagaaatttgtctgaacaggcaacaagtgagccgactttgtaaacctgtccactatgtcccacacagagtcaaattgtcctatggttctaggcatacttaccacgaagtccatagcaatatcttcccgtttccactctggtatatttagtggttgcagcaaccctgcaagtcactgatgttcagccttcacttgctgacacgtaaggcactttgcaacatattcagcaatatcattcttcatgcctggcccccagaacaaggcttttaggtcttgatacatttttgttgaccctggatgaactgaataaggagtcgtgtaagactcatccatgatctctttctt

SEQ ID NO: 149814 - DNA, 563 bp, Cannabis sativa
  modified_base (437)..(437): a, c, t, g, unknown or other
ttttgatttctaaaacccattgttgtattttaaggatttttttttatcttttcaaattatgcatttaaaatagtatttttgtgtaaattaaggcaaaatatttgggcgtcacaaaagttgtcactaaaagtaacaatttttcgtagtgtcagggttctatttgtaccattttgaaaaatacagggtctattttgtcatttaacaaaattttttgttccaattgataacttttgtaaaatacagggtataaaataatatttaccctataattaataattacttaataataattacatagtagtatattattttggtattggtaactatttaaatattatatataattatttttgttattttaatttttatctgttattttaataaaaaaaaaatagcatggagagctataacaatagcttatatatatatatatatanatatatatatggaagaggtttcaactttcaatagttattattattgtaaccatcatggttacatttttttaagctattggattactattaaatggttgtgattaatttggaaattaaataaaaata

SEQ ID NO: 149815 - DNA, 759 bp, Cannabis sativa
  modified_base (151)..(179): a, c, t, g, unknown or other
  modified_base (391)..(394): a, c, t, g, unknown or other
  modified_base (466)..(474): a, c, t, g, unknown or other
atttgaaataatatattaaaattaccttatatgataaatgaaataattaataaatttgaaattaacctagatattttttgtagatattctaaccataatattttcaacttaaaaattagttgattttgtgaaatatttaattatttataannnnnnnnnnnnnnnnnnnnnnnnnnnnntcattttacttattagaaatttattaataatgttatgaatatttaaataacctagatatttttttttctagaaatttaaaaaaggcttaatttgatatattttgtcatataatttagataattattatttgtttattattttactcttaaattaataattcctaaacatatttattttaaaattggattattttgttattttaattttattnnnntataagattagaaaatgatattaaaaatatctatttagttattttctaatcatttatcttatttgatatttnnnnnnnnntgataaaaataattcaaataaaacatagatattttaaaattagtttcaattttaaaattttgaaaagatattttaggttgttttcaacaaccctaaattttcaaaattttgttgttagttaaataataatttacttatatataaatatattatttcacatttgttacatggtattttttttgttttatgtaattttttttaacaaaactattatttatttgatctaaattgctatgattaacttattgacagatccaatgatttaattttaatcatagtccaatt

SEQ ID NO: 149816 - DNA, 870 bp, Cannabis sativa
aggtcttcatgaagctttggatacagatgcactagctgccgtggaagaccagaagaagaaaaaggaaattcaaatcaaggctcacagtgcaattatactcagccttggtgatgaaattctcagggaggtctctgaagaagagactgttgatggtttatgggaaaagcttgctagaatttacctgaaaaaatcattagccaacaaattgtgtctcaagaagaagctatacacattgaagatggatgaaaataaagaactaaggaagcatcttgatgaattcaacaagatcatcttggaattacataacattggggtcaagattgatgaagaagaccaaagtattatcctcttatcctctctgcctaaatcttttgaacactttgtggatatgattttgtatggcaaagaatcactaacaatgacagatgttaagtctgcactcaactctaaagaaattcaaaagaaaagtgatgagtcgggagagagtaatggagaaggtctattcaccaaagggagatctaacaagaaaggtttcaaaaaccatcacaacaagtccaagtctagtggtcaatctaagtctcagttcaattcagggaaaaaaatgctactactgtaaaaaagaagggcattttagagatgagtgcagggccttaaaagccaagttggccagagaacaaggcaagaataagggggaagctgacattgcttcacaagactacacatcagctgatgttttggtagtctctagtaaggcctgtgaagaggaatggtcatggattcaggttgttcattccatgtgtcccaaaattgagatgttcagtgacttcaagaaagtcccagggggtactgttctattgggaaacaataagg

SEQ ID NO: 149817 - DNA, 544 bp, Cannabis sativa
tttgtattgactcaagaacaagaagaaagattccttttcttatagctcttacaacagtatctctgaataagaattcttagataaaatatttagggtaaggtctatactaaactgtttgcgaccctttgcccagtgaacatgtatcactatttataaggctttaaacttggagaggaagtgtttctcttctccttacaatggatataaatagaaaagatcgtgggattaatgttgagtacaaagattgtgggattgacgcagaatacactgatcgtgggatcgtgtgtattccatatttctgtaatctaatccccgagttattgggatttcgttgatgactcataatgcaaaagctaaattcgctaagtgttgattcctctacgcagatcgctgatcggtttgcttcaagtatgccagggaggcatcttgttcgggctatactctatgagcagatactccaagtggattccacgtgtcaccattatgcgatgccacgttagagtgcaaaaattgggataacaacattgttgccaatgatcaaaat

SEQ ID NO: 149818 - DNA, 858 bp, Cannabis sativa
  modified_base (293)..(293): a, c, t, g, unknown or other
  modified_base (531)..(540): a, c, t, g, unknown or other
gaagtacaagccctgacaggaagaatggatgcacttaacagattcatttcgaagtcaactaataagtgtgtgtcgttcttcaatatattacgtggcaacaaaaagtttgagtggacaaaagagtgcaaagaggcctctcagaacataaaaaggcatatagcgacgcctccaattttggcaaaacccataactggagagatgctatttttctatttagccatctcaaatgatgcaattagtgcagctatagtgcgagaagagggcaagcaccagcaacctatttactatgtaantaaaaggttactaggggtagaatccagatatccccctctagaaaaactcgctttgtgcctagtccatgcatctcgtaaactacggtcatacttccaggcgcaccccataaaagtgttaaccgatcaaccattgagataagttttatccaaaccagatgcttctggaagattgataaaattgttgattgaactgagactgttcgacataacataccaccctcgaacatccatcaagggnnnnnnnnnngctaacttcttgatagaaggtataactccagaagaaattccacttgtccagagagacccaaaaatctagaggtaatacgtggatcgtgcatccaacgaacacggttcgggtgtaggggtaatattaacatcgtcagaaggctttaagtttcactatgctttgaggttccaatttgaaggatcaaataacaaggctaagtatgaatccttgatcgccagcttaaagatagctgaggcattaaaagtcaaaaacctcatctatcgtagtgattcgcagctgatttcatcaagtcctcagggaataccaggccaaaggctt

SEQ ID NO: 149819 - DNA, 570 bp, Cannabis sativa
aaacttcaagttctttcgggtcagctaagcccagaataatatctagctaagcccagaaagcttctatcttcaatagccgattttggtgttggccaatctcaagcaacttcaatcttggtcggatcaaccatgatcccatctttatctactatatgcccccaagaaagggacacgagataaccggaactcacactttttgaactgagcatacaacttgtgatctcgtaaccattgcaatactgatctgagatgcaactcgtgttcctcttctaattcaaaataaaccaagatgtcgtcaataaacacaatcacacatttgtttaggtaatcctagaacatctaattcatataattcatatcagatatagtacgcagccttggccggtcattcaccctgatggtgttcttgcattttggatattccagatatgatctgaaagaggatctgtaaccttgacagtcatcttggtttccccaaagctttctaatactccttgatgttccagaagcttttgccttccgtttgtgatcagggttaccactgtcgctccccttactgatattaccact

SEQ ID NO: 149820 - DNA, 788 bp, Cannabis sativa
cggagtgtttaaagaaaatattcatgaaagttataatagtccctcaggctacggttaggctacggtcattggaccatctacagtatggctggcttgatctcaaaattgttggcatcgatggcaggtggtcttatacaagatcagacccctatcaagttaggaagcaaatagtccctcaggctacggtcattgttgttgtgaccattagcctggtcttctacagctcctccattgttgccattattggcgttgtcagccatgactctttcttgtttaatttctattgcatctttttccaatctcttccttcttatgttctttttacaagttttctctatttcaagatcaataggtaatctgacagttgcaccttgacttctcataaactagtgaacctgaaaattataagatcttgaaacaaacagaattagtactataattgaaaacaaaccaaattagaacaaaatttaatttttaataatattaactatcaatccccggtaatggcgtcaaaaacttattgtggtattttgcaacacgcagtatacttatcattttgacaagtgttactcacaaagagtgaggtcgatcccatgcgggttgtagttaagtacgttaaagttaaacttttacttctatttggttgaataaaaattaagaataggttaaaactagaaaacaataaaaacaataaaaggagaagcaattaataaactaataaaggagattaacagtaaataaaagttagggctttcgattttaattgtatctattgattatggtctaat

SEQ ID NO: 149821 - DNA, 628 bp, Cannabis sativa
ggacaattagggtggtgacttcctctttgaacgacggtggaatcatcaggtttcttgaagctttcttgcttctcctctctatttttctttttcaagagatggaaaatgaaagtaaaaaattgaaagagagtaaatggcctttatataggcttcaatttggtttctccccaaaaaaactaattaaaaaattaattcccactaaaagtattataggaaagtggaaagagaaaaaaaaaagtaatcataggaatacaactgtcagcatgtttcccacaaaatgtgcttttataactggcatcatgaagagcttacaattaatagtcagttaaagagacagaagtgtgacagtccattgctgcacgatacaacggttaaggtactaagcatgtgaggcccacatgcttggcagcacccaaacatgtatctaaagtccccctccatatagatgttcgtacgaggacttggcaacaaatgttatcctaaagtgtgcacagaggacgtggcccttacacatggcacaatctagccatctcattaatctagtaaagaactgttggaatttattttaccaggatctaaatttactaacatgtatgtttcattaacaccctaaacatgaattctctaa

SEQ ID NO: 149822 - DNA, 560 bp, Cannabis sativa
tcaataacgtgtaatctcaattgcaaaaaaaaaaaaaaaatactatgaccctttttttcttttttcctttttcttttttgataattaatttttcttcttctttcctttaatttatctttcacgaccattctatctctttattcttttctcattttccactttctctctcctttctctaagtttaaaattaattgctgaccatgtcgttatcggttcagcttaaaaaaaatatcattgtaatcaactatttaatgtgaacgtttcaagatatgagaagcatatatttttttgctatttcaaaaaaaagaaactatttagttacttagtgattagttaccattctatatttttttaaaaatcttgattaatatttattttaaaatttagttaattgaattatattatactatatgatagctaattaatttctacaataaactaaaattacgaaaaatatatcttaaatgatatcaaataccacaatataattttaaaataattaattgataactaatttagatatctaaaaatttagataactgtgattttttttttttttt

SEQ ID NO: 149823 - DNA, 795 bp, Cannabis sativa
atttgagcaaagtaaagaggattaaaggaaattgtcaagaaagacttacccttgtgaattccttcaagactctacccatcagtagctctagagaatagtcgttatcaacgccggccagttgctcactaaccttaggaaccaaccggttcatatagtggacgagcatctccttgcctttcttggcctctggaagcactggcaaaggtggagtaggggcccgcatctgcttgggtccactcttgatcagctcagatccacctttcggttgttcaagcctgtccaaacttcctcctcgaggttccttagacttagcaacttttggagtagagggttttgcaacagttagctcctcaaaaaggtcgataacctccccggcaggcgtcttttccttagaagagttcccctcaccgcctctagatttcttggccgagggagatgcgctagaacttccgccaatcctcttcttcagagcatgaagcatcttctgagacatgtctgaacgaaacaaaaacaacatagttgaagaaaacagacatcagaaacataaagcataatagtcaagaagcttaaaaacaagacggagtagtatgcaagatgattgcccgagcaaggctcgaaagtccatcatcacctgacaagcctcttatttcagacataacaactttcccttttccgagcacgggacaaaggcggccaagcaggcgaactaggctctgtaatgcgaattgcatgttcaataggcctgggcggggccggaagtttcttcctccttttgagcggagtcacctgctcttc

SEQ ID NO: 149824 - DNA, 873 bp, Cannabis sativa
aaaccaatctaccttgattccacctaatatagtgggttataagaaaaaaaatatttttgggctcttatttaaaaaaaaatgtggtatttttgaaaattaataaaaaatatatatataattttaaaaggaaaatttatttttttagtccctagactaggtacgtcctaagtctactattcccttatttgttattttaaggaaaaaaaatgtctacaaggttaatagtatttaaaaaaagtagttagttgagttgacacatttagattggtttaatacaccaatttatttttcataaatgatctttcccacatgtataggtggaattcattttttaaaataattaatgactaattttttaatattattagttattttaaataataaaaataaagtatttaaggtaaaactctcttatattttttatacacttaattcttttatttttttttgtagcaaaattcctttaagtttattttttttaaaaaaatttgaggcgtcgactaaatattactgttaaatattaacgggataaccactgcgtacacctttatatatacgtgacagtaaaacttcaaagtcaatacagtggtaattaagttaatatttaacagttatatttaactagcgttttaaatttacaaaaaaaaaataaataaataaacataagagggttttactactaaaaaaagagaaataagagagttaagtgtataaaaataaaaacataagggctcgtttgatacgccgtatggtaatgtattgtattgtattgtgcgtggattgtgttgtattgtattgcattagtattatttaatacaatacaatgtttggtattgacttgtattaattaattgtgtaaagttataatatatt

SEQ ID NO: 149825 - DNA, 585 bp, Cannabis sativa
ttgaggtataagtatattatcccttgtgaatggtggtttgaaccagattatacatattattatttttgttgctccattaatcttttatttctatctccacaaggatggacatagattttgcaggcaatcttagaggtcctcctcaggctgacgaggaatctaggaggaaagttattgtggattcagattctactaaagaatccaaccatcccaagacccaagcctgcacaagaagacctttgtaccaacctctctctggtatcgagaaatttcctgaggctgggaatgaggtctcggctacaggaaatgggatcttttgatgtggagaatgaggtctatgcagaggtcgagaccttttacatgtagacggtcttactcgagctatgtgtagccgatctttctccaagctatgtgtagacggtctttctccgagccatatgaggacagtcttcctcgagtttaccgacccccttacattctttgtttaagaagatgacttaatgtttgcccctagtggcattttttgtaaagacaagtttgtaacccaacttggattttcttttatcttaaatgcctcgtactctt

SEQ ID NO: 149826 - DNA, 666 bp, Cannabis sativa
atctactgacttaacttagttacaagttaagtattcatttatgatagatattcaattagagcatttcttatttccacccattaacatgaacccatcttgataccttgtaaatttttacttgttaacacattcatttctcttgataatctctggaacgactatcgattctacatcctaatatggatctttgcatactttgtcctcacttctatgctttttgagatgactccccggaagatttcccatcttgagattacctaaacttaagtatgcttaactccaaggtaagctaatggtgggtcatcagaaagtagatgcttctttgtcatttctaattgtatttcttgctttcattccttcattaattaaatctaatttctatcactcccttcattaacctcttaccattccttatcggttttgttcacttatgcttgaggaattttcatcttattgtcaacttgaatcttatccatctccgctcattttaacttgcatccatttcctgagtttttagctaataacaattgatcaaagatcattccttgatctcaaagcttcctatctgtgttaggtaaaaatcctaaagtttcccctttttaacacatctagaaatataaatatttcaagtatattctctgttttattgacaatcccttggtatga

SEQ ID NO: 149827 - DNA, 723 bp, Cannabis sativa
aataacaaaagtgataatgtttcaagaatcacctatatgtttggctcatttatttggattttgattcacacatataacacaattaaatcgctcacttcccaacaatttaatcgaaagataaaaaatgaagaacatatataataaaatgtattcgagtattaataattctcacgttaggatcatagcaaataatcttatgaaaaatctaagaatgacaatataccttaatggaaataatgcaataaaagactaatcataaaattataatatcaatatatttgtcctaatcatattcatatagaaaaagcatgattatttctatataatactaaatagataaatatattgatatagagatgaaaaaaaatagaagaaaaatatatttctcaaatgtataaactttaagcacttggtagatcttgacacaaataaatattacctcacatataagatcatcctttaccttatctaggaaactagccaaaaatgctagtcattctcacaatattctaaagagaaaatatgagaagaaatatgagagaaaaatttattagagttttgctacactccaaaattacatactccaaagagaaaatatgcccctatttataacgttacaagccacaattacggcgagcaaacatattaatgacgaggaacgcatttttgctatgctacaaatacttgcacttgctccgctattctgcccccgcctggctgagg

SEQ ID NO: 149828 - DNA, 1295 bp, Cannabis sativa
ttacttaaattttgctaatatttttatactaattgttaactataacataattaattacttgagtactttcgttactaatttatttagatacataattctatcataattatcttttaaattaatttactttaataattttttatcaagaaagacaatgtctattaatcaaactgaaccaattacatccacaagatgattcctcttcaaaagagaaacttaccactcaattttattcatgctagacaacttcctttcttcaagattaagtctttttatgaagctctctttaaatttagtatctatacaattcggattcatacattttttttttatttatttacaaagtttggtttagccaaatgccataaattacacctcctaacacattcttatgaacataaataatttttatgataaattctaatatatattttttaaaaaatatatatatttatagttaagaaaaaaaaatatatttatttttgaaatatacttttatttattgatttttttttattgatagaagtaaaaataaaatcttatttaactgtgttaataaatattataaagtttcatgtaaaataattgttggattaaaatcctcaatatgggctcatatgtatattattgtattgttatttgatgtttggcccaaaataaagtgatcattttagtaattgtgggtcattgggtattaaagtatcatggactaaatgtgtagacaccctaagcgatatttctaatttattgaggggctaaattaaaaatacttaaaattaataacctatctatgaggttataaattggtagtggtcctcaaaaaacaagagtcaatttctagggtgtctacacatttggtaccctgtgttttatctaaatacaaatttggtaccttgtatttttaataatgcttatttggtacctgtattttaaaattatacttatttggtaccctaaatttaaatttttttgataaaatttaatcaatactatcaatagtctaaaattttatgaattctaaattctaatttatttatttgattacatataactgagaattgtttggttaaattaataaaattgtatcgattaaattttattttaaggtaccaaatatgtacaatttaaaaatatgaggtaccaattaagtattattgaaaacatagggtacaaaatacgttttttataaaaacacaaggtactaaatgagtatattccccaatttctattctcatcttccccatcaagagagaaaattagaaaacctaagccttgttttcttggaagatcattat

SEQ ID NO: 149829 - DNA, 587 bp, Cannabis sativa
ttattgttagtcatgtggaaagtgcaaccagagtcaaggatccattcatctttgatggatggtccaacttggtacacttcaccactttcatatccatcagttacattagcatcatgcatatcaggtttattcttagagtttgagtgtttagaatctccctgtccatgtggtttttgcctattatttcttttcaagaaataacaatctcttttaaagtgtccaggtttatcacaattgtaacaaccatttgtttcatcaggatttatagtgttagaattagatctgcctctttgttgtcctcctggtttacttaaatttctgcctggacttctacctcttttattccaaggtttccttggacctggtctgcctctactcaaattgacttcaccatttgagtttccacctttctctgttctcatctctaagtccttagattttagtgcagaaatcacctcctctagggttatagatgtccttctatatttaatagcagttttaacttccctataggattcaggtagagaatttaggatgattatagcctggttttcatcacttagagcctcattttccccagaatttgc

SEQ ID NO: 149830 - DNA, 606 bp, Cannabis sativa
  modified_base (26)..(45): a, c, t, g, unknown or other
tcctcttccgtttctcccaggggaannnnnnnnnnnnnnnnnnnncctacagtttggtaggctcttcatatcatcacggtggcttgccgaccacgatcttcgatctctgcatggttagcccttaatgcctccatctctttatctctccattcagcgaatatacgcctttgttcgtcaaacgcgagatttactgcagcatgcagttcgtcctggtcatgatgcatagtgttgttatgaccctgcatgagtccgagcgcgtcatggagattttgtaattcgatggcatctccgattgtcgtctgggcattggttccacgcggaacagtcgtattatgaatgctcttgttgagtgcggaactgttattcccagtctcttgcacaccaggcgcaattctagtaataggatctgtttcaccattccccacgcttcccgtcagtccaggattaacagcaggcggaacccttgaattccctgggtcctgtgatgtaggatccagcgtctataaatttgctgggtcagactgacctctacgagtttccaccatcgtgttggcggttggatgtcgaataaagagcgatttctgatccttctctcaatgaaagcac

SEQ ID NO: 149831 - DNA, 858 bp, Cannabis sativa
  modified_base (809)..(813): a, c, t, g, unknown or other
aagaaaacctaaagtctatgaggtaacttgctcaacaactttcttgtgtttgttatccatggtgtaggcataaccaacacaagcctgaagacaagaaaatagtgtcagttgatgattaaactaaagaaagttaagccaaaaggagacaagataaacagttaccctaaaaatgtttgtgaagcatctttgagaaatgacgtgtagaggcttgatgctaactaactgatgcaacatgatgttctcagccttagcaccaattaaggtatcactatgagcaagaagccaggagccttgctcacgcaatttcttcaccagatcatgagcttgagctcagaatattatgcttagtttcatccggagagagattaatcaaagatctcttattagcaccagcaatgttagacctctccctaccagagtcttgagcaggaaaagcagaatcagcagttctaccccttttcctgacctttttcttcaaaaaagtagaagtagaagggatgccatgaaccacttcccttatcagaggctcaattttcttcagcaccaaaatctttctctttaagttcgaacaagatgtcatagcagccaagaagctcatattgtctacaaatattaaataccagaggttaggacaacaaaaaagacataaaataaaaaagttagctgtatagcatggagcatcagccacctactgattccccatccttctccagagcagtttgagtgagggtaacttctccatcatccttgtaacgccctgcttcaagcctctattaggcccttatacccacagaatgatggctcttatnnnnnagtacgtcactttggctgcttcctagattgatgactaaccctaca

SEQ ID NO: 149832 - DNA, 520 bp, Cannabis sativa
tactccactcattgccaattggttttgagatggaacctcatgattctcaacatatactatatggacacaacttgatagtgtgaaaagttcaaggacaaaaatactaattattcatgaaaaaaatagtataaattaaaaaattattttatgtaaaagaaaaataataaaattaagtgtatttgattctgataaagtattgaataatttgagaaaattacattatatacccactttattttacttgttttaatttttacttttattttcatattttttaagatatacctatttttatagatgatgtccctattagaccccttaagttaatgtaaattatatgttagacttaagtagagagtgagggtatattgggtaacccactcaaaagagtgaaagtgagtatattttaataaaatattatatgagtattttttagggaaattatagtaaatggccccaaatcataggactatgttagtttatgtcctcatttcaaaaaaatatagcaaatggccctaaa

SEQ ID NO: 149833 - DNA, 501 bp, Cannabis sativa
ctcagatcgggattggaacttgggactcggaccaaacctagaccaagaactaggatgcgaacccacacccggagcttaatttggacctagacggaaatctggacccgaacccaaactaagacaaggactcgaactccgactcgaactcagaatcgtaaatggaactagaactgaactaggactaggacatggaccaggacctaaacccaaacccgaaccctgatcaaaacccagagagaaagacctaaacccgaaccgagactaggactcgaaccagaacctcgactagtacccaaatccacacaataatcaggacctgcacctagaatcaagatagggacctgggaaatagaactaggaccgggacctagtaccagacccagaaccgaacttgaacttaggaaccagctcatgactcggctccagaaatggaaccagactgggacccgatattgggatccggatctggacccagggcttggacaaaacccgtagtcggtg

SEQ ID NO: 149834 - DNA, 541 bp, Cannabis sativa
aagcccctcagactttgtatgagagactcattcaatttttagtttctcatggttacaaaaggggtgtagtagataaaaatttatttatcaaaaatattaaatataacataattattgctcatatttatgttaatgatattatgtttggttctacttctaacaatgaggtgttgatttttgtgaaacaaatagaagagagattttagatgagtatggtgggtgaattgacctattttttaggtttgtattgtggtaatttacacacgcaagtgtacgtatcgtaataagtagtaaactcgccaagagtgaggttgatcccacaaggattgtagttaagtactttattaaaattaaacttaaacttttactttacttcaatttggttgaataaaaattaagagagaaagttaaattaggaaaactagtggaattaggaagaaaataaataaataaaggaaattaacagttaataaaaactagggcttcgatttcaattatttctattgattatgacctaatatgattatcttcttatgatcaa

SEQ ID NO: 149835 - DNA, 752 bp, Cannabis sativa
  modified_base (713)..(726): a, c, t, g, unknown or other
aattattatttatagaatacatgttgtggaaatttattttaattaattaattaattatgctatatgtgaatgtctcgttttctgtgcttgtgttcggaagcggtggaaagcaacgttgggcctctagagagtcacattttgtatgatttggaacgttaatagtggggtacaattgttaggttttgattatcggggattttgtcgaaagtttggtttgaccattttgcccttgttgtgcatggttacttttgttttatgttaagggtatattagtcttttaccttagggaattttgtcattatgtggggatattagctgctgtaagttatgttaatattaatagaaataatagggtttgtgtttttggggaaaaacctagaaaattactcctctctctctctccctgtttctctcgaattggcaagaaccagcaccaagctagaatttccttagctcaaaccagtgggtattagcaagaattggtgtgttatttcaaggtatggaaccctagtctcttcctttttgtattttttgttagtaaagaggggttttgacccatgattgtaggaattttgatgtgatggtaacaattggtgtttgaattagattctggaacttatctatggttatttagggttgatttaagttgtctttgtgatctatagtgaagtttcggcaaggtttgagtttgagtgttggaattattttaccannnnnnnnnnnnnntaacaagtatgtttgattaacaacct

SEQ ID NO: 149836 - DNA, 506 bp, Cannabis sativa
tttaaagtcgcttatatggacatcatataacaagctgagagaaccaagacatgcgagtctatatcggtttatcaaggctgttgggtcaacgggaccaactcacaaaacagagagtcgatctctatgattctacaagaggatatcaggaatgcttgaatatagcccagtacatgctagcttaataccgttccttggtcttaccgaatgcatgccatacgaatgcgattagacttggtcctatttgcatcatctcgctgaatataatttagacgaggttcatattcgagtggtctctcatcgacgtcccatatttccttgaggagagtgaatacacgtgtcattttaataggagtctggtctcgagtttcgaggtgagaaaatctcactataacacatggccctagttagtgagagatgcggtcaagagggaaactataatcgagaggcaggcgaagagatgtcacgaggtggtgacctttggttgtcccatcgagggtttcaaaaaa

SEQ ID NO: 149837 - DNA, 624 bp, Cannabis sativa
ctttaagatcaataaaatgacatttttgaacacgaatcaagtatcaacacaagaaatttatgaagcatgctattttgaaccatataagattaaaataaaccaagtttgtactataatatcccgaaaacttaattatgaataattaagatttattatgtattatgaattaattaggtgataataagtagaattataatcttattaacctaatttagcataaattataaatttttctataagtggataaataagcgtaatttattaattacagaaatttatttggaatatgtggatataatgtaagttatttgtgaaataaaaatattttcatgtttgacgaccctagagacccgattagaggccaaaaatatcacaacgattttagttagtaatattggtggacttaataagataagttgattttaaaaatactagagtattttagagtactcggagttgaccaaataccctagaattaaagatttcttagtggctaaaaaatggtaagacaactgttaataataagattattattattattattatcagtttaatatatattatatttggaaaataaaaacataaacagaaacattctccccctttaatttattttctttaatt

SEQ ID NO: 149838 - DNA, 621 bp, Cannabis sativa
taaattgaaacgccacaaaccaaccagtgttcaaactgcaaacaacgagggcatattaaaactagttgtaagaaccaaaaagtcaatcaggtatatttcttcaaattaaacttctatttgaattgaatttcttgaattgtaactataacctgtccctttaaattacttgtctcaggatcctcctactgagaagaaaaggaagggtcgtccccccaagaagaatccagaccctgaaactgtgaagaggaacaagcggagaatgaagcaaaaggcaagagatgctagttcatcccaacaactacctaatgcccagtagtggtctttttaatacgtgttttatggtagttatgattgcttaagttttattttggtgaagtagtgttaagttaggtatggttttgttggctaaagggcctttgcctttgccttggaccttttcttttttgaagtaaaaaaaatgacagatgatatatcatgtgattctatttgttgtacatgatgttatggtgaatgtttagacatgataaagaatatatgaattttgtttgttaaaaagtttgtttattattgatctcagaattgagcattgaaatgttgttctttgaacaagttaaataattg

SEQ ID NO: 149839 - DNA, 691 bp, Cannabis sativa
ttaatgacttggaccaatcagggattgctacgtgacaatttatttaatcagtacctatagaagttctaaaattataacttaagtattattagcgccaaaaattaaactaaacttaagtatattttatttgatttgtaaaattgagagttaaacttaagtatttatggtacaaattactgttaattatttatttggtttatatctatatattatgtaagcgttaatgcgttattatgagttcgaattggccaaaagcatttattattttatataacgaaatatatattcttataactattaaaataataagtgagttgatcaatcggtttttaattattagaaactaaattacatcaaacttaatttattgtattagatattgcttaggcctattacttaagcccacctggttattgggctgcctactacatgttatttgtacagataatacctaataaataaaaagtcattttcagactttagattaatttttgaatagagagtttccctctttaatactctaatatggtatcagagcatcagtttctgtgtccatggctttttgccattttgggtctttagttgccattttatagccggtgggtttagcaatggagtgggcagcaagaattgttgtacgaaagtgttgtgttaacctattataagacagatatttattaatggggtaagc

SEQ ID NO: 149840 - DNA, 1586 bp, Cannabis sativa
  modified_base (1167)..(1188): a, c, t, g, unknown or other
aaataatgaagagatttataaaatcagaataactttgactcttgcctaaacgagacatcattggattcttttttaatcgaaattatcctttagtttttcctcttagctttttcatttagaatttccttaaatagtatatcattagatatattgtttataaatcattttcttatgatgtcattctattttcttctatgaaattgaatggtgcagatgactatatttccaatattttatcccgaaatgatttaaatccttgatcttaaaatctcctacttgtgtatgcttactatatacaacctaaacatagagttagatgagtagtggtggtccaagaaagaatcattacttaagatatattttatataaatttaagtctttgactttaaattttagattctaaatagaaattttaaatttcagtttccaagactggattgaacattacaatttgacttttacaagttgataatatccattttctatcaatggagtcgaactgtatgtttacgtatggaatatgagttttgtattctgtgatcaggatccacttcgactattctaagaactctttgttgtaactagacctaaatcatcaaaagaccacaaccacattttatatctatggcatttgtatcttgctcatagtggttttgataagatcattctttgtaaagagatgacatgcctatatccacttgaaagtaagatcatctatattcaaatatggatgtgcattcaggggtagatatgagttatcgttaaattcttaagacgatcactctagattttaccttacgcaaagatcttgaaatgtttgagaaatttcgtgaatttttagcaatgttgaaaaacattaaggtaagtggttaaagatcttgcaaactgacaaaggtggagaaatattttgtggatatacatttcaaagatcattatgttgattttggaattgtatccaaacttacctccctaaggtctatgattagttactagcagttgcctaagtccttctagaaaataccctagtgataggaaaatttcagaatgatgcaatgactatgtacttagtatacaccatggctagattcagggatgtcctaatcgtgaacttaagaaaggctagaactgttaactaaggtttacaagtttgatagctattctaaagtnnnnnnnnnnnnnnnnnnnnnnggtcattaagataagaaagtgttcattttcaccaaatactacttttctaagaacatgactaaatctgaaagtagcaaagtagaggagatattttttttctcgattccaaagtgttctattatcttattctctataagatggtcccactgcctctgttgtcttacaaaactaatgaggtcaataccacttatgttctcagacagaaagtcacggtacctcgttgtagtaggagggtttcaaggaactcgccctgttatgacttggaagacacttgtgataaaatccattattagtttaaagatataatggatagtaagaataagaaactaagaagcaaagctaagagaactatggttcaaaccattcatatggagtaaccaaaatgttttctattacaa

SEQ ID NO: 149841 - DNA, 996 bp, Cannabis sativa
  modified_base (545)..(551): a, c, t, g, unknown or other
taaggtagttagggtgttacatagtcattcgccaaaagcgaggtcaacattttggtacttttattaagagacagaatcacaaactcactctttacttcaaatttaatcataaacacgatggtggtgcagactcgtagaggcgtggtcgatctagcaaatccatcggcagtggatcccgcaatacagaaccaaggaaatgcagctcaaagatcattaagttcattttttttaattgtatccaaacttacctccctagaaattcggtttgtacattgatgaaagtataaggtctatgattagttacttgtagttgcataagtccttctagggatttaccctagtgataagaaaattttagaatgatggaatggttgtgtacttagtgtaaacaattaatagaatcatggatgacctgatcacgatctttagaaaagctaaaactgttaactaaggtttgcatgtttgatagctattctatgtgattatgtgtggaccatcgcatagtcattagataagaaattgtttgtttcaacaaatactacttnnnnnnnaaaatgactaagtctgaaaacaaagtagcaaaatagaggagacaattttttttttcttgattccaaaagtgttctatcatcttattcaaaataagatggccccattgcctcttttgtcttgacacaatcgaagaggtcaataccatttagattcttagacagatagtcacggtacctcgtcatagtgtgagggtttcaaggaactccacttgttataactttggagacatttgtgattaaaatccattgtttgtttaaaaagaaatggattgtcagaataatgaactaacaagtaaagccaatagaactatggttaaaactattcatacggagttattaaaggttttctattacaaggacaagaaagaaaatttttgaaaataagtcttttcgacggacttaacaaaacatcttgttccttgtattaaaggtttgactttatcta

SEQ ID NO: 149842 - DNA, 1264 bp, Cannabis sativa
  modified_base (171)..(179): a, c, t, g, unknown or other
  modified_base (597)..(608): a, c, t, g, unknown or other
  modified_base (925)..(927): a, c, t, g, unknown or other
  modified_base (1007)..(1007): a, c, t, g, unknown or other
ataccctagtgataggaaattttaaaaatgatggaatggttgtatacttagtgtaaaccattactagattcatggatctcctgatcgtgaccttaagaactgttaactaatatttgcatgtttgatagctattctaggtgattagaggtggaccatcctatggtcattaannnnnnnnngtgtttgttttaacaaatactactttctaagaaaatgactaagtttgaaaataaagtagtaaagtagaggagatatttttatcttgattccaaattgttctatcatcttattctgtataaggtggtctcactgcctctgttgtcttgacacaaccgatgaggtcgctaccacttatgttcttagacaaaaagttacggtaccttgtcgtagtgggagagtttcaagaaactcaccctgttatgacttggaagacacttgtgattaaaaattcattgttattttaaacaagtaatggattgtcaaaataaggaactaagaagcaaagccaagagaactatagttaaaaccattcacatggagtaacttataagttttctattacaaggacaggaaaggaaattttgttaataagtctannnnnnnnnnnnaacaaaacttcctgttcctagtgttataggtttaattttatctaaacctaaggcttgtggtatacttggtgatttacttactctagttcaagaaacttactttagtaagatgctgaagcatttttttttctaatggaaatctataaaagcttctcgacttctaaatttagattttatttatctaagggacagattcaactatttcaaaaaagataaaggccaatgaaagaatttcttaagatcaacaatgagtggtctcagatatgcacatatgcttttagtatgcgttagactagacacctgttgttgagtgggannnatgagtaggtatcaaattaatccatgaaaggaacattggaagacaatcaagtaaagcttaagattaagaagaggaactanatgttagttgataagggtggtactttaatactcttagactacaccaaatcaggtttctagacttgcgttagtgctagaaagtctaccgatgagatggtgattactctaccagtgagactgaatattaaagttgcaggaaagatacttattccgcctgtggaaagttctatacagtttttgacattgtaccaataattaattaactactagtgtcacttcctgactaacacaaatgtagttgccaaaaagtaaagaat

SEQ ID NO: 149843 - DNA, 770 bp, Cannabis sativa
  modified_base (702)..(702): a, c, t, g, unknown or other
taaaaaacattacataattaattatttaacaaacttataattttataactattcaaaattaatattaaacaaaaatacacatttattaatataaaatacattaattactatatacacttaaaatctaaaattttacaaatttatacatttaaaacttttaagcaatatattatatatatataatatctatatattatatttattattatatacaaatttacatatttaaaatttttaaacaatacattatatatattactttatatacatactaaaatctaaacttttataaatttacatatttataatttttaacaatatattatatacatataatataatatatacactgtttaaaaattatatatgtatatacatatatacatataatatatataagataatatattatttaagaattatacatttgcatataacacatacatataatatcatacatacacatacacaaaattatatatttacacatacacaaaaaaattattaaacatttgcataaaaattaataaacacaaaattatatatttacacatacatttgcataaaaatttacacatacacagatatataaatacaatataccaattactaaacattcaaagattgaaaaaataaaaaaaataaacctgtaaatttttccgccaagctttacctcttcccgcgttttcactttccgttacngtttcgagcaaaatatctcccccaaaacttcaagcatggagaaaaaattaataactatcaaagaaaaa

SEQ ID NO: 149844 - DNA, 1056 bp, Cannabis sativa
tttaagtatagttttcataatgtaaaaaatgctagcataattttagtgtactatttatttttaagcatatattgtcaaatttcccttattaaaatttgaaaatttattaataaatatttaaattaaattattatttgttataaaattaatatgaatacacttttacaaaatgtactttgtattttttaaaataatataataatacgagattaaataagtgaaaaaattgaatataaaactcatttaaaatgaagatgttattggaatattttactttttttttgttttatgtatattgcaatgatgaaagtacccaaaacttgctaattagtttttccaactatcttgagaagctttccaaacctctacaattccacacacacactaaaagtctaaaaccctaaaccccaatccaccattcattgtcttaactcaactctaaactgaaaagaaaaagaatagatgaacacagagaaaatttgaaagacaattttctcagtagtttatttcgataggtgaacccctatttatataaaaataaggctaaaagaataaaaaatataatcaatgaaatataaaaaatacaacagtatttatggtaataatttaatttaagtgatttgaacatctatatatataatatttcattatactccatgttaaatgttcataataactttctcattaaaaacttgctagaaaatttaataggacaaaaatttgattaaaggaaaacgagtgcattgtgaattaactacttatcatttaggcattcgtggagatcttctaatcgacgaatttcaatcttatatgtcatcttctcaaatgttgatgttagtaatgattttatgaatatatttgcaagattgtcacttatcaaatttgttgaacatcagtcgagatcatcactctcttgaagatcgtgtgtgttgaccgagatttttgaaaaccaatttaataagataataatgagagctttgtggtaattaatgcagatgatttttacgtgattcaggcattaatgagccgtaatccacgagtctctgtattaatgag

SEQ ID NO: 149845 - DNA, 918 bp, Cannabis sativa
  modified_base (824)..(826): a, c, t, g, unknown or other
  modified_base (885)..(888): a, c, t, g, unknown or other
cccatcaaccatccgatccgatccaattggatatttaaaaataacatccaatccgatccgatcacaattggatatccaatgtttgttgtaattggatcagtaggttctcattggattggatcgatttatgcacacccctacccctaagtatatagagattatgatccacgcctaagggatatagagatcatggtccatctcttagtaatatagagatcatgtggagttatgaatataatccagagttcaatagatataaaagatcgttgaactgcacattattcttaactttttccacccctatcagatcaaaagatctttctattaaacaaattattaataattgttttagaattaacaactattcataaacatagaattgagaatctgagtgtttatgtagtattaactctttgtagagttgaatatactatagaatttgtatcaaaaatacatatacatacaaacattataacatataaatataattggtattggcatacattcataaatgcaattcattaataaatagaaaactttattataaaattatccaaaattaaaggaattgtctccaataatatgaaaaatagggaataaaatccgaaactaataattgaaatccaaattgttctaaaactaaaacaattaattcaaaaataataaaagaagatttcgagcttcatgttcatcttagactatttccacccatctgtccaaccatccaattcaactcgctaagatagcatccgagttcaagcagctggagctgaaataagaaaaaaaacatacaaacatggttaatgtaaagaccgcttagtttnnntttggaaattagcagataattagtgtttaattatgaaaaattatttattgatatttaannnnttatttatgttgatttatttgaattcagaa
